United States Patent Application Publication US 2024/0327476 A1 - sequence listing, part 20

SEQ ID NO: 22302 - DNA, 5642 bp, Homo sapiens
  source 1..5642: mol_type = unassigned DNA
agtatgttttgcagacaagacccagagaagtccagactggacttgttgcagactgcaaaactgccattggaaggcctccgtcccagtccttctacagagtagccagtgggattcccagccatgggcgaggtgacagcagaggaggtggagaagttcctggactcgaatattggctttgccaaacagtactacaacctccactaccgggccaagctcatctccgacctccttggggccaaggaggctgccgtggacttcagcaactaccactccccgagcagcatggaggagagcgaaatcatctttgatctcctgcgggactttcaggagaatttacagacagagaaatgcatcttcaatgtcatgaagaagctgtgcttcctcctgcaggcagaccgcatgagcctgttcatgtaccggacccgcaatggcatcgcagagctggccaccaggcttttcaatgtccacaaggatgctgtcctcgaggactgcctggtgatgcccgaccaagagatcgtcttccctttggacatgggcatcgtgggccatgtcgcacactctaagaagattgctaacgtccccaacacagaggaggatgagcatttctgtgactttgtggacatcctcacagagtacaagaccaagaacatcttggcttcccccataatgaatgggaaggatgtggtggccataatcatggctgtgaataaagtggatggatcccacttcaccaagagagatgaagagattcttctcaagtacctcaattttgcaaatctaatcatgaaggtgtaccacctgagttacctgcacaactgtgaaactcgacgtggccagatactgctgtggtctgggagcaaagtctttgaagaacttacggacatcgaacgacagttccacaaagccctgtacacagtccgtgctttcctcaactgtgacagatactctgtgggtctcttagacatgaccaagcagaaggaattttttgatgtgtggccggttctgatgggtgaagttccaccttactctggtcccaggactccggatggaagagaaattaacttttacaaggtcattgactacatcctgcatggcaaagaggacatcaaagtcatcccgaatccacctcctgaccattgggctttagtaagcggtctcccagcttatgttgcccagaatggcctgatttgcaacatcatgaatgcgcctgcggaggacttttttgcatttcagaaagaacctctggatgagtctggatggatgattaaaaatgtgctttcaatgccgattgtgaacaagaaggaagaaattgttggagtggccacattttacaatcgtaaagatgggaagccctttgatgaaatggatgagacgctcatggagtctttgactcaatttctgggctggtctgtcttaaatcctgacacctatgagtcaatgaataaacttgaaaataggaaggatattttccaggacatagtaaaatatcatgtgaagtgtgacaatgaagaaattcagaaaatcttgaaaaccagagaggtgtatgggaaggagccatgggagtgtgaggaagaggagctggctgagatcctgcaagcggagctgccagatgcagataaatacgaaattaataaatttcacttcagtgacttacccctaacagaactggagctggtaaaatgtggaatacagatgtattatgagctcaaagtggtggataaatttcacattccacaagaggccctggtgcggttcatgtactccctgagtaagggctaccgcaagatcacctaccacaactggcggcacggcttcaacgtggggcagaccatgttctccctgctggtgacgggaaagctgaagcgctacttcacggacctagaggccttggccatggtcactgctgctttctgccatgacattgaccacagaggcaccaataacctctaccagatgaaatcccagaacccactggccaagctccatgggtcctctatcttggaaagacaccacttggagtttggcaaaacactgctcagagacgagagcctgaatatctttcaaaacctcaatcgtcgacagcatgagcatgccatccacatgatggacattgcaatcattgccacagacctcgccctgtatttcaagaagaggacgatgttccaaaagatcgtggatcagtctaagacatatgagagtgaacaggagtggacacagtacatgatgctggagcagacacggaaggaaatcgttatggccatgatgatgaccgcctgtgatctctcagccatcaccaaaccctgggaggtgcagagccaggtagctctgctggtggctgctgaattctgggaacaaggtgacctggagcgcacggtgctgcaacagaatcccattcccatgatggacagaaacaaagcagatgaactccctaagcttcaagtcggcttcattgactttgtttgcaccttcgtctacaaggaattctcccgtttccacgaggagatcaccccaatgttggacgggatcaccaacaatcgcaaggagtggaaggcgcttgctgatgagtacgatgccaagatgaaggtgcaggaggagaagaagcagaaacagcagtcggccaagtcagcagccgcaggaaatcagccggggggaaaccccagcccagggggtgcaactacatccaagtcctgctgcatccagtaacaccactggggatgtgctggctggacggcaccaccctttcctgggaagagatgactcaagccagtggaagaccacacaccttgagaagtagaagagtcataggatttgaaagctgttagagaatttagcttccaggactgttcaatcttttggcttccctgggccacattggaagaattgtcttgggtcacacataaaatacagtaacactaatgatagctgttgaacttaaaaaaaaaaatcgccaaaaaaaaaaatttcataatgttttaagaaagtttatgaatttgtgttgggccgcattcaaagccgtcctgggctgcatgtggcccacgggccgtgggttgaacaagcttggcttataccttatccagtggcttttaaacattcttttagtcttgagaactgcctattgagctaaaaccaatattctagctttcatagacatcagttaaacatttaattacatttaattaatgccagattcactggcttgcttagaatcatttttgttcttatactttcagttaatgtattgtaaaaattttcaatcattttcaaaagtagagaattgtacgttgaatccccacatacccatcacccagattccaatatcaagattttgctacatgcatttcgtctgtcctttttacattttcttttcaattttttttcttacctgaagtgtttaaaggcaaatcctggccaggcgtggtggctcacacctgtaatcccagcacttcaggaggctgaggtgggcagactgcatgagcccaggagtctgagaccaacctgagcaaaatggcaaaaccctgtctctacaaaaaatacaaaaattagcactcacctgtagtctcagctacctgggaggcagaggtgagaggatctcttgaacccaggaggcggaagttgcagtgagctgagatcatgctactgcactccagcttgggcgaccgagcgagactctgactcaaacaaaagcaaaagaaaaggcaaatcccaaacatatcatttcacacctctactatctcatctttaaagaaataagtatgttttctaacataaccacatcactggcccatgcaaccaatgcctgcctaatacccagctgtgatctatgctttgatgggctgcacagaccccaagcttcagcaaaggacttgggaccccaccagctttgagtgctgttgacagacccttagtatcaaccccatcaggtgttactgcagccttccccagggtggcctacacccaatgactgatccatgccaggtggagaggcctggccatcttggctgagcatgggataactgtgcagggctgttccagctccacgactcctcgtggggtccactaaggctgtcgctgggctcacatcccaactcgacttctccctctgcccactcctatttccttcccttccccaagcatcggtccccagggcactgcttaataagcatcctgcagactaagtccattttagagtctgctttctgggacacccaacttgtgatgccagcccttaatcaaccttccttcattctcatgaacgttttcaatggttggcttgcctgaatctgatccaaacaaattcacatattgaatttagttgtttctttttgttggtttttagaaaaaagaagatgtactttttattcttggatttttcattgatttcacagagtataaattaagtcagattattctcaattccagaacttctgtttcttaaattagcaggcattctgttggtttaaaaagatagatgttggccgggcgcggtggctcacgcctgtaattccagcactttgggaggccaaggtgggtggatcacctgaggtcaggagttcaagaccagcctggccaacatggtgaaaccccatctctactaaaaatacaaaaattagctgggtgtggtggtgtgcacctgtaatcccagctactcaggaggctgaggcaggagaatcgcttgaacctgggaggcgaaggttgcagtgagctgagatcatgccactgcactccagcctgggcaacaagagcaagactccgtctcaaaaaaaaaaaaaagaaaaaaaaaagatgtggcagatagaatttctctctttctctatctttcatgacgaggtctcactctgtcgcccaggctggagtgcagtggtatgaccatagctcactggagccccagctgcccgggctcaagcaatcctccatctcagcttaccaagcagcggtgaccacaggcatgcaccaccatgcccagctaattttttaaaacctatctttgtagacatggggtctcattctgttgcccaggctggcctcaaactcctgacttcaagcaatcctcctgcctcagcctcccaaagtgttgggattacaggcgtgagccactgcacctggccaggacttatttcttttaaaccgaatctaagtatgttctggcaagtatgcaatacctagcggaatgcactggcctgatcagcattcataccatagtaactgatgttgaaaacagcacaaataaaccagaagttgaaaatggcaataacatgctaaaaatttgcaagtcaatttgttacacttgtccaaatcttgattttttttccttctctatcgttccccccccaccaccagctttatggaggtataattagcaaataaaaagtatacatatttaaggtatacactgtgatgttttgatatacattgtgaaatggttaccataattaagctaattaatatatccatcacctcacatagccatggttaagtttctgaagtctcttttaatctacaaagtactccttccttttttccattgtcatcaccttgcagaaacagagtcagttttcccacattctgtatttatctgtttgtttctttgtggccgcatgtaacacattcctctgtctcattctaataaatggacattagctcta

SEQ ID NO: 22303 - DNA, 2120 bp, Homo sapiens
  source 1..2120: mol_type = unassigned DNA
gcagcggaggagagggagctggcaccatgcggtagaagacccagcggccgccgcgagtgtgaggaggcagggcctggtggggcctgggtctgggccttgaccaaggaggcagagaaaggtggcccaaggagggccctggggtgctgctgtggtcggccaacaaggtgtttgaggagctgacggacatcgagaggcagttccacaaggccttctacacggtgcgggcctacctcaactgcgagcggtactccgtgggcctcctggacatgaccaaggagaaggaattttttgacgtgtggtctgtgctgatgggagagtcccagccgtactcgggcccacgcacgcctgatggccgggaaattgtcttctacaaagtgatcgactacgtcctccacggcaaggaggagatcaaggtcattcccacaccctcagccgatcactgggccctggccagcggccttccaagctacgtggcagaaagcggctttatttgtaacatcatgaatgcttccgctgacgaaatgttcaaatttcaggaaggggccctggacgactccgggtggctcatcaagaatgtgctgtccatgcccatcgtcaacaagaaggaggagattgtgggagtcgccacattttacaacaggaaagacgggaagccctttgacgaacaggacgaggttctcatggagtccctgacacagttcctgggctggtcagtgatgaacaccgacacctacgacaagatgaacaagctggagaaccgcaaggacatcgcacaggacatggtcctttaccacgtgaagtgcgacagggacgagatccagctcatcctgccaaccagagcgcgcctggggaaggagcctgctgactgcgatgaggacgagctgggcgaaatcctgaaggaggagctgccagggcccaccacatttgacatctacgaattccacttctctgacctggagtgcaccgaactggacctggtcaaatgtggcatccagatgtactacgagctgggcgtggtccgaaagttccagatcccccaggaggtcctggtgcggttcctgttctccatcagcaaagggtaccggagaatcacctaccacaactggcgccacggcttcaacgtggcccagacgatgttcacgctgctcatgaccggcaaactgaagagctactacacggacctggaggccttcgccatggtgacagccggcctgtgccatgacatcgaccaccgcggcaccaacaacctgtaccagatgaagtcccagaaccccttggctaagctccacggctcctcgattttggagcggcaccacctggagtttgggaagttcctgctctcggaggagaccctgaacatctaccagaacctgaaccggcggcagcacgagcacgtgatccacctgatggacatcgccatcatcgccacggacctggccctgtacttcaagaagagagcgatgtttcagaagatcgtggatgagtccaagaactaccaggacaagaagagctgggtggagtacctgtccctggagacgacccggaaggagatcgtcatggccatgatgatgacagcctgcgacctgtctgccatcaccaagccctgggaagtccagagcaaggtcgcacttctcgtggctgctgagttctgggagcaaggtgacttggaaaggacagtcttggatcagcagcccattcctatgatggaccggaacaaggcggccgagctccccaagctgcaagtgggcttcatcgacttcgtgtgcacattcgtgtacaaggagttctctcgtttccacgaagagatcctgcccatgttcgaccgactgcagaacaataggaaagagtggaaggcgctggctgatgagtatgaggccaaagtgaaggctctggaggagaaggaggaggaggagagggtggcagccaagaaagtaggcacagaaatttgcaatggcggcccagcacccaagtcttcaacctgctgtatcctgtgagcactggtcccatggggaccctatggctccctcaatcttcacccactaggatttgggttctgcctgtggctatttgctacaagaggttaggaagcccaagaaaatgactgaagatcattctggata

SEQ ID NO: 22304 - DNA, 3280 bp, Homo sapiens
  source 1..3280: mol_type = unassigned DNA
tgcgtgcctggagcagcagcgtctccagggacaggcagccaccatgagcctcagtgaggagcaggcccggagctttctggaccagaaccccgattttgcccgccagtactttgggaagaaactgagccctgagaatgtggccgcggcctgcgaggacgggtgcccgccggactgcgacagcctccgggacctctgccaggtggaggagagcacggcgctgctggagctggtgcaggatatgcaggagagcatcaacatggagcgcgtggtcttcaaggtcctgcggcgcctctgcaccctcctgcaggccgaccgctgcagcctcttcatgtaccgccagcgcaacggcgtggccgagctggccaccaggcttttcagcgtgcagccggacagcgtcctggaggactgcctggtgccccccgactccgagatcgtcttcccactggacatcggggtcgtgggccacgtggctcagaccaaaaagatggtgaacgtcgaggacgtggccgagtgccctcacttcagctcatttgctgacgagctcactgactacaagacaaagaatatgctggccacacccatcatgaatggcaaagacgtcgtggcggtgatcatggcagtgaacaagctcaacggcccattcttcaccagcgaagacgaagatgtgttcttgaagtacctgaattttgccacgttgtacctgaagatctatcacctgagctacctccacaactgcgagacgcgccgcggccaggtgctgctgtggtcggccaacaaggtgtttgaggagctgacggacatcgagaggcagttccacaaggccttctacacggtgcgggcctacctcaactgcgagcggtactccgtgggcctcctggacatgaccaaggagaaggaattttttgacgtgtggtctgtgctgatgggagagtcccagccgtactcgggcccacgcacgcctgatggccgggaaattgtcttctacaaagtgatcgactacgtcctccacggcaaggaggagatcaaggtcattcccacaccctcagccgatcactgggccctggccagcggccttccaagctacgtggcagaaagcggctttatttgtaacatcatgaatgcttccgctgacgaaatgttcaaatttcaggaaggggccctggacgactccgggtggctcatcaagaatgtgctgtccatgcccatcgtcaacaagaaggaggagattgtgggagtcgccacattttacaacaggaaagacgggaagccctttgacgaacaggacgaggttctcatggagtccctgacacagttcctgggctggtcagtgatgaacaccgacacctacgacaagatgaacaagctggagaaccgcaaggacatcgcacaggacatggtcctttaccacgtgaagtgcgacagggacgagatccagctcatcctgccaaccagagcgcgcctggggaaggagcctgctgactgcgatgaggacgagctgggcgaaatcctgaaggaggagctgccagggcccaccacatttgacatctacgaattccacttctctgacctggagtgcaccgaactggacctggtcaaatgtggcatccagatgtactacgagctgggcgtggtccgaaagttccagatcccccaggaggtcctggtgcggttcctgttctccatcagcaaagggtaccggagaatcacctaccacaactggcgccacggcttcaacgtggcccagacgatgttcacgctgctcatgaccggcaaactgaagagctactacacggacctggaggccttcgccatggtgacagccggcctgtgccatgacatcgaccaccgcggcaccaacaacctgtaccagatgaagtcccagaaccccttggctaagctccacggctcctcgattttggagcggcaccacctggagtttgggaagttcctgctctcggaggagaccctgaacatctaccagaacctgaaccggcggcagcacgagcacgtgatccacctgatggacatcgccatcatcgccacggacctggccctgtacttcaagaagagagcgatgtttcagaagatcgtggatgagtccaagaactaccaggacaagaagagctgggtggagtacctgtccctggagacgacccggaaggagatcgtcatggccatgatgatgacagcctgcgacctgtctgccatcaccaagccctgggaagtccagagcaaggtcgcacttctcgtggctgctgagttctgggagcaaggtgacttggaaaggacagtcttggatcagcagcccattcctatgatggaccggaacaaggcggccgagctccccaagctgcaagtgggcttcatcgacttcgtgtgcacattcgtgtacaaggagttctctcgtttccacgaagagatcctgcccatgttcgaccgactgcagaacaataggaaagagtggaaggcgctggctgatgagtatgaggccaaagtgaaggctctggaggagaaggaggaggaggagagggtggcagccaagaaaggcacagaaatttgcaatggcggcccagcacccaagtcttcaacctgctgtatcctgtgagcactggtcccatggggaccctatggctccctcaatcttcacccactaggatttgggttctgcctgtggctatttgctacaagaggttaggaagcccaagaaaatgactgaagatcattctggatattttaatttttttttttttttttttttgagatggagtcttgctctgtcacccaggctggagtgccgtggcacgatctcagctcactgcaacctccacctcccaggttcaagcgattctcgtgcctcagcctcctgagtagctgggactacaggcgcccaccaccacacatggctaatttttgtattttcagtacagatggggtttcaccatattgggcaggctggtctcgaactcctgacctcaggtgatcacccgcctcagcttcctgaagtgctgggattacaggcatgagccaccacgcccagcctgtttttataaactgaagccaactgtgaataaactgtagcctacattactcatccatttttggatagttaccactgggagacctttgaaaagggtccatgaactctgaaatcactgagaacatttgcagccacacatgtacatatgtgtacacaggtagacagatggacacaggccgtttctcatccagtttaggaaaacacacatgctcaggaattcagaataaaataaacagaaaacta

SEQ ID NO: 22305 - DNA, 3232 bp, Homo sapiens
  source 1..3232: mol_type = unassigned DNA
ctccagggacaggcagccaccatgagcctcagtgaggagcaggcccggagctttctggaccagaaccccgattttgcccgccagtactttgggaagaaactgagccctgagaatgtggccgcggcctgcgaggacgggtgcccgccggactgcgacagcctccgggacctctgccaggtggaggagagcacggcgctgctggagctggtgcaggatatgcaggagagcatcaacatggagcgcgtggtcttcaaggtcctgcggcgcctctgcaccctcctgcaggccgaccgctgcagcctcttcatgtaccgccagcgcaacggcgtggccgagctggccaccaggcttttcagcgtgcagccggacagcgtcctggaggactgcctggtgccccccgactccgagatcgtcttcccactggacatcggggtcgtgggccacgtggctcagaccaaaaagatggtgaacgtcgaggacgtggccgagtgccctcacttcagctcatttgctgacgagctcactgactacaagacaaagaatatgctggccacacccatcatgaatggcaaagacgtcgtggcggtgatcatggcagtgaacaagctcaacggcccattcttcaccagcgaagacgaagatgtgttcttgaagtacctgaattttgccacgttgtacctgaagatctatcacctgagctacctccacaactgcgagacgcgccgcggccaggtgctgctgtggtcggccaacaaggtgtttgaggagctgacggacatcgagaggcagttccacaaggccttctacacggtgcgggcctacctcaactgcgagcggtactccgtgggcctcctggacatgaccaaggagaaggaattttttgacgtgtggtctgtgctgatgggagagtcccagccgtactcgggcccacgcacgcctgatggccgggaaattgtcttctacaaagtgatcgactacgtcctccacggcaaggaggagatcaaggtcattcccacaccctcagccgatcactgggccctggccagcggccttccaagctacgtggcagaaagcggctttatttgtaacatcatgaatgcttccgctgacgaaatgttcaaatttcaggaaggggccctggacgactccgggtggctcatcaagaatgtgctgtccatgcccatcgtcaacaagaaggaggagattgtgggagtcgccacattttacaacaggaaagacgggaagccctttgacgaacaggacgaggttctcatggagtccctgacacagttcctgggctggtcagtgatgaacaccgacacctacgacaagatgaacaagctggagaaccgcaaggacatcgcacaggacatggtcctttaccacgtgaagtgcgacagggacgagatccagctcatcctgccaaccagagcgcgcctggggaaggagcctgctgactgcgatgaggacgagctgggcgaaatcctgaaggaggagctgccagggcccaccacatttgacatctacgaattccacttctctgacctggagtgcaccgaactggacctggtcaaatgtggcatccagatgtactacgagctgggcgtggtccgaaagttccagatcccccaggaggtcctggtgcggttcctgttctccatcagcaaagggtaccggagaatcacctaccacaactggcgccacggcttcaacgtggcccagacgatgttcacgctgctcatgaccggcaaactgaagagctactacacggacctggaggccttcgccatggtgacagccggcctgtgccatgacatcgaccaccgcggcaccaacaacctgtaccagatgaagtcccagaaccccttggctaagctccacggctcctcgattttggagcggcaccacctggagtttgggaagttcctgctctcggaggagaccctgaacatctaccagaacctgaaccggcggcagcacgagcacgtgatccacctgatggacatcgccatcatcgccacggacctggccctgtacttcaagaagagagcgatgtttcagaagatcgtggatgagtccaagaactaccaggacaagaagagctgggtggagtacctgtccctggagacgacccggaaggagatcgtcatggccatgatgatgacagcctgcgacctgtctgccatcaccaagccctgggaagtccagagcaaggtcgcacttctcgtggctgctgagttctgggagcaaggtgacttggaaaggacagtcttggatcagcagcccattcctatgatggaccggaacaaggcggccgagctccccaagctgcaagtgggcttcatcgacttcgtgtgcacattcgtgtacaaggagttctctcgtttccacgaagagatcctgcccatgttcgaccgactgcagaacaataggaaagagtggaaggcgctggctgatgagtatgaggccaaagtgaaggctctggaggagaaggaggaggaggagagggtggcagccaagaaagtaggcacagaaatttgcaatggcggcccagcacccaagtcttcaacctgctgtatcctgtgagcactggtcccatggggaccctatggctccctcaatcttcacccactaggatttgggttctgcctgtggctatttgctacaagaggttaggaagcccaagaaaatgactgaagatcattctggatattttaatttttttttttttttttttttgagatggagtcttgctctgtcacccaggctggagtgccgtggcacgatctcagctcactgcaacctccacctcccaggttcaagcgattctcgtgcctcagcctcctgagtagctgggactacaggcgcccaccaccacacatggctaatttttgtattttcagtacagatggggtttcaccatattgggcaggctggtctcgaactcctgacctcaggtgatcacccgcctcagcttcctgaagtgctgggattacaggcatgagccaccacgcccagcctgtttttataaactgaagccaactgtgaataaactgtagcctacattactcatccatttttggatagttaccactgggagacctttgaaaagggtccatgaactctgaaatcactgagaacatttgcagccacacatgtacatatgtgtacacaggtagacagatggacacaggccgtttctcatccagtttaggaaaacacacatgctcag

SEQ ID NO: 22306 - DNA, 3307 bp, Homo sapiens
  source 1..3307: mol_type = unassigned DNA
ctttggaagtcctatgagggaccatttacggtttcctcagtaatttccaccaggatgaatttccttctcatcactctgcctcaggtagtgctctgaaggtcgtcctttctgaacaaacgcagcaaagcaagccacaccatgggtgagatcaaccaagttgccgtggagaaatacctggaggagaaccctcagtttgccaaggagtactttgacaggaagttgcgggtggaggtgctgggagaaatcttcaagaacagccaggtgccagtccagtccagcatgtccttctctgagctgacccaggtggaggagtcagccctgtgcttggagctgctgtggaccgtgcaggaggaggggggcaccccagagcagggggttcacagggccctgcagaggctggcccacctgctccaggctgaccgctgcagcatgttcctgtgccggtcccggaacggcatacctgaggtggcctctaggttgctggatgtcacccccacctccaagtttgaggacaacctggtgggccctgacaaagaagttgtgtttccattggacattgggatagtgggttgggctgctcacacgaagaaaactcataatgtcccagatgtgaaaaagaacagccatttttctgacttcatggacaagcaaactgggtatgtcactaagaacctgctggcaaccccgatcgtggtgggcaaggaggttcttgctgtgatcatggcagttaacaaagtaaatgcatctgaattttccaaacaggatgaagaggtcttttccaaatacctcaactttgtgtctatcatcctaaggcttcatcacaccagctacatgtacaatattgaatcccgaagaagccagatccttatgtggtcagccaataaagtatttgaagaactcacagatgttgagcgacagtttcacaaagcgctctacacggttagatcatatctgaactgtgaacgatactccattggactgctggacatgaccaaggagaaggaattctacgatgaatggccaatcaagcttggagaagtagagccttataaaggtccaaagacacctgatggcagggaagtcaacttttataaaatcattgattacattttacatggaaaagaagagatcaaagtgattccgacgcctcctgcagaccactggacactcattagtgggttgccaacatatgttgctgaaaatggatttatctgtaacatgatgaatgcccctgcggatgaatacttcacatttcagaaaggacctgtagacgaaactggttgggtcattaagaatgttttgtccctgcctattgtcaacaagaaagaagatattgtgggagtggctacattttacaacaggaaggatggaaaacctttcgatgagcatgatgaatacattaccgagactctcacacaatttcttggatggtctcttttaaatactgacacctacgataagatgaataagctagaaaacagaaaggacattgctcaggaaatgctcatgaaccaaaccaaagccactcctgaagaaattaagtccattttgaaatttcaagagaagttaaatgttgatgtaattgacgactgtgaagaaaaacaacttgttgcaattttgaaagaggacttgccagacccacgctcagcagaactgtacgaattccgcttcagtgacttcccccttacagagcacggattgattaaatgtggaatacgactgttttttgaaataaatgtggtggagaaattcaaagtacctgtagaggttcttaccagatggatgtacactgtgaggaaagggtaccgagctgtcacttaccacaattggcggcatgggttcaacgtggggcagaccatgtttactttgctgatgacaggaagattaaagaagtactacacagatctcgaagcctttgccatgcttgctgctgctttctgccatgatattgaccacagaggcaccaataatttgtaccagatgaaatccacgtctccattagcaagacttcatggttcttctattttggagaggcaccacctggagtacagtaagactctgttgcaggatgagagtttaaacatcttccagaacctaaataagcggcagtttgaaacagttattcatttgttcgaggtcgcaataatagcaactgacctggctttatatttcaagaagaggaccatgtttcaaaaaattgttgatgcctgtgaacaaatgcaaacggaagaagaagccatcaaatatgtaactgttgatccaaccaagaaagagattatcatggcaatgatgatgacggcatgtgacttgtctgctattaccaagccctgggaggtgcaaagtcaggtagcacttatggttgcaaatgaattttgggaacaaggagatctggagagaacagtgttgcagcaacaacccattcctatgatggacagaaacaaaagagatgaattacctaaacttcaagttggatttattgattttgtttgtacttttgtatataaggagttctcacggtttcacaaagaaatcacacctatgctgagtggtcttcagaataacagagtagaatggaaatcactagctgatgagtatgatgcaaagatgaaggtcattgaagaggaggcaaaaaagcaagaaggaggagccgaaaaagctgctgaagattcaggaggtggtgatgacaaaaagtccaaaacatgtttaatgttgtaatattatctaactggtctaaacttcaaatatcattttacctttgaagaaaaccagaaaacattcaaaagaacttcaacaaatcatcacgtaacaggatcttcagaaaaactaccctgtgactatgaagaaaatatatattgctagcccaaaaatcccaggggcaaaataaagttcaacaaaagtgcaaaatatgacaaaaataggtacatttttggtgccaatttattttaaattaaaaaatatgcaatcctgaaactagtcacaaattcttttttaaaacattaattgtatttatttgctaaggctgctataacaaagtaccacagactgggtgcttaaccaatagaaatgtattttctcaaagtcctgggggctggaagttcaagatcaaggagttggcagggttggtttcttgggaggcctctcaacttggtttgcagatggccatcttctccctgtgtcttcacatggtcttccctctgtgtgtctgtgtcctaatctccttttcttataaggactccagtaggactggattagggcctacccatgtgacctcattttagtcttaattacctcgttaatggccttatct

SEQ ID NO: 22307 - DNA, 1175 bp, Homo sapiens
  source 1..1175: mol_type = unassigned DNA
ctgcgaggctagggggaaggagaagggatcagaagcgggagctgaggggagagagaggccggtcctggtctggccgctgcggctgctagcccgaggtctccaagccgggctgcggctccatcctcggctcctgggcaccgtctgcgaggctccgccgaccagagtgagaaagccgcgggcggcgaccgccgcatcatgtcagccaaggacgagcgggccagggagatcctgaggggcttcaaactaaattggatgaaccttcgggatgctgagacagggaagatactctggcaaggaacagaagacctgtctgtccctggtgtggagcatgaagcccgtgttcccaagaaaatcctcaagtgcaaggcagtgtctcgagaacttaatttttcttcgacagaacaaatggaaaaattccgcctggaacaaaaagtttacttcaaagggcaatgcctagaagaatggttcttcgagtttggctttgtgatccctaactccacaaatacctggcagtccttgatagaggcagcacccgagtcccagatgatgccagcaagcgtcttaactgggaacgttatcatagaaacaaagttttttgacgacgatcttcttgtaagcacatccagagtgagacttttctatgtttgaaagaagaatgtgtgtacatttcaagaatttgggttttttggagggaggaggaaactgtttacttttttcctccacacgtttgatttttgacacatacacccctaattccctcaacagcagaacctacctgcagccaccaggggaccagctctgtgtaggtaaccagatggctctttttcccaagccaccatcttccagctgaccagactaaactcccaaccccagaccagggcaggggacaggtctcaagtccttcccagcatacacacagggaacaaacacataccacaaaccggtaactgtacctgtcaccctccttgtctcctccttgggccctacaggctacacatctacctttggcccctggttttggaaaaattccgtgttcctgacccatgtttagttttttcctaccatttctatttcatacattctcatacatttaacttgtaaaatagactgtgatattattacataatgtaattaaaaatatgaattaaaatattcctacagtctttagcatggca

SEQ ID NO: 22308 - DNA, 1505 bp, Homo sapiens
  source 1..1505: mol_type = unassigned DNA
ggcttgcccttgaaggaactcaacattgtccttgcttctgtgcttgggaagacccacaggcccctaagggcgggggggggtccttgtttggtttcaggagcagcaggtgcaaaggccctggggtgggaggggtgagatgtgaggccacagcagcgggtgagggccaggctgcagagggttttggggaccatgaaggtgggcccttcagagatcaggcagggtcaggaaaggcagtagggaggcccaagacagcagacactgtggttgcttccatctggaagatgggcagctgcaggagcctggctgttcagggtcacacttctctccctgtcccggccccatctgctgggtgtccttccttggagcccttgacagcacctgagcccctcctctccatcccctgaaccttggtggttgtgccccccctcggggcccaacaatctcattagggtggcactgagacgcctaatcagctcatgaagcagcgagataaaggccggggctggcaccctgcggagggaggcccagcactcacagcacagccccctgagacccgccctgcacttgaccgcagcaggagggagtccaggagccaaggttgccgcggtgtctccgtcagcctcaccatgaacctggaaccgcccaaggctgagttccggtcagccaccagggtggccgggggacctgtcacccccaggaaagggccccctaaatttaagcagcgacagaccaggcagttcaagagcaagcccccaaagaaaggcgttcaagggtttggggacgacatccctggaatggaaggcctgggaacagacatcacagtcatctgcccttgggaggccttcaaccacctggagctgcacgagctggcccaatatggcatcatctagcacgaggccctgctgaagtccagaccctccccctcctgcccactgtgctctaaaccctgctcaggattcctgttgaggagatgcctccctagcccagatggcacctggacaccaggatgggactgcaacctcaggtctccccctacatattaataccagtcaccaggagcccaccacctccctctaggatgccccctcaggggctggccaggccctgctcaacatctggagatacaggcccacccctcagtcctgcccacagagaggcttggtcggtctccactcccagggagaacgggaagtggaccccagcccgggagcctgctggaccccagatcgtcccctcctcccagctggaaagctagggcaggtctccccagagtgcttctgcaccccagccccctgtcctgcctgtaaggggatacagagaagctccccgtctctgcatcccttcccaggggggtgcccttagtttggacatgctgggtagcaggactccagggcgtgcacggtgagcagatgaggccccaagctcatcacaccagggggccatccttctcaatacagcctgcccttgcagtccctatttcaaaataaaattagtgtgtccttgcc

SEQ ID NO: 22309 - DNA, 1023 bp, Homo sapiens
  source 1..1023: mol_type = unassigned DNA
cagcgagataaaggccggggctggcaccctgcggagggaggcccagcactcacagcacagccccctgagacccgccctgcacttgaccgcagcaggagggagtccaggagccaaggttgccgcggtgtctccgtcagcctcaccatgaacctggaaccgcccaaggctgagttccggtcagccaccagggtggccgggggacctgtcacccccaggaaagggccccctaaatttaagcagcgacagaccaggcagttcaagagcaagcccccaaagaaaggcgttcaagggtttggggacgacatccctggaatggaaggcctgggaacagacatcacagtcatctgcccttgggaggccttcaaccacctggagctgcacgagctggcccaatatggcatcatctagcacgaggccctgctgaagtccagaccctccccctcctgcccactgtgctctaaaccctgctcaggattcctgttgaggagatgcctccctagcccagatggcacctggacaccaggatgggactgcaacctcaggtctccccctacatattaataccagtcaccaggagcccaccacctccctctaggatgccccctcaggggctggccaggccctgctcaacatctggagatacaggcccacccctcagtcctgcccacagagaggcttggtcggtctccactcccagggagaacgggaagtggaccccagcccgggagcctgctggaccccagatcgtcccctcctcccagctggaaagctagggcaggtctccccagagtgcttctgcaccccagccccctgtcctgcctgtaaggggatacagagaagctccccgtctctgcatcccttcccaggggggtgcccttagtttggacatgctgggtagcaggactccagggcgtgcacggtgagcagatgaggccccaagctcatcacaccagggggccatccttctcaatacagcctgcccttgcagtccctatttcaaaataaaattagtgtgtccttgcc

SEQ ID NO: 22310 - DNA, 747 bp, Homo sapiens
  source 1..747: mol_type = unassigned DNA
caaagatccttttgtcttttgcaaagaaggcagctgggcagctgataggaacaacattcagctccgaggctgaaagggaaacatcagccgcccggggggagttaaaatgagtgacaacactactctgcctgctccagcttcaaaccagggtcctaccaccccacgcaaaggccctcccaagttcaagcagaggcagactcgccaattcaagagtaaacctccaaagaaaggtgtgaaaggatttggagatgacattccaggaatggaggggctaggaacagatatcacagtgatttgtccatgggaggcattcagccacctggaattgcatgagctcgctcagtttgggattatctgaagtgccagaggttctgccactctcaatgacatctgctgtaattttggttgcttttgccctgttgatctgccggagtcttgaaattcagctgattggaagtggtttctttgactttcaaggtcattccctatcagttactactaagagttctcttactgtcagaatctctcttgcagtacagctcaaaatagtggatgcatttcaaacttgaccaccttttcctaccagctagttagaagtcatcaatatttctctacattttgtttatctgtaagtcctttaaatctatttttgctaggcattcattatgattaatagtagacttttaagacaacatttatgtcactccccacctcctcatatttaataaaggagatatttaccttgaa

SEQ ID NO: 22311 - DNA, 2425 bp, Homo sapiens
  source 1..2425: mol_type = unassigned DNA
ggaaggcagctgcttgaggtccaaggcagtcagtgtcccctctcttttgcctcgggacagctggtatttatcagactcctaagaagttttccttgctccctagtagaagagagagattatgcagcgggcttttgattgatccaatgggaattacattgatctggtgtctggccttggttcttatcaagtggatcacctctaagaggcgtggagctatttcctatgacagttctgatcagactgcattatacattcgtatgctaggagatgtacgtgtaaggagccgagcaggatttgaatcagaaagaagaggttctcacccatatattgattttcgtattttccactctcaatctgaaattgaagtgtctgtctctgcaaggaatatcagaaggctactaagtttccagcgatatcttagatcttcacgcttttttcgtggtactgcggtttcaaattccctaaacattttagatgatgattataatggacaagccaagtgtatgctggaaaaagttggaaattggaattttgatatctttctatttgatagactaacaaatggaaatagtctagtaagcttaacctttcatttatttagtcttcatggattaattgagtacttccatttagatatgatgaaacttcgtagatttttagttatgattcaagaagattaccacagtcaaaatccttaccataacgcagtccacgctgcggatgttactcaggccatgcactgttacttaaaggaacctaagcttgccaattctgtaactccttgggatatcttgctgagcttaattgcagctgccactcatgatctggatcatccaggtgttaatcaacctttccttattaaaactaaccattacttggcaactttatacaagaatacctcagtactggaaaatcaccactggagatctgcagtgggcttattgagagaatcaggcttattctcacatctgccattagaaagcaggcaacaaatggagacacagataggtgctctgatactagccacagacatcagtcgccagaatgagtatctgtctttgtttaggtcccatttggatagaggtgatttatgcctagaagacaccagacacagacatttggttttacagatggctttgaaatgtgctgatatttgtaacccatgtcggacgtgggaattaagcaagcagtggagtgaaaaagtaacggaggaattcttccatcaaggagatatagaaaaaaaatatcatttgggtgtgagtccactttgcgatcgtcacactgaatctattgccaacatccagattggttttatgacttacctagtggagcctttatttacagaatgggccaggttttccaatacaaggctatcccagacaatgcttggacacgtggggctgaataaagccagctggaagggactgcagagagaacagtcgagcagtgaggacactgatgctgcatttgagttgaactcacagttattacctcaggaaaatcggttatcataacccccagaaccagtgggacaaactgcctcctggaggtttttagaaatgtgaaatggggtcttgaggtgagagaacttaactcttgactgccaaggtttccaagtgagtgatgccagccagcattatttatttccaagatttcctctgttggatcatttgaacccacttgttaattgcaagacccgaacatacagcaatatgaatttggctttcatgtgaaaccttgaatatgcaaagcccagcaggagagaatccgaaaggagtaacaaaggaagttttgatatgtgccacgactttttcaaagcatctaatcttcaaaacgtgaaacttgaattgttcagcaacaatctcttggaatttaaccagtctgatgcaacaatgtgtatcttgtaccttccactaagttctctctgagaaaatggaaatgtgaagtgcccagcctctgctgcctctggcaagacaatgtttacaaatcaactctgaaaatattggttctaaattgccttggagcatgattgtgaaggaaccactcaaacaaatttaaagatcaaactttagactgcagctctttccccctggtttgcctttttcttctttggatgccaccaaagcctcccatttgctatagttttatttcatgcactggaaactgagcatttatcgtagagtaccgccaagctttcactccagtgccgtttggcaatgcaattttttttagcaattagtttttaatttggggtgggaggggaagaacaccaatgtcctagctgtattatgattctgcagtgaagacattgcatgttgttttcactactgtacacttgacctgcacatgcgagaaaaaggtggaatgtttaaaacaccataatcagctcagggtatttgccaatctgaaataaaagtgggatggg

SEQ ID NO: 22312 - DNA, 2977 bp, Homo sapiens
  source 1..2977: mol_type = unassigned DNA
cgggcgtattcaatggaagtgtgttaccagctgccggtactgcccctggacaggccggtcccccagcacgtcctcagccgccgaggagccatcagcttcagctccagctccgctctcttcggctgccccaatccccggcagctctctcagaggcgtggagctatttcctatgacagttctgatcagactgcattatacattcgtatgctaggagatgtacgtgtaaggagccgagcaggatttgaatcagaaagaagaggttctcacccatatattgattttcgtattttccactctcaatctgaaattgaagtgtctgtctctgcaaggaatatcagaaggctactaagtttccagcgatatcttagatcttcacgcttttttcgtggtactgcggtttcaaattccctaaacattttagatgatgattataatggacaagccaagtgtatgctggaaaaagttggaaattggaattttgatatctttctatttgatagactaacaaatggaaatagtctagtaagcttaacctttcatttatttagtcttcatggattaattgagtacttccatttagatatgatgaaacttcgtagatttttagttatgattcaagaagattaccacagtcaaaatccttaccataacgcagtccacgctgcggatgttactcaggccatgcactgttacttaaaggaacctaagcttgccaattctgtaactccttgggatatcttgctgagcttaattgcagctgccactcatgatctggatcatccaggtgttaatcaacctttccttattaaaactaaccattacttggcaactttatacaagaatacctcagtactggaaaatcaccactggagatctgcagtgggcttattgagagaatcaggcttattctcacatctgccattagaaagcaggcaacaaatggagacacagataggtgctctgatactagccacagacatcagtcgccagaatgagtatctgtctttgtttaggtcccatttggatagaggtgatttatgcctagaagacaccagacacagacatttggttttacagatggctttgaaatgtgctgatatttgtaacccatgtcggacgtgggaattaagcaagcagtggagtgaaaaagtaacggaggaattcttccatcaaggagatatagaaaaaaaatatcatttgggtgtgagtccactttgcgatcgtcacactgaatctattgccaacatccagattggtaactatacatatttagatatagctggttagaaaaatgccactgtttttatcaagaagggaaatatatttgaaatataaaatattaaaattatgctcatttctatttttaaaaataatttaagaaattttacccttgttttcccttgttatggctcttctaattctcatttaattttaggatgtaaaaagtatatttttgcagaacaggcagcagcaataacttgtttctgttcttatgtaaataagaatccattattcgctcatgtggaagcttcttttgcatcatttgggactgccatttaaaaaaggataggtaaacaaagaaatgacaaaaataaaataaataaaataaaaatggataggtggtgacccactgagcctgatcataatacgaagaccagcttctgccactgcctttccagactcttaccactgcctgttgattaaatctaactcttcaacatcctagacaggcccttataatcttgcttcaaatgctgtgcagccatcttgcctcaacttccctctcatttgcctacagcatctcgggacgcttctgtgtttcccaagtatacgctgttctttcgctctttgtgcctcgccagtgctttccatgtgcctcgtagagttatttttcttgaagaggcagctcaaatgtcaccttctccagaagctgctctccacttgctttaggcagagtcagtcacttttcttctagattccaaagtgcctgatccacttggttgtggattcctggagcctagcaccacaccagaagcacgaggcccttgagaactgtgtgttgagtgaactaataactgtattatagaaagcataatgaaaatgtcctgtgactgaagtatgtgtagcttgttgcaggagttcacaggaaagttgactaggattgagtgtgttgggctttgggtataaaggagggggattctacgggggcagtagctcaacaaggaatagagggaggagtgtaattttggtagctggtgttgaatagggcctttgagaatcagactgaacacagtgaaatatgtgcccaaagttcagaaagatgaagtttccagaaactaagaaggtagcacaatatgtggcatcatactcagaaaggaagaccatgccatggggccagaaattcagaaacgtaattcttacattgtgattgcaatggatactcatggaagaaagtgggtagtggccgatttgacttcagagtgacaggtagagaagggaagagcgtgtagaactgtggccagactttaggagtgtgagggatgctgaatctcccagagagctcacactggccaggaatgctgagagtagcagatgcttttcttttgggaggatagtaaaacaatttagaaccagatatgctttgtcttgattctcaagtagaataatcttcaaatgcaaaagaatacattagaaatggacaaaagtggccaggagcggtagctcatacttgtaacccagcactttgggaagccgaggcgggctgatcgcttgaggtcaggagttcgagaccagcctggccaaaatagtgaaactcacgtttctactaaaaatacaaaaattagctgggtgtgatggccacttgggaggctgagataggagaatcgcttgaacctgggaggcagaggttgcagtgagccaatatcgtgccactgcattccagcctgggtgacagaatgaaactccatcactccatctc

SEQ ID NO: 22313 - DNA, 3673 bp, Homo sapiens
  source 1..3673: mol_type = unassigned DNA
gctgctcctgagtcccgcgcgccctgggtctggccgctggctccagctgtcttttcttgcactgctttgctccgttcgtgctgcgctcgaactctgcagtccgggtacctgctcctctcggccgaggagccccagggcggcggggttccctttccgactttgcctgtgctggccccgcttgcaccccgtcccccctcgcctggagcgaggcgcgcgccggtcctggtaattggcgccgcggccgccgcggagccttcccgccggcggcccgagcggagggctggggttggggaggcgtgagcgcggcttcccagcccggggtcggtccccgcccgccctgcccccgtctcggcccggagcccccgagccgcggccccctcccactgcaggggccggcggccgcggcagggcgggcgccgcgcggaggcagggcgggcgtattcaatggaagtgtgttaccagctgccggtactgcccctggacaggccggtcccccagcacgtcctcagccgccgaggagccatcagcttcagctccagctccgctctcttcggctgccccaatccccggcagctctctcagaggcgtggagctatttcctatgacagttctgatcagactgcattatacattcgtatgctaggagatgtacgtgtaaggagccgagcaggatttgaatcagaaagaagaggttctcacccatatattgattttcgtattttccactctcaatctgaaattgaagtgtctgtctctgcaaggaatatcagaaggctactaagtttccagcgatatcttagatcttcacgcttttttcgtggtactgcggtttcaaattccctaaacattttagatgatgattataatggacaagccaagtgtatgctggaaaaagttggaaattggaattttgatatctttctatttgatagactaacaaatggaaatagtctagtaagcttaacctttcatttatttagtcttcatggattaattgagtacttccatttagatatgatgaaacttcgtagatttttagttatgattcaagaagattaccacagtcaaaatccttaccataacgcagtccacgctgcggatgttactcaggccatgcactgttacttaaaggaacctaagcttgccaattctgtaactccttgggatatcttgctgagcttaattgcagctgccactcatgatctggatcatccaggtgttaatcaacctttccttattaaaactaaccattacttggcaactttatacaagaatacctcagtactggaaaatcaccactggagatctgcagtgggcttattgagagaatcaggcttattctcacatctgccattagaaagcaggcaacaaatggagacacagataggtgctctgatactagccacagacatcagtcgccagaatgagtatctgtctttgtttaggtcccatttggatagaggtgatttatgcctagaagacaccagacacagacatttggttttacagatggctttgaaatgtgctgatatttgtaacccatgtcggacgtgggaattaagcaagcagtggagtgaaaaagtaacggaggaattcttccatcaaggagatatagaaaaaaaatatcatttgggtgtgagtccactttgcgatcgtcacactgaatctattgccaacatccagattggttttatgacttacctagtggagcctttatttacagaatgggccaggttttccaatacaaggctatcccagacaatgcttggacacgtggggctgaataaagccagctggaagggactgcagagagaacagtcgagcagtgaggacactgatgctgcatttgagttgaactcacagttattacctcaggaaaatcggttatcataacccccagaaccagtgggacaaactgcctcctggaggtttttagaaatgtgaaatggggtcttgaggtgagagaacttaactcttgactgccaaggtttccaagtgagtgatgccagccagcattatttatttccaagatttcctctgttggatcatttgaacccacttgttaattgcaagacccgaacatacagcaatatgaatttggctttcatgtgaaaccttgaatatgcaaagcccagcaggagagaatccgaaaggagtaacaaaggaagttttgatatgtgccacgactttttcaaagcatctaatcttcaaaacgtgaaacttgaattgttcagcaacaatctcttggaatttaaccagtctgatgcaacaatgtgtatcttgtaccttccactaagttctctctgagaaaatggaaatgtgaagtgcccagcctctgctgcctctggcaagacaatgtttacaaatcaactctgaaaatattggttctaaattgccttggagcatgattgtgaaggaaccactcaaacaaatttaaagatcaaactttagactgcagctctttccccctggtttgcctttttcttctttggatgccaccaaagcctcccatttgctatagttttatttcatgcactggaaactgagcatttatcgtagagtaccgccaagctttcactccagtgccgtttggcaatgcaattttttttagcaattagtttttaatttggggtgggaggggaagaacaccaatgtcctagctgtattatgattctgcagtgaagacattgcatgttgttttcactactgtacacttgacctgcacatgcgagaaaaaggtggaatgtttaaaacaccataatcagctcagggtatttgccaatctgaaataaaagtgggatgggagagtgtgtccttcagatcaagggtactaaagtccctttcgctgcagtgagtgagaggtatgttgtgtgtgaatgtacggatgtgtgtttgcgtgcatgtttgtgcatgtgtgactgtgcatgttatgtttctccatgtgggcaaagatttgaaatgtaagcttttatttattattttagaatgtgacataatgagcagccacactcgggggaggggaaggttggtaggtaagctgtaacagattgctccagttgccttaaactatgcacatagctaagtgaccaaacttcttgttttgatttgaaaaaagtgcattgttttcttgtccctccctttgatgaaacgttaccctttgacgggccttttgatgtgaacagatgttttctaggacaaactataaggactaattttaaacttcaaacattccacttttgtaatttgttttaaattgttttatgtatagtaagcacaactgtaatctagttttaagagaaaccggtgctttcttttagttcatttgtatttcccttgttactgtaaaagactgtttattaattgtttacagtttgttgcaacagccattttcttgggagaaagcttgagtgtaaagccatttgtaaaaggctttgccatactcattttaatatgtgcctgttgctgttaacttttgatgaataaaaacctatcttttcatatttttatctttgacatttaccttataactcaatcttttggaaaacacaatgctaaattacaaggaaatcaaagttagcttcttggctcttgtaattcatccctcagatgtttactcagtccgagcttatctactaatgactcaccttgcaagtgagtaagcagaagcccagtt

SEQ ID NO: 22314 - DNA, 3984 bp, Homo sapiens
  source 1..3984: mol_type = unassigned DNA
agtagccgggccaaggcgggagcggctgcctctcagggtcgctccagggccgcgctaggaaagccgccgccgccgcagcgcccgcaccgcgataaaaggggcggccgcgtttcctgacgcgagatccgcgctcgccgccgcccgcccaggcggcgatgacacggcgcccgcggcggcccggaggcgccgggtgggccgtttgctgaccggatcgcggctacccgccagcgtgtccgcggcgccgccgccagcatgggctgtgccccgagcatccacatttccgagcgcctggtggccgaggacgcgcctagccccgcggcaccgccgctgtcgtccggcgggccgcgcctcccgcagggccagaagacggccgccttgccccggacccgcggcgccggcctcttggagtcggagcttcgcgacggcagcggcaagaaggtagcagtagctgatgtgcagtttggccccatgagatttcatcaagatcaacttcaggtacttttagtgtttaccaaagaagataaccaatgtaatggattctgcagggcatgtgaaaaagcagggtttaagtgtacagttaccaaggaggctcaggctgtccttgcctgtttcctggacaaacatcatgacattatcatcatagaccacagaaatcctcgacagctggatgcagaggcactgtgcaggtctatcagatcatcaaaactctcagaaaacacagttattgttggtgtagtacgcagggtggatagagaagagttgtccgtaatgcctttcatttctgctggatttacaaggaggtatgtagaaaaccccaacatcatggcctgctacaatgaactgctccagctggagtttggagaggtgcgatcacaactgaaactcagggcttgtaactcagtattcactgcattagaaaacagtgaagatgcaattgaaattacaagcgaagaccgttttatacagtatgcaaatcctgcatttgaaacaacaatgggctatcagtcaggtgaattaatagggaaggagttaggagaagtgcctataaatgaaaaaaaggctgacttgctcgatactataaattcatgcatcaggataggcaaggagtggcaaggaatttactatgccaaaaagaaaaacggagataatatacaacaaaatgtgaagataatacctgtcattggacagggaggaaaaattagacactatgtgtccattatcagagtgtgcaatggcaacaataaggctgagaaaatatccgaatgtgttcagtctgacactcatacagataatcagacaggcaaacataaagacaggagaaaaggctcactagacgtcaaagctgttgcctcccgtgcaactgaagtttccagccagagacgacactcttccatggcccggatacattccatgacaattgaggcgcccatcaccaaggtaatcaatattatcaatgctgcccaggaaagtagtcccatgcctgtgacagaagccctagaccgtgtgctggaaattctaagaaccactgagttatattcaccacagtttggtgctaaagatgatgatccccatgccaatgaccttgttgggggcttaatgtctgatggtttgcgaagactatcagggaatgaatatgttctttcaacaaaaaacactcaaatggtttcaagcaatataatcactcccatctcccttgatgatgtcccaccacggatagctcgggccatggaaaatgaggaatactgggactttgatatttttgaactggaggctgccacccacaataggcctttgatttatcttggtctcaaaatgtttgctcgctttggaatctgtgaattcttacactgctccgagtcaacgctaagatcatggttacaaattatcgaagccaattatcattcctccaatccctaccacaattctacacattctgctgatgtgcttcatgccactgcctattttctctccaaggagaggataaaggaaactttagatccaattgatgaggtcgctgcactcatcgcagccaccattcatgatgtggatcaccctgggagaaccaactccttcctgtgtaatgctggaagtgagctggccattttgtacaatgacactgctgtgctggagagccaccatgcggccttggccttccagctgaccactggagatgataaatgcaatatatttaaaaacatggagaggaatgattatcggacactgcgccaggggattatcgacatggtcttagccacagaaatgacaaagcactttgagcatgtcaacaaatttgtcaacagcatcaacaaacccttggcaacactagaagaaaatggggaaactgataaaaaccaggaagtgataaacactatgcttaggactccagagaaccggaccctaatcaaacgaatgctgattaaatgtgctgatgtgtccaatccctgccgacccctgcagtactgcatcgagtgggctgcacgcatttcggaagaatatttttctcagactgatgaagagaagcagcagggcttacctgtggtgatgccagtgtttgacagaaatacctgcagcatccccaaatcccaaatctctttcattgattacttcatcacagacatgtttgatgcttgggatgcctttgtagacctgcctgatttaatgcagcatcttgacaacaactttaaatactggaaaggactggacgaaatgaagctgcggaacctccgaccacctcctgaatagtgggagacaccacccagagccctgaagctttgttccttcggtcatttggaattcctgagggcagccagagctccttggtcctttcagtactaggcagaacagcccccgatctgcatagcctgtgaaagcccacggggacatcagtaaccttctgcagccaccatccaatgccattactgtcaagtgagacttggccactgtagcctgggcctgctgcaggagctcttcagaaaggcacatgaggaccacggtttgcctcagtttctggtaaaacacaaggtctggagtgcccctgcaaagggtattgatggacttcctgccagtgacagagcatgtctattgcaaacaattctctcagttacgttcagcacttaagaacggctaatggcaataggatctttagcaactttttcacatcatagaaggtgcaatcgctcacttgggaacactactgagagtgacttctcttttaaaattgagtagcagatgaaaaattaaaatttgaacttgattattaatatcaattaaaatgttttatttattttattaaaagctcaatattttctatgaattcaaaaatacttcagagccaaagccaacttcaaataccgtgaccaaatttacatgattcatattcattatgcattacttggtatacagacttattttcataatgcaaattaataaaatgacacttttactgcactatagaaatattcatgtatgttaaacttttctgattgaggctaactggaaaaagctggggtcgtattctaagtgctaaagaaggctgcttctactgtatagaacccagggctctgaaacagctctagccgcctaatgcacttcacaggtaactccccaaggtaaaactagactctcttgttggttcgcaaagaaaagttaggacttaacacttttttctaaaattttataattcaatttccaaaagtctactctattttatactgtttctacaaaatattccttataaaaacaaagaacaaaaattgaatatttaatgaattgacattttataaccaacctgtttttatctacggtgggaatctttgatgccagaaatttataaagaggttctgtatcttcacaccttgaataagcataataccataaaaaatgacacttgacatgtcaatgtatttgtcatttcattttaaactcgtatttgtggtttttttcccagataaaaatgaaattaaaccatttctttttaagaaatca

SEQ ID NO: 22315 - DNA, 2663 bp, Homo sapiens
  source 1..2663: mol_type = unassigned DNA
cgccgcagcgcccgcaccgcgataaaaggggcggccgcgtttcctgacgcgagatccgcgctcgccgccgcccgcccaggcggcgatgacacggcgcccgcggcggcccggaggcgccgggtgggccgtttgctgaccggatcgcggctacccgccagcgtgtccgcggcgccgccgccagcatgggctgtgccccgagcatccacatttccgagcgcctggtggccgaggacgcgcctagccccgcggcaccgccgctgtcgtccggcgggccgcgcctcccgcagggccagaagacggccgccttgccccggacccgcggcgccggcctcttggagtcggagcttcgcgacggcagcggcaagaaggtagcagtagctgatgtgcagtttggccccatgagatttcatcaagatcaacttcaggtacttttagtgtttaccaaagaagataaccaatgtaatggattctgcagggcatgtgaaaaagcagggtttaagtgtacagttaccaaggaggctcaggctgtccttgcctgtttcctggacaaacatcatgacattatcatcatagaccacagaaatcctcgacagctggatgcagaggcactgtgcaggtctatcagatcatcaaaactctcagaaaacacagttattgttggtgtagtacgcagggtggatagagaagagttgtccgtaatgcctttcatttctgctggatttacaaggaggtatgtagaaaaccccaacatcatggcctgctacaatgaactgctccagctggagtttggagaggtgcgatcacaactgaaactcagggcttgtaactcagtattcactgcattagaaaacagtgaagatgcaattgaaattacaagcgaagaccgttttatacaggagtggcaaggaatttactatgccaaaaagaaaaacggagataatatacaacaaaatgtgaagataatacctgtcattggacagggaggaaaaattagacactatgtgtccattatcagagtgtgcaatggcaacaataaggctgagaaaatatccgaatgtgttcagtctgacactcatacagataatcagacaggcaaacataaagacaggagaaaaggctcactagacgtcaaagctgttgcctcccgtgcaactgaagtttccagccagagacgacactcttccatggcccggatacattccatgacaattgaggcgcccatcaccaaggtaatcaatattatcaatgctgcccaggaaagtagtcccatgcctgtgacagaagccctagaccgtgtgctggaaattctaagaaccactgagttatattcaccacagtttggtgctaaagatgatgatccccatgccaatgaccttgttgggggcttaatgtctgatggtttgcgaagactatcagggaatgaatatgttctttcaacaaaaaacactcaaatggtttcaagcaatataatcactcccatctcccttgatgatgtcccaccacggatagctcgggccatggaaaatgaggaatactgggactttgatatttttgaactggaggctgccacccacaataggcctttgatttatcttggtctcaaaatgtttgctcgctttggaatctgtgaattcttacactgctccgagtcaacgctaagatcatggttacaaattatcgaagccaattatcattcctccaatccctaccacaattctacacattctgctgatgtgcttcatgccactgcctattttctctccaaggagaggataaaggaaactttagatccaattgatgaggtcgctgcactcatcgcagccaccattcatgatgtggatcaccctgggagaaccaactccttcctgtgtaatgctggaagtgagctggccattttgtacaatgacactgctgtgctggagagccaccatgcggccttggccttccagctgaccactggagatgataaatgcaatatatttaaaaacatggagaggaatgattatcggacactgcgccaggggattatcgacatggtcttagccacagaaatgacaaagcactttgagcatgtcaacaaatttgtcaacagcatcaacaaacccttggcaacactagaagaaaatggggaaactgataaaaaccaggaagtgataaacactatgcttaggactccagagaaccggaccctaatcaaacgaatgctgattaaatgtgctgatgtgtccaatccctgccgacccctgcagtactgcatcgagtgggctgcacgcatttcggaagaatatttttctcagactgatgaagagaagcagcagggcttacctgtggtgatgccagtgtttgacagaaatacctgcagcatccccaaatcccaaatctctttcattgattacttcatcacagacatgtttgatgcttgggatgcctttgtagacctgcctgatttaatgcagcatcttgacaacaactttaaatactggaaaggactggacgaaatgaagctgcggaacctccgaccacctcctgaatagtgggagacaccacccagagccctgaagctttgttccttcggtcatttggaattcctgagggcagccagagctccttggtcctttcagtactaggcagaacagcccccgatctgcatagcctgtgaaagc

SEQ ID NO: 22316 - DNA, 3912 bp, Homo sapiens
  source 1..3912: mol_type = unassigned DNA
ccgccgccgccgcagcgcccgcaccgcgataaaaggggcggccgcgtttcctgacgcgagatccgcgctcgccgccgcccgcccaggcggcgatgacacggcgcccgcggcggcccggaggcgccgggtgggccgtttgctgaccggatcgcggctacccgccagcgtgtccgcggcgccgccgccagcatgggctgtgccccgagcatccacatttccgagcgcctggtggccgaggacgcgcctagccccgcggcaccgccgctgtcgtccggcgggccgcgcctcccgcagggccagaagacggccgccttgccccggacccgcggcgccggcctcttggagtcggagcttcgcgacggcagcggcaagaaggtagcagtagctgatgtgcagtttggccccatgagatttcatcaagatcaacttcaggtacttttagtgtttaccaaagaagataaccaatgtaatggattctgcagggcatgtgaaaaagcagggtttaagtgtacagttaccaaggaggctcaggctgtccttgcctgtttcctggacaaacatcatgacattatcatcatagaccacagaaatcctcgacagctggatgcagaggcactgtgcaggtctatcagatcatcaaaactctcagaaaacacagttattgttggtgtagtacgcagggtggatagagaagagttgtccgtaatgcctttcatttctgctggatttacaaggaggtatgtagaaaaccccaacatcatggcctgctacaatgaactgctccagctggagtttggagaggtgcgatcacaactgaaactcagggcttgtaactcagtattcactgcattagaaaacagtgaagatgcaattgaaattacaagcgaagaccgttttatacagtatgcaaatcctgcatttgaaacaacaatgggctatcagtcaggtgaattaatagggaaggagttaggagaagtgcctataaatgaaaaaaaggctgacttgctcgatactataaattcatgcatcaggataggcaaggagtggcaaggaatttactatgccaaaaagaaaaacggagataatatacaacaaaatgtgaagataatacctgtcattggacagggaggaaaaattagacactatgtgtccattatcagagtgtgcaatggcaacaataaggctgagaaaatatccgaatgtgttcagtctgacactcatacagataatcagacaggcaaacataaagacaggagaaaaggctcactagacgtcaaagctgttgcctcccgtgcaactgaagtttccagccagagacgacactcttccatggcccggatacattccatgacaattgaggcgcccatcaccaaggtaatcaatattatcaatgctgcccaggaaagtagtcccatgcctgtgacagaagccctagaccgtgtgctggaaattctaagaaccactgagttatattcaccacagtttggtgctaaagatgatgatccccatgccaatgaccttgttgggggcttaatgtctgatggtttgcgaagactatcagggaatgaatatgttctttcaacaaaaaacactcaaatggtttcaagcaatataatcactcccatctcccttgatgatgtcccaccacggatagctcgggccatggaaaatgaggaatactgggactttgatatttttgaactggaggctgccacccacaataggcctttgatttatcttggtctcaaaatgtttgctcgctttggaatctgtgaattcttacactgctccgagtcaacgctaagatcatggttacaaattatcgaagccaattatcattcctccaatccctaccacaattctacacattctgctgatgtgcttcatgccactgcctattttctctccaaggagaggataaaggaaactttagatccaattgatgaggtcgctgcactcatcgcagccaccattcatgatgtggatcaccctgggagaaccaactccttcctgtgtaatgctggaagtgagctggccattttgtacaatgacactgctgtgctggagagccaccatgcggccttggccttccagctgaccactggagatgataaatgcaatatatttaaaaacatggagaggaatgattatcggacactgcgccaggggattatcgacatggtcttagccacagaaatgacaaagcactttgagcatgtcaacaaatttgtcaacagcatcaacaaacccttggcaacactagaagaaaatggggaaactgataaaaaccaggaagtgataaacactatgcttaggactccagagaaccggaccctaatcaaacgaatgctgattaaatgtgctgatgtgtccaatccctgccgacccctgcagtactgcatcgagtgggctgcacgcatttcggaagaatatttttctcagactgatgaagagaagcagcagggcttacctgtggtgatgccagtgtttgacagaaatacctgcagcatccccaaatcccaaatctctttcattgattacttcatcacagacatgtttgatgcttgggatgcctttgtagacctgcctgatttaatgcagcatcttgacaacaactttaaatactggaaaggactggacgaaatgaagctgcggaacctccgaccacctcctgaatagtgggagacaccacccagagccctgaagctttgttccttcggtcatttggaattcctgagggcagccagagctccttggtcctttcagtactaggcagaacagcccccgatctgcatagcctgtgaaagcccacggggacatcagtaaccttctgcagccaccatccaatgccattactgtcaagtgagacttggccactgtagcctgggcctgctgcaggagctcttcagaaaggcacatgaggaccacggtttgcctcagtttctggtaaaacacaaggtctggagtgcccctgcaaagggtattgatggacttcctgccagtgacagagcatgtctattgcaaacaattctctcagttacgttcagcacttaagaacggctaatggcaataggatctttagcaactttttcacatcatagaaggtgcaatcgctcacttgggaacactactgagagtgacttctcttttaaaattgagtagcagatgaaaaattaaaatttgaacttgattattaatatcaattaaaatgttttatttattttattaaaagctcaatattttctatgaattcaaaaatacttcagagccaaagccaacttcaaataccgtgaccaaatttacatgattcatattcattatgcattacttggtatacagacttattttcataatgcaaattaataaaatgacacttttactgcactatagaaatattcatgtatgttaaacttttctgattgaggctaactggaaaaagctggggtcgtattctaagtgctaaagaaggctgcttctactgtatagaacccagggctctgaaacagctctagccgcctaatgcacttcacaggtaactccccaaggtaaaactagactctcttgttggttcgcaaagaaaagttaggacttaacacttttttctaaaattttataattcaatttccaaaagtctactctattttatactgtttctacaaaatattccttataaaaacaaagaacaaaaattgaatatttaatgaattgacattttataaccaacctgtttttatctacggtgggaatctttgatgccagaaatttataaagaggttctgtatcttcacaccttgaataagcataataccataaaaaatgacacttgacatgtcaatgtatttgtcatttcattttaaactcgtatttgtggtttttttcccagataaaaatgaaattaaaccatttcttttt

SEQ ID NO: 22317 - DNA, 3716 bp, Homo sapiens
  source 1..3716: mol_type = unassigned DNA
tcggagaggacaggaaggagccggctgcaccgcgccagggtctccgcaaaccgggagcccagggagggcgggaagactggcgggggtccgaggcagcccgctacaggatacgtgatggacgcccagagacaccgccctccagctggtgggggaggagccccagccaccaagaagtagcagtagctgatgtgcagtttggccccatgagatttcatcaagatcaacttcaggtacttttagtgtttaccaaagaagataaccaatgtaatggattctgcagggcatgtgaaaaagcagggtttaagtgtacagttaccaaggaggctcaggctgtccttgcctgtttcctggacaaacatcatgacattatcatcatagaccacagaaatcctcgacagctggatgcagaggcactgtgcaggtctatcagatcatcaaaactctcagaaaacacagttattgttggtgtagtacgcagggtggatagagaagagttgtccgtaatgcctttcatttctgctggatttacaaggaggtatgtagaaaaccccaacatcatggcctgctacaatgaactgctccagctggagtttggagaggtgcgatcacaactgaaactcagggcttgtaactcagtattcactgcattagaaaacagtgaagatgcaattgaaattacaagcgaagaccgttttatacagtatgcaaatcctgcatttgaaacaacaatgggctatcagtcaggtgaattaatagggaaggagttaggagaagtgcctataaatgaaaaaaaggctgacttgctcgatactataaattcatgcatcaggataggcaaggagtggcaaggaatttactatgccaaaaagaaaaacggagataatatacaacaaaatgtgaagataatacctgtcattggacagggaggaaaaattagacactatgtgtccattatcagagtgtgcaatggcaacaataaggctgagaaaatatccgaatgtgttcagtctgacactcatacagataatcagacaggcaaacataaagacaggagaaaaggctcactagacgtcaaagctgttgcctcccgtgcaactgaagtttccagccagagacgacactcttccatggcccggatacattccatgacaattgaggcgcccatcaccaaggtaatcaatattatcaatgctgcccaggaaagtagtcccatgcctgtgacagaagccctagaccgtgtgctggaaattctaagaaccactgagttatattcaccacagtttggtgctaaagatgatgatccccatgccaatgaccttgttgggggcttaatgtctgatggtttgcgaagactatcagggaatgaatatgttctttcaacaaaaaacactcaaatggtttcaagcaatataatcactcccatctcccttgatgatgtcccaccacggatagctcgggccatggaaaatgaggaatactgggactttgatatttttgaactggaggctgccacccacaataggcctttgatttatcttggtctcaaaatgtttgctcgctttggaatctgtgaattcttacactgctccgagtcaacgctaagatcatggttacaaattatcgaagccaattatcattcctccaatccctaccacaattctacacattctgctgatgtgcttcatgccactgcctattttctctccaaggagaggataaaggaaactttagatccaattgatgaggtcgctgcactcatcgcagccaccattcatgatgtggatcaccctgggagaaccaactccttcctgtgtaatgctggaagtgagctggccattttgtacaatgacactgctgtgctggagagccaccatgcggccttggccttccagctgaccactggagatgataaatgcaatatatttaaaaacatggagaggaatgattatcggacactgcgccaggggattatcgacatggtcttagccacagaaatgacaaagcactttgagcatgtcaacaaatttgtcaacagcatcaacaaacccttggcaacactagaagaaaatggggaaactgataaaaaccaggaagtgataaacactatgcttaggactccagagaaccggaccctaatcaaacgaatgctgattaaatgtgctgatgtgtccaatccctgccgacccctgcagtactgcatcgagtgggctgcacgcatttcggaagaatatttttctcagactgatgaagagaagcagcagggcttacctgtggtgatgccagtgtttgacagaaatacctgcagcatccccaaatcccaaatctctttcattgattacttcatcacagacatgtttgatgcttgggatgcctttgtagacctgcctgatttaatgcagcatcttgacaacaactttaaatactggaaaggactggacgaaatgaagctgcggaacctccgaccacctcctgaatagtgggagacaccacccagagccctgaagctttgttccttcggtcatttggaattcctgagggcagccagagctccttggtcctttcagtactaggcagaacagcccccgatctgcatagcctgtgaaagcccacggggacatcagtaaccttctgcagccaccatccaatgccattactgtcaagtgagacttggccactgtagcctgggcctgctgcaggagctcttcagaaaggcacatgaggaccacggtttgcctcagtttctggtaaaacacaaggtctggagtgcccctgcaaagggtattgatggacttcctgccagtgacagagcatgtctattgcaaacaattctctcagttacgttcagcacttaagaacggctaatggcaataggatctttagcaactttttcacatcatagaaggtgcaatcgctcacttgggaacactactgagagtgacttctcttttaaaattgagtagcagatgaaaaattaaaatttgaacttgattattaatatcaattaaaatgttttatttattttattaaaagctcaatattttctatgaattcaaaaatacttcagagccaaagccaacttcaaataccgtgaccaaatttacatgattcatattcattatgcattacttggtatacagacttattttcataatgcaaattaataaaatgacacttttactgcactatagaaatattcatgtatgttaaacttttctgattgaggctaactggaaaaagctggggtcgtattctaagtgctaaagaaggctgcttctactgtatagaacccagggctctgaaacagctctagccgcctaatgcacttcacaggtaactccccaaggtaaaactagactctcttgttggttcgcaaagaaaagttaggacttaacacttttttctaaaattttataattcaatttccaaaagtctactctattttatactgtttctacaaaatattccttataaaaacaaagaacaaaaattgaatatttaatgaattgacattttataaccaacctgtttttatctacggtgggaatctttgatgccagaaatttataaagaggttctgtatcttcacaccttgaataagcataataccataaaaaatgacacttgacatgtcaatgtatttgtcatttcattttaaactcgtatttgtggtttttttcccagataaaaatgaaattaaaccatttctttttaagaaa

SEQ ID NO: 22318 - DNA, 5956 bp, Homo sapiens
  source 1..5956: mol_type = unassigned DNA
gcggccgcgggcgcgggcgggcgcgcgggggagcccggccgagggatgggctgcgcccccagcatccatgtctcgcagagcggcgtgatctactgccgggactcggacgagtccagctcgccccgccagaccaccagcgtgtcgcagggcccggcggcacccctgcccggcctcttcgtccagaccgacgccgccgacgccatccccccgagccgcgcgtcgggaccccccagcgtagcccgcgtccgcagggcccgcaccgagctgggcagcggtagcagcgcgggttccgcagcccccgccgcgaccaccagcaggggccggaggcgccactgctgcagcagcgccgaggccgagactcagacctgctacaccagcgtgaagcaggtgtcttctgcggaggtgcgcatcgggcccatgagactgacgcaggaccctattcaggttttgctgatctttgcaaaggaagatagtcagagcgatggcttctggtgggcctgcgacagagctggttatagatgcaatattgctcggactccagagtcagcccttgaatgctttcttgataagcatcatgaaattattgtaattgatcatagacaaactcagaacttcgatgcagaagcagtgtgcaggtcgatccgggccacaaatccctccgagcacacggtgatcctcgcagtggtttcgcgagtatcggatgaccatgaagaggcgtcagtccttcctcttctccacgcaggcttcaacaggagatttatggagaatagcagcataattgcttgctataatgaactgattcaaatagaacatggggaagttcgctcccagttcaaattacgggcctgtaattcagtgtttacagcattagatcactgtcatgaagccatagaaataacaagcgatgaccacgtgattcagtatgtcaacccagccttcgaaaggatgatgggctaccacaaaggtgagctcctgggaaaagaactcgctgatctgcccaaaagcgataagaaccgggcagaccttctcgacaccatcaatacatgcatcaagaagggaaaggagtggcagggggtttactatgccagacggaaatccggggacagcatccaacagcacgtgaagatcaccccagtgattggccaaggagggaaaattaggcattttgtctcgctcaagaaactgtgttgtaccactgacaataataagcagattcacaagattcatcgtgattcaggagacaattctcagacagagcctcattcattcagatataagaacaggaggaaagagtccattgacgtgaaatcgatatcatctcgaggcagtgatgcaccaagcctgcagaatcgtcgctatccgtccatggcgaggatccactccatgaccatcgaggctcccatcacaaaggttataaatataatcaatgcagcccaagaaaacagcccagtcacagtagcggaagccttggacagagttctagagattttacggaccacagaactgtactcccctcagctgggtaccaaagatgaagatcctcacaccagtgatcttgttggaggcctgatgactgacggcttgagaagactgtcaggaaacgagtatgtgtttactaagaatgtgcaccagagtcacagtcaccttgcaatgccaataaccatcaatgatgttcccccttgtatctctcaattacttgataatgaggagagttgggacttcaacatctttgaattggaagccattacgcataaaaggccattggtttatctgggcttaaaggtcttctctcggtttggagtatgtgaatttttaaactgttctgaaaccactcttcgggcctggttccaagtgatcgaagccaactaccactcttccaatgcctaccacaactccacccatgctgccgacgtcctgcacgccaccgctttctttcttggaaaggaaagagtaaagggaagcctcgatcagttggatgaggtggcagccctcattgctgccacagtccatgacgtggatcacccgggaaggaccaactctttcctctgcaatgcaggcagtgagcttgctgtgctctacaatgacactgctgttctggagagtcaccacaccgccctggccttccagctcacggtcaaggacaccaaatgcaacattttcaagaatattgacaggaaccattatcgaacgctgcgccaggctattattgacatggttttggcaacagagatgacaaaacactttgaacatgtgaataagtttgtgaacagcatcaacaagccaatggcagctgagattgaaggcagcgactgtgaatgcaaccctgctgggaagaacttccctgaaaaccaaatcctgatcaaacgcatgatgattaagtgtgctgacgtggccaacccatgccgccccttggacctgtgcattgaatgggctgggaggatctctgaggagtattttgcacagactgatgaagagaagagacagggactacctgtggtgatgccagtgtttgaccggaatacctgtagcatccccaagtctcagatctctttcattgactacttcataacagacatgtttgatgcttgggatgcctttgcacatctgccagccctgatgcaacatttggctgacaactacaaacactggaagacactagatgacctaaagtgcaaaagtttgaggcttccatctgacagctaaagccaagccacagagggggcctcttgaccgacaaaggacactgtgaatcacagtagcgtaaacgagaggccttcctttctaatgacaatgacaggtattggtgaaggagctaatgtttaatatttgaccttgaatcattcaagtccccaaatttcattcttagaaagttatgttccatgaagaaaaatatatgttcttttgaatacttaatgacagaacaaatacttggcaaactcctttgctctgctgtcatcctgtgtacccttgtcaatccatggagctggttcactgtaactagcaggccacaggaagcaaagccttggtgcctgtgagctcatctcccaggatggtgactaagtagcttagctagtgatcagctcatcctttaccataaaagtcatcattgctgtttagcttgactgttttcctcaagaacatcgatctgaaggattcataaggagcttatctgaacagatttatctaagaaaaaaaaaaaacgacataaaataagtgaaacaactaggaccaaattacagataaactagttagcttcacagcctctatggctacatggttcttctggccgatggtatgacacctaagttagaacacagccttggctggtgggtgccctctctagactggtatcagcagcctgtgtaacccctttcctgtaaaaggggttcatcttaacaaagtcatccatgatgagggaaaaagtggcatttcatttttggggaatccatgagcttcctttatttctggctcacagaggcagccacgaggcactacaccaagtattatataaaagccattaaatttgaatgcccttggacaagcttttcttaaaaaaaaaaaaaaaaagtttatatacatgtttaaaatttttattaaaatccaaattttctgggtgtaagcccatgcagtatgttgtgccatgcaccatctatacgtaatattttgggaggggataggggaagtttcaaggttcagatatttttaaccagtctatatttgaaatcatgccattagctttaacaatgttaaaattgtgtggtgtaaatatatcagaaaataggcatatggggaggcagtaaatactattttaagctattaattgtatgctaaaagcttctaaagcacaagtgcatatttttatactgctcttttcacaactccctgtgatctacataaagtcagactcgagattttcctttctcttttaccagctgatccttcctatgtattataaatattagactccgtaaacaaacttcatttttctttctctgtacttcatgctgcatttttaaaaggtataaacaaacagagactgaattaattgaatcagtaattacttttttccaatacaaattggaatgcagaatacttggaacttgtacatggggaaaaaatgacttatcactacataatgtgccaatgtttttttctatgttttgtaccaaaaatggaaaaatatgacaattccatgcaaagaaatgtatctaaattatttttgttagatgataagagaacttgcttggtcaggacagcagccagctttgtattgtaatgctatattatgtaaatgtgatgaaaatgtttttgtgaagtacttgtaactaaattcctacagccatttttcactcccaacagctgtttttattttacctctttggcctaaagttttcataatttcaaatttggggtttagtgtcctttatttcatgagtcacacactttgttttcagagcacattaaaatcaggatgccagaatcccatattaaggacctagctaacttgcctaggcttcagaagcttgcttgaggcaaggacaatctttttctgatcatctcactttcagttctatttggtaagtaacatttatcaggtgtcagacatcttctatatgaaatatttacagcttactcagttttatgtcaaatttcttgttaacttcaaactttttattagtaatgtgcaaatgtttaaaaatgctttaagacagctaggtactaaagcgtcaacaatttctgctctttaccagtgtaatctacggtataatcttctggcctgcgaactagtctattcttccacatagtcaacttgttagaaatacaggctttcagatgatatgtgtatcagatagtttatattatataaactattataactgcctcttacacagagttgtttacttaaatgtcatgtgctgaggagggccgtattaggaaaatgcaacactctctaataatttccgtgactagtaagagaaggaagccagttataaaacactgctggaccagaatgaccctataatttcctaagatcattctttatttctaatttaagatttttaaatttacttgccctccatgtcaggactggttagcattctgggcaaaaaaaaaacaagcctgtcagttcactcagaacctactcagctttagagagagaaacagaagggatgatcttgtgcccttgcgctatgtgaatatagccagagactgaggtaataaatatattttaaaataaaaatgacaagggatttgtacactgtaacactatgtagtgttacttctgctgttgcaagtatcttaactgttgaaagctaaactcaggaaatggagaaaatgtacataatatacattgacccattattttattctaaattgaaagtccaacttttagcagcagtctacctgcaactactgaacaccatcaggtttgagtccctaccagaatctcccatcatactgttatcccccatctctgtgaccttagggcatgcatgaaaacaaaagcaatctagtccctagggttggagactgccctctagacagtttttcatggcagaaaattagaatacaagtatacctcattttattgcattctgcttcattgtgcttcaaagatactgccttttctacaaattgagggcttgtggccaccctgcatagagcaagtctatcggggcattttcccagcatgggctcactttgtgtaagtgtcacattttggtaactcttagagtatttcaaatgtttttattcttgtatctgtcatggtggtctgtgatcagtgatctttgttactactgtaattgttttagggtactgcaaaccatgcccgtataagacagtgaacttaattgataaatcttgtgtatattctaactgttccaccaactagcggtttccagtctctccctcttcttagacctccctattccctgagacacaacaatatcga

SEQ ID NO: 22319 - DNA, 2572 bp, Homo sapiens
  source 1..2572: mol_type = unassigned DNA
atgggctgcgcccccagcatccatgtctcgcagagcggcgtgatctactgccgggactcggacgagtccagctcgccccgccagaccaccagcgtgtcgcagggcccggcggcacccctgcccggcctcttcgtccagaccgacgccgccgacgccatccccccgagccgcgcgtcgggaccccccagcgtagcccgcgtccgcagggcccgcaccgagctgggcagcggtagcagcgcgggttccgcagcccccgccgcgaccaccagcaggggccggaggcgccactgctgcagcagcgccgaggccgagactcagacctgctacaccagcgtgaagcaggtgtcttctgcggaggtgcgcatcgggcccatgagactgacgcaggaccctattcaggttttgctgatctttgcaaaggaagatagtcagagcgatggcttctggtgggcctgcgacagagctggttatagatgcaatattgctcggactccagagtcagcccttgaatgctttcttgataagcatcatgaaattattgtaattgatcatagacaaactcagaacttcgatgcagaagcagtgtgcaggtcgatccgggccacaaatccctccgagcacacggtgatcctcgcagtggtttcgcgagtatcggatgaccatgaagaggcgtcagtccttcctcttctccacgcaggcttcaacaggagatttatggagaatagcagcataattgcttgctataatgaactgattcaaatagaacatggggaagttcgctcccagttcaaattacgggcctgtaattcagtgtttacagcattagatcactgtcatgaagccatagaaataacaagcgatgaccacgtgattcagtatgtcaacccagccttcgaaaggatgatgggctaccacaaaggtgagctcctgggaaaagaactcgctgatctgcccaaaagcgataagaaccgggcagaccttctcgacaccatcaatacatgcatcaagaagggaaaggagtggcagggggtttactatgccagacggaaatccggggacagcatccaacagcacgtgaagatcaccccagtgattggccaaggagggaaaattaggcattttgtctcgctcaagaaactgtgttgtaccactgacaataataagcagattcacaagattcatcgtgattcaggagacaattctcagacagagcctcattcattcagatataagaacaggaggaaagagtccattgacgtgaaatcgatatcatctcgaggcagtgatgcaccaagcctgcagaatcgtcgctatccgtccatggcgaggatccactccatgaccatcgaggctcccatcacaaaggacggcttgagaagactgtcaggaaacgagtatgtgtttactaagaatgtgcaccagagtcacagtcaccttgcaatgccaataaccatcaatgatgttcccccttgtatctctcaattacttgataatgaggagagttgggacttcaacatctttgaattggaagccattacgcataaaaggccattggtttatctgggcttaaaggtcttctctcggtttggagtatgtgaatttttaaactgttctgaaaccactcttcgggcctggttccaagtgatcgaagccaactaccactcttccaatgcctaccacaactccacccatgctgccgacgtcctgcacgccaccgctttctttcttggaaaggaaagagtaaagggaagcctcgatcagttggatgaggtggcagccctcattgctgccacagtccatgacgtggatcacccgggaaggaccaactctttcctctgcaatgcaggcagtgagcttgctgtgctctacaatgacactgctgttctggagagtcaccacaccgccctggccttccagctcacggtcaaggacaccaaatgcaacattttcaagaatattgacaggaaccattatcgaacgctgcgccaggctattattgacatggttttggcaacagagatgacaaaacactttgaacatgtgaataagtttgtgaacagcatcaacaagccaatggcagctgagattgaaggcagcgactgtgaatgcaaccctgctgggaagaacttccctgaaaaccaaatcctgatcaaacgcatgatgattaagtgtgctgacgtggccaacccatgccgccccttggacctgtgcattgaatgggctgggaggatctctgaggagtattttgcacagactgatgaagagaagagacagggactacctgtggtgatgccagtgtttgaccggaatacctgtagcatccccaagtctcagatctctttcattgactacttcataacagacatgtttgatgcttgggatgcctttgcacatctgccagccctgatgcaacatttggctgacaactacaaacactggaagacactagatgacctaaagtgcaaaagtttgaggcttccatctgacagctaaagccaagccacagagggggcctcttgaccgacaaaggacactgtgaatcacagtagcgtaaacgagaggccttcctttc

SEQ ID NO: 22320 - DNA, 3426 bp, Homo sapiens
  source 1..3426: mol_type = unassigned DNA
gcggccgcgggcgcgggcgggcgcgcgggggagcccggccgagggatgggctgcgcccccagcatccatgtctcgcagagcggcgtgatctactgccgggactcggacgagtccagctcgccccgccagaccaccagcgtgtcgcagggcccggcggcacccctgcccggcctcttcgtccagaccgacgccgccgacgccatccccccgagccgcgcgtcgggaccccccagcgtagcccgcgtccgcagggcccgcaccgagctgggcagcggtagcagcgcgggttccgcagcccccgccgcgaccaccagcaggggccggaggcgccactgctgcagcagcgccgaggccgagactcagacctgctacaccagcgtgaagcaggtgtcttctgcggaggtgcgcatcgggcccatgagactgacgcaggaccctattcaggttttgctgatctttgcaaaggaagatagtcagagcgatggcttctggtgggcctgcgacagagctggttatagatgcaatattgctcggactccagagtcagcccttgaatgctttcttgataagcatcatgaaattattgtaattgatcatagacaaactcagaacttcgatgcagaagcagtgtgcaggtcgatccgggccacaaatccctccgagcacacggtgatcctcgcagtggtttcgcgagtatcggatgaccatgaagaggcgtcagtccttcctcttctccacgcaggcttcaacaggagatttatggagaatagcagcataattgcttgctataatgaactgattcaaatagaacatggggaagttcgctcccagttcaaattacgggcctgtaattcagtgtttacagcattagatcactgtcatgaagccatagaaataacaagcgatgaccacgtgattcaggagtggcagggggtttactatgccagacggaaatccggggacagcatccaacagcacgtgaagatcaccccagtgattggccaaggagggaaaattaggcattttgtctcgctcaagaaactgtgttgtaccactgacaataataagcagattcacaagattcatcgtgattcaggagacaattctcagacagagcctcattcattcagatataagaacaggaggaaagagtccattgacgtgaaatcgatatcatctcgaggcagtgatgcaccaagcctgcagaatcgtcgctatccgtccatggcgaggatccactccatgaccatcgaggctcccatcacaaaggttataaatataatcaatgcagcccaagaaaacagcccagtcacagtagcggaagccttggacagagttctagagattttacggaccacagaactgtactcccctcagctgggtaccaaagatgaagatcctcacaccagtgatcttgttggaggcctgatgactgacggcttgagaagactgtcaggaaacgagtatgtgtttactaagaatgtgcaccagagtcacagtcaccttgcaatgccaataaccatcaatgatgttcccccttgtatctctcaattacttgataatgaggagagttgggacttcaacatctttgaattggaagccattacgcataaaaggccattggtttatctgggcttaaaggtcttctctcggtttggagtatgtgaatttttaaactgttctgaaaccactcttcgggcctggttccaagtgatcgaagccaactaccactcttccaatgcctaccacaactccacccatgctgccgacgtcctgcacgccaccgctttctttcttggaaaggaaagagtaaagggaagcctcgatcagttggatgaggtggcagccctcattgctgccacagtccatgacgtggatcacccgggaaggaccaactctttcctctgcaatgcaggcagtgagcttgctgtgctctacaatgacactgctgttctggagagtcaccacaccgccctggccttccagctcacggtcaaggacaccaaatgcaacattttcaagaatattgacaggaaccattatcgaacgctgcgccaggctattattgacatggttttggcaacagagatgacaaaacactttgaacatgtgaataagtttgtgaacagcatcaacaagccaatggcagctgagattgaaggcagcgactgtgaatgcaaccctgctgggaagaacttccctgaaaaccaaatcctgatcaaacgcatgatgattaagtgtgctgacgtggccaacccatgccgccccttggacctgtgcattgaatgggctgggaggatctctgaggagtattttgcacagactgatgaagagaagagacagggactacctgtggtgatgccagtgtttgaccggaatacctgtagcatccccaagtctcagatctctttcattgactacttcataacagacatgtttgatgcttgggatgcctttgcacatctgccagccctgatgcaacatttggctgacaactacaaacactggaagacactagatgacctaaagtgcaaaagtttgaggcttccatctgacagctaaagccaagccacagagggggcctcttgaccgacaaaggacactgtgaatcacagtagcgtaaacgagaggccttcctttctaatgacaatgacaggtattggtgaaggagctaatgtttaatatttgaccttgaatcattcaagtccccaaatttcattcttagaaagttatgttccatgaagaaaaatatatgttcttttgaatacttaatgacagaacaaatacttggcaaactcctttgctctgctgtcatcctgtgtacccttgtcaatccatggagctggttcactgtaactagcaggccacaggaagcaaagccttggtgcctgtgagctcatctcccaggatggtgactaagtagcttagctagtgatcagctcatcctttaccataaaagtcatcattgctgtttagcttgactgttttcctcaagaacatcgatctgaaggattcataaggagcttatctgaacagatttatctaagaaaaaaaaaaaacgacataaaataagtgaaacaactaggaccaaattacagataaactagttagcttcacagcctctatggctacatggttcttctggccgatggtatgacacctaagttagaacacagccttggctggtgggtgccctctctagactggtatcagcagcctgtgtaacccctttcctgtaaaaggggttcatcttaacaaagtcatccatgatgagggaaaaagtggcatttcatttttggggaatccatgagcttcctttatttctggctcacagaggcagccacgaggcactacaccaagtattatataaaagccattaaatttgaatgcccttggacaagcttttcttaaaaaaaaaaaaaaaaa

SEQ ID NO: 22321 - DNA, 2677 bp, Homo sapiens
  source 1..2677: mol_type = unassigned DNA
atgggctgcgcccccagcatccatgtctcgcagagcggcgtgatctactgccgggactcggacgagtccagctcgccccgccagaccaccagcgtgtcgcagggcccggcggcacccctgcccggcctcttcgtccagaccgacgccgccgacgccatccccccgagccgcgcgtcgggaccccccagcgtagcccgcgtccgcagggcccgcaccgagctgggcagcggtagcagcgcgggttccgcagcccccgccgcgaccaccagcaggggccggaggcgccactgctgcagcagcgccgaggccgagactcagacctgctacaccagcgtgaaggttttgctgatctttgcaaaggaagatagtcagagcgatggcttctggtgggcctgcgacagagctggttatagatgcaatattgctcggactccagagtcagcccttgaatgctttcttgataagcatcatgaaattattgtaattgatcatagacaaactcagaacttcgatgcagaagcagtgtgcaggtcgatccgggccacaaatccctccgagcacacggtgatcctcgcagtggtttcgcgagtatcggatgaccatgaagaggcgtcagtccttcctcttctccacgcaggcttcaacaggagatttatggagaatagcagcataattgcttgctataatgaactgattcaaatagaacatggggaagttcgctcccagttcaaattacgggcctgtaattcagtgtttacagcattagatcactgtcatgaagccatagaaataacaagcgatgaccacgtgattcagtatgtcaacccagccttcgaaaggatgatgggctaccacaaaggtgagctcctgggaaaagaactcgctgatctgcccaaaagcgataagaaccgggcagaccttctcgacaccatcaatacatgcatcaagaagggaaaggagtggcagggggtttactatgccagacggaaatccggggacagcatccaacagcacgtgaagatcaccccagtgattggccaaggagggaaaattaggcattttgtctcgctcaagaaactgtgttgtaccactgacaataataagcagattcacaagattcatcgtgattcaggagacaattctcagacagagcctcattcattcagatataagaacaggaggaaagagtccattgacgtgaaatcgatatcatctcgaggcagtgatgcaccaagcctgcagaatcgtcgctatccgtccatggcgaggatccactccatgaccatcgaggctcccatcacaaaggttataaatataatcaatgcagcccaagaaaacagcccagtcacagtagcggaagccttggacagagttctagagattttacggaccacagaactgtactcccctcagctgggtaccaaagatgaagatcctcacaccagtgatcttgttggaggcctgatgactgacggcttgagaagactgtcaggaaacgagtatgtgtttactaagaatgtgcaccagagtcacagtcaccttgcaatgccaataaccatcaatgatgttcccccttgtatctctcaattacttgataatgaggagagttgggacttcaacatctttgaattggaagccattacgcataaaaggccattggtttatctgggcttaaaggtcttctctcggtttggagtatgtgaatttttaaactgttctgaaaccactcttcgggcctggttccaagtgatcgaagccaactaccactcttccaatgcctaccacaactccacccatgctgccgacgtcctgcacgccaccgctttctttcttggaaaggaaagagtaaagggaagcctcgatcagttggatgaggtggcagccctcattgctgccacagtccatgacgtggatcacccgggaaggaccaactctttcctctgcaatgcaggcagtgagcttgctgtgctctacaatgacactgctgttctggagagtcaccacaccgccctggccttccagctcacggtcaaggacaccaaatgcaacattttcaagaatattgacaggaaccattatcgaacgctgcgccaggctattattgacatggttttggcaacagagatgacaaaacactttgaacatgtgaataagtttgtgaacagcatcaacaagccaatggcagctgagattgaaggcagcgactgtgaatgcaaccctgctgggaagaacttccctgaaaaccaaatcctgatcaaacgcatgatgattaagtgtgctgacgtggccaacccatgccgccccttggacctgtgcattgaatgggctgggaggatctctgaggagtattttgcacagactgatgaagagaagagacagggactacctgtggtgatgccagtgtttgaccggaatacctgtagcatccccaagtctcagatctctttcattgactacttcataacagacatgtttgatgcttgggatgcctttgcacatctgccagccctgatgcaacatttggctgacaactacaaacactggaagacactagatgacctaaagtgcaaaagtttgaggcttccatctgacagctaaagccaagccacagagggggcctcttgaccgacaaaggacactgtgaatcacagtagcgtaaacgagaggccttcctttc

SEQ ID NO: 22322 - DNA, 3276 bp, Homo sapiens
  source 1..3276: mol_type = unassigned DNA
gcggccgcgggcgcgggcgggcgcgcgggggagcccggccgagggatgggctgcgcccccagcatccatgtctcgcagagcggcgtgatctactgccgggactcggacgagtccagctcgccccgccagaccaccagcgtgtcgcagggcccggcggcacccctgcccggcctcttcgtccagaccgacgccgccgacgccatccccccgagccgcgcgtcgggaccccccagcgtagcccgcgtccgcagggcccgcaccgagctgggcagcggtagcagcgcgggttccgcagcccccgccgcgaccaccagcaggggccggaggcgccactgctgcagcagcgccgaggccgagactcagacctgctacaccagcgtgaagcaggtgtcttctgcggaggtgcgcatcgggcccatgagactgacgcaggaccctattcaggttttgctgatctttgcaaaggaagatagtcagagcgatggcttctggtgggcctgcgacagagctggttatagatgcaatattgctcggactccagagtcagcccttgaatgctttcttgataagcatcatgaaattattgtaattgatcatagacaaactcagaacttcgatgcagaagcagtgtgcaggtcgatccgggccacaaatccctccgagcacacggtgatcctcgcagtggtttcgcgagtatcggatgaccatgaagaggcgtcagtccttcctcttctccacgcaggcttcaacaggagatttatggagaatagcagcataattgcttgctataatgaactgattcaaatagaacatggggaagttcgctcccagttcaaattacgggcctgtaattcagtgtttacagcattagatcactgtcatgaagccatagaaataacaagcgatgaccacgtgattcagattcacaagattcatcgtgattcaggagacaattctcagacagagcctcattcattcagatataagaacaggaggaaagagtccattgacgtgaaatcgatatcatctcgaggcagtgatgcaccaagcctgcagaatcgtcgctatccgtccatggcgaggatccactccatgaccatcgaggctcccatcacaaaggttataaatataatcaatgcagcccaagaaaacagcccagtcacagtagcggaagccttggacagagttctagagattttacggaccacagaactgtactcccctcagctgggtaccaaagatgaagatcctcacaccagtgatcttgttggaggcctgatgactgacggcttgagaagactgtcaggaaacgagtatgtgtttactaagaatgtgcaccagagtcacagtcaccttgcaatgccaataaccatcaatgatgttcccccttgtatctctcaattacttgataatgaggagagttgggacttcaacatctttgaattggaagccattacgcataaaaggccattggtttatctgggcttaaaggtcttctctcggtttggagtatgtgaatttttaaactgttctgaaaccactcttcgggcctggttccaagtgatcgaagccaactaccactcttccaatgcctaccacaactccacccatgctgccgacgtcctgcacgccaccgctttctttcttggaaaggaaagagtaaagggaagcctcgatcagttggatgaggtggcagccctcattgctgccacagtccatgacgtggatcacccgggaaggaccaactctttcctctgcaatgcaggcagtgagcttgctgtgctctacaatgacactgctgttctggagagtcaccacaccgccctggccttccagctcacggtcaaggacaccaaatgcaacattttcaagaatattgacaggaaccattatcgaacgctgcgccaggctattattgacatggttttggcaacagagatgacaaaacactttgaacatgtgaataagtttgtgaacagcatcaacaagccaatggcagctgagattgaaggcagcgactgtgaatgcaaccctgctgggaagaacttccctgaaaaccaaatcctgatcaaacgcatgatgattaagtgtgctgacgtggccaacccatgccgccccttggacctgtgcattgaatgggctgggaggatctctgaggagtattttgcacagactgatgaagagaagagacagggactacctgtggtgatgccagtgtttgaccggaatacctgtagcatccccaagtctcagatctctttcattgactacttcataacagacatgtttgatgcttgggatgcctttgcacatctgccagccctgatgcaacatttggctgacaactacaaacactggaagacactagatgacctaaagtgcaaaagtttgaggcttccatctgacagctaaagccaagccacagagggggcctcttgaccgacaaaggacactgtgaatcacagtagcgtaaacgagaggccttcctttctaatgacaatgacaggtattggtgaaggagctaatgtttaatatttgaccttgaatcattcaagtccccaaatttcattcttagaaagttatgttccatgaagaaaaatatatgttcttttgaatacttaatgacagaacaaatacttggcaaactcctttgctctgctgtcatcctgtgtacccttgtcaatccatggagctggttcactgtaactagcaggccacaggaagcaaagccttggtgcctgtgagctcatctcccaggatggtgactaagtagcttagctagtgatcagctcatcctttaccataaaagtcatcattgctgtttagcttgactgttttcctcaagaacatcgatctgaaggattcataaggagcttatctgaacagatttatctaagaaaaaaaaaaaacgacataaaataagtgaaacaactaggaccaaattacagataaactagttagcttcacagcctctatggctacatggttcttctggccgatggtatgacacctaagttagaacacagccttggctggtgggtgccctctctagactggtatcagcagcctgtgtaacccctttcctgtaaaaggggttcatcttaacaaagtcatccatgatgagggaaaaagtggcatttcatttttggggaatccatgagcttcctttatttctggctcacagaggcagccacgaggcactacaccaagtattatataaaagccattaaatttgaatgcccttggacaagcttttcttaaaaaaaaaaaaaaaaa

SEQ ID NO: 22323 - DNA, 3474 bp, Homo sapiens
  source 1..3474: mol_type = unassigned DNA
gtggcatgctggtgggcatagcttatggggaggtgcttctgccctgttctacctagtcctcaatttggccccatgtccgagtcccttctcctacctcactgccataccatcgtgggtttcctctccagagaatgctgtgaggaaccagtgagtgattccacctcaattttatgtggttttggggaagcggagcgagagaagagcaagtaaaaccaagaatctcttgccatacacacgttacaggcaggacaattgtggctgttgttacttctgtatttactcagtttttaaaattaagctcttggcctaaagatccaacatgtaacttcaggggagtccttcattaattaatactactttaaaccttagcacacatcgtctgggaatgacaaataagcatttctttttttttaaatttaattttattattattatactttaagttttagggtacatgtgcacaacgtgcaggtttgttacatatgtatacatgtgccatgttggtgtgcatttctaaatgacttttaagcaaagatctagatgattgaggtactcagagatcaaaggtggagggaaggaaactgagattcaggaacacttggggactagttcaagagccaggatatggccaagcattggaatttcgtccactctcttaacgctgcatctccaaggacctcaagcccagaaactcttctttaaaaggacggcttgagaagactgtcaggaaacgagtatgtgtttactaagaatgtgcaccagagtcacagtcaccttgcaatgccaataaccatcaatgatgttcccccttgtatctctcaattacttgataatgaggagagttgggacttcaacatctttgaattggaagccattacgcataaaaggccattggtttatctgggcttaaaggtcttctctcggtttggagtatgtgaatttttaaactgttctgaaaccactcttcgggcctggttccaagtgatcgaagccaactaccactcttccaatgcctaccacaactccacccatgctgccgacgtcctgcacgccaccgctttctttcttggaaaggaaagagtaaagggaagcctcgatcagttggatgaggtggcagccctcattgctgccacagtccatgacgtggatcacccgggaaggaccaactctttcctctgcaatgcaggcagtgagcttgctgtgctctacaatgacactgctgttctggagagtcaccacaccgccctggccttccagctcacggtcaaggacaccaaatgcaacattttcaagaatattgacaggaaccattatcgaacgctgcgccaggctattattgacatggttttggcaacagagatgacaaaacactttgaacatgtgaataagtttgtgaacagcatcaacaagccaatggcagctgagattgaaggcagcgactgtgaatgcaaccctgctgggaagaacttccctgaaaaccaaatcctgatcaaacgcatgatgattaagtgtgctgacgtggccaacccatgccgccccttggacctgtgcattgaatgggctgggaggatctctgaggagtattttgcacagactgatgaagagaagagacagggactacctgtggtgatgccagtgtttgaccggaatacctgtagcatccccaagtctcagatctctttcattgactacttcataacagacatgtttgatgcttgggatgcctttgcacatctgccagccctgatgcaacatttggctgacaactacaaacactggaagacactagatgacctaaagtgcaaaagtttgaggcttccatctgacagctaaagccaagccacagagggggcctcttgaccgacaaaggacactgtgaatcacagtagcgtaaacgagaggccttcctttctaatgacaatgacaggtattggtgaaggagctaatgtttaatatttgaccttgaatcattcaagtccccaaatttcattcttagaaagttatgttccatgaagaaaaatatatgttcttttgaatacttaatgacagaacaaatacttggcaaactcctttgctctgctgtcatcctgtgtacccttgtcaatccatggagctggttcactgtaactagcaggccacaggaagcaaagccttggtgcctgtgagctcatctcccaggatggtgactaagtagcttagctagtgatcagctcatcctttaccataaaagtcatcattgctgtttagcttgactgttttcctcaagaacatcgatctgaaggattcataaggagcttatctgaacagatttatctaagaaaaaaaaaaaacgacataaaataagtgaaacaactaggaccaaattacagataaactagttagcttcacagcctctatggctacatggttcttctggccgatggtatgacacctaagttagaacacagccttggctggtgggtgccctctctagactggtatcagcagcctgtgtaacccctttcctgtaaaaggggttcatcttaacaaagtcatccatgatgagggaaaaagtggcatttcatttttggggaatccatgagcttcctttatttctggctcacagaggcagccacgaggcactacaccaagtattatataaaagccattaaatttgaatgcccttggacaagcttttcttaaaaaaaaaaaaaaaaagtttatatacatgtttaaaatttttattaaaatccaaattttctgggtgtaagcccatgcagtatgttgtgccatgcaccatctatacgtaatattttgggaggggataggggaagtttcaaggttcagatatttttaaccagtctatatttgaaatcatgccattagctttaacaatgttaaaattgtgtggtgtaaatatatcagaaaataggcatatggggaggcagtaaatactattttaagctattaattgtatgctaaaagcttctaaagcacaagtgcatatttttatactgctcttttcacaactccctgtgatctacataaagtcagactcgagattttcctttctcttttaccagctgatccttcctatgtattataaatattagactccgtaaacaaacttcatttttctttctctgtacttcatgctgcatttttaaaaggtataaacaaacagagactgaattaattgaatcagtaattacttttttccaatacaaattggaatgcagaatacttggaacttgtacatggggaaaaaatgacttatcactacataatgtgccaatgtttttttctatgttttgtaccaaaaatggaaaaatatgacaattccatgcaaagaaatgtatctaaattatttttgttagatgataagagaacttgcttggtcaggacagcagccagctttgtattgtaatgctatattatgtaaatgtgatgaaaatgtttttgtgaagtacttgtaactaaattcctacagccatt

SEQ ID NO: 22324 - DNA, 2058 bp, Homo sapiens
  source 1..2058: mol_type = unassigned DNA
cgcggcggctggcgtcgggaaagtacagtaaaaagtccgagtgcagccgccgggcgcaggatgggatccggctcctccagctaccggcccaaggccatctacctggacatcgatggacgcattcagaaggtaatcttcagcaagtactgcaactccagcgacatcatggacctgttctgcatcgccaccggcctgcctcggaacacgaccatctccctgctgaccaccgacgacgccatggtctccatcgaccccaccatgcccgcgaattcagaacgcactccgtacaaagtgagacctgtggccatcaagcaactctccgctggtgtcgaggacaagagaaccacaagccgtggccagtctgctgagagaccactgagggacagacgggttgtgggcctggagcagccccggagggaaggagcatttgaaagtggacaggtagagcccaggcccagagagccccagggctgctaccaggaaggccagcgcatccctccagagagagaagaattaatccagagcgtgctggcgcaggttgcagagcagttctcaagagcattcaaaatcaatgaactgaaagctgaagttgcaaatcacttggctgtcctagagaaacgcgtggaattggaaggactaaaagtggtggagattgagaaatgcaagagtgacattaagaagatgagggaggagctggcggccagaagcagcaggaccaactgcccctgtaagtacagttttttggataaccacaagaagttgactcctcgacgcgatgttcccacttaccccaagtacctgctctctccagagaccatcgaggccctgcggaagccgacctttgacgtctggctttgggagcccaatgagatgctgagctgcctggagcacatgtaccacgacctcgggctggtcagggacttcagcatcaaccctgtcaccctcaggaggtggctgttctgcgtccacgacaactacagaaacaaccccttccacaacttccggcactgcttctgcgtggcccagatgatgtacagcatggtctggctctgcagtctccaggagaagttctcacaaacggatatcctgatcctaatgacagcggccatctgccacgatctggaccatcccggctacaacaacacgtaccagatcaatgcccgcacagagctggcggtccgctacaatgacatctcaccgctggagaaccaccactgcgccgtggccttccagatcctcgccgagcctgagtgcaacatcttctccaacatcccacctgatgggttcaagcagatccgacagggaatgatcacattaatcttggccactgacatggcaagacatgcagaaattatggattctttcaaagagaaaatggagaattttgactacagcaacgaggagcacatgaccctgctgaagatgattttgataaaatgctgtgatatctctaacgaggtccgtccaatggaagtcgcagagccttgggtggactgtttattagaggaatattttatgcagagcgaccgtgagaagtcagaaggccttcctgtggcaccgttcatggaccgagacaaagtgaccaaggccacagcccagattgggttcatcaagtttgtcctgatcccaatgtttgaaacagtgaccaagctcttccccatggttgaggagatcatgctgcagccactttgggaatcccgagatcgctacgaggagctgaagcggatagatgacgccatgaaagagttacagaagaagactgacagcttgacgtctggggccaccgagaagtccagagagagaagcagagatgtgaaaaacagtgaaggagactgtgcctgaggaaagcggggggcgtggctgcagttctggacgggctggccgagctgcgcgggatccttgtgcagggaagagctgccctgggcacctggcaccacaagaccatgttttctaagaaccattttgttcactgatacaaaaaaaaaaaaaggaattcatgatgctgtacagaattttatttttaaactgtcttttaaataatatattcttatacggaaa

SEQ ID NO: 22325 - DNA, 1956 bp, Homo sapiens
  source 1..1956: mol_type = unassigned DNA
acagtaaaaagtccgagtgcagccgccgggcgcaggatgggatccggctcctccagctaccggcccaaggccatctacctggacatcgatggacgcattcagaaggtaatcttcagcaagtactgcaactccagcgacatcatggacctgttctgcatcgccaccggcctgcctcgcactccgtacaaagtgagacctgtggccatcaagcaactctccgctggtgtcgaggacaagagaaccacaagccgtggccagtctgctgagagaccactgagggacagacgggttgtgggcctggagcagccccggagggaaggagcatttgaaagtggacaggtagagcccaggcccagagagccccagggctgctaccaggaaggccagcgcatccctccagagagagaagaattaatccagagcgtgctggcgcaggttgcagagcagttctcaagagcattcaaaatcaatgaactgaaagctgaagttgcaaatcacttggctgtcctagagaaacgcgtggaattggaaggactaaaagtggtggagattgagaaatgcaagagtgacattaagaagatgagggaggagctggcggccagaagcagcaggaccaactgcccctgtaagtacagttttttggataaccacaagaagttgactcctcgacgcgatgttcccacttaccccaagtacctgctctctccagagaccatcgaggccctgcggaagccgacctttgacgtctggctttgggagcccaatgagatgctgagctgcctggagcacatgtaccacgacctcgggctggtcagggacttcagcatcaaccctgtcaccctcaggaggtggctgttctgcgtccacgacaactacagaaacaaccccttccacaacttccggcactgcttctgcgtggcccagatgatgtacagcatggtctggctctgcagtctccaggagaagttctcacaaacggatatcctgatcctaatgacagcggccatctgccacgatctggaccatcccggctacaacaacacgtaccagatcaatgcccgcacagagctggcggtccgctacaatgacatctcaccgctggagaaccaccactgcgccgtggccttccagatcctcgccgagcctgagtgcaacatcttctccaacatcccacctgatgggttcaagcagatccgacagggaatgatcacattaatcttggccactgacatggcaagacatgcagaaattatggattctttcaaagagaaaatggagaattttgactacagcaacgaggagcacatgaccctgctgaagatgattttgataaaatgctgtgatatctctaacgaggtccgtccaatggaagtcgcagagccttgggtggactgtttattagaggaatattttatgcagagcgaccgtgagaagtcagaaggccttcctgtggcaccgttcatggaccgagacaaagtgaccaaggccacagcccagattgggttcatcaagtttgtcctgatcccaatgtttgaaacagtgaccaagctcttccccatggttgaggagatcatgctgcagccactttgggaatcccgagatcgctacgaggagctgaagcggatagatgacgccatgaaagagttacagaagaagactgacagcttgacgtctggggccaccgagaagtccagagagagaagcagagatgtgaaaaacagtgaaggagactgtgcctgaggaaagcggggggcgtggctgcagttctggacgggctggccgagctgcgcgggatccttgtgcagggaagagctgccctgggcacctggcaccacaagaccatgttttctaagaaccattttgttcactgatacaaaaaaaaaaaaaggaattcatgatgctgtacagaattttatttttaaactgtcttttaaataatatattcttatacggaaa

SEQ ID NO: 22326 - DNA, 1728 bp, Homo sapiens
  source 1..1728: mol_type = unassigned DNA
acagtaaaaagtccgagtgcagccgccgggcgcaggatgggatccggctcctccagctaccggcccaaggccatctacctggacatcgatggacgcattcagaaggaacacgaccatctccctgctgaccaccgacgacgccatggtctccatcgaccccaccatgcccgcgaattcagaacgcactccgtacaaagtgagacctgtggccatcaagcaactctccgagcattcaaaatcaatgaactgaaagctgaagttgcaaatcacttggctgtcctagagaaacgcgtggaattggaaggactaaaagtggtggagattgagaaatgcaagagtgacattaagaagatgagggaggagctggcggccagaagcagcaggaccaactgcccctgtaagtacagttttttggataaccacaagaagttgactcctcgacgcgatgttcccacttaccccaagtacctgctctctccagagaccatcgaggccctgcggaagccgacctttgacgtctggctttgggagcccaatgagatgctgagctgcctggagcacatgtaccacgacctcgggctggtcagggacttcagcatcaaccctgtcaccctcaggaggtggctgttctgcgtccacgacaactacagaaacaaccccttccacaacttccggcactgcttctgcgtggcccagatgatgtacagcatggtctggctctgcagtctccaggagaagttctcacaaacggatatcctgatcctaatgacagcggccatctgccacgatctggaccatcccggctacaacaacacgtaccagatcaatgcccgcacagagctggcggtccgctacaatgacatctcaccgctggagaaccaccactgcgccgtggccttccagatcctcgccgagcctgagtgcaacatcttctccaacatcccacctgatgggttcaagcagatccgacagggaatgatcacattaatcttggccactgacatggcaagacatgcagaaattatggattctttcaaagagaaaatggagaattttgactacagcaacgaggagcacatgaccctgctgaagatgattttgataaaatgctgtgatatctctaacgaggtccgtccaatggaagtcgcagagccttgggtggactgtttattagaggaatattttatgcagagcgaccgtgagaagtcagaaggccttcctgtggcaccgttcatggaccgagacaaagtgaccaaggccacagcccagattgggttcatcaagtttgtcctgatcccaatgtttgaaacagtgaccaagctcttccccatggttgaggagatcatgctgcagccactttgggaatcccgagatcgctacgaggagctgaagcggatagatgacgccatgaaagagttacagaagaagactgacagcttgacgtctggggccaccgagaagtccagagagagaagcagagatgtgaaaaacagtgaaggagactgtgcctgaggaaagcggggggcgtggctgcagttctggacgggctggccgagctgcgcgggatccttgtgcagggaagagctgccctgggcacctggcaccacaagaccatgttttctaagaaccattttgttcactgatacaaaaaaaaaaaaaggaattcatgatgctgtacagaattttatttttaaactgtcttttaaataatatattcttatacggaaa

SEQ ID NO: 22327 - DNA, 1883 bp, Homo sapiens
  source 1..1883: mol_type = unassigned DNA
cctcccgcggcggctggcgtcgggaaagtacagtaaaaagtccgagtgcagccgccgggcgcaggatgggatccggctcctccagctaccggcccaaggccatctacctggacatcgatggacgcattcagaaggtaatcttcagcaagtactgcaactccagcgacatcatggacctgttctgcatcgccaccggcctgcctcggaacacgaccatctccctgctgaccaccgacgacgccatggtctccatcgaccccaccatgcccgcgaattcagaacgcactccgtacaaagtgagacctgtggccatcaagcaactctccgagagagaagaattaatccagagcgtgctggcgcaggttgcagagcagttctcaagagcattcaaaatcaatgaactgaaagctgaagttgcaaatcacttggctgtcctagagaaacgcgtggaattggaaggactaaaagtggtggagattgagaaatgcaagagtgacattaagaagatgagggaggagctggcggccagaagcagcaggaccaactgcccctgtaagtacagttttttggataaccacaagaagttgactcctcgacgcgatgttcccacttaccccaagtacctgctctctccagagaccatcgaggccctgcggaagccgacctttgacgtctggctttgggagcccaatgagatgctgagctgcctggagcacatgtaccacgacctcgggctggtcagggacttcagcatcaaccctgtcaccctcaggaggtggctgttctgcgtccacgacaactacagaaacaaccccttccacaacttccggcactgcttctgcgtggcccagatgatgtacagcatggtctggctctgcagtctccaggagaagttctcacaaacggatatcctgatcctaatgacagcggccatctgccacgatctggaccatcccggctacaacaacacgtaccagatcaatgcccgcacagagctggcggtccgctacaatgacatctcaccgctggagaaccaccactgcgccgtggccttccagatcctcgccgagcctgagtgcaacatcttctccaacatcccacctgatgggttcaagcagatccgacagggaatgatcacattaatcttggccactgacatggcaagacatgcagaaattatggattctttcaaagagaaaatggagaattttgactacagcaacgaggagcacatgaccctgctgaagatgattttgataaaatgctgtgatatctctaacgaggtccgtccaatggaagtcgcagagccttgggtggactgtttattagaggaatattttatgcagagcgaccgtgagaagtcagaaggccttcctgtggcaccgttcatggaccgagacaaagtgaccaaggccacagcccagattgggttcatcaagtttgtcctgatcccaatgtttgaaacagtgaccaagctcttccccatggttgaggagatcatgctgcagccactttgggaatcccgagatcgctacgaggagctgaagcggatagatgacgccatgaaagagttacagaagaagactgacagcttgacgtctggggccaccgagaagtccagagagagaagcagagatgtgaaaaacagtgaaggagactgtgcctgaggaaagcggggggcgtggctgcagttctggacgggctggccgagctgcgcgggatccttgtgcagggaagagctgccctgggcacctggcaccacaagaccatgttttctaagaaccattttgttcactgatacaaaaaaaaaaaaaggaattcatgatgctgtacagaattttatttttaaactgtcttttaaataatatattcttatacggaaa

SEQ ID NO: 22328 - DNA, 1616 bp, Homo sapiens
  source 1..1616: mol_type = unassigned DNA
ggatgggatccggctcctccagctaccggcccaaggccatctacctggacatcgatggacgcattcagaagcactccgtacaaagtgagacctgtggccatcaagcaactctccgagcattcaaaatcaatgaactgaaagctgaagttgcaaatcacttggctgtcctagagaaacgcgtggaattggaaggactaaaagtggtggagattgagaaatgcaagagtgacattaagaagatgagggaggagctggcggccagaagcagcaggaccaactgcccctgtaagtacagttttttggataaccacaagaagttgactcctcgacgcgatgttcccacttaccccaagtacctgctctctccagagaccatcgaggccctgcggaagccgacctttgacgtctggctttgggagcccaatgagatgctgagctgcctggagcacatgtaccacgacctcgggctggtcagggacttcagcatcaaccctgtcaccctcaggaggtggctgttctgcgtccacgacaactacagaaacaaccccttccacaacttccggcactgcttctgcgtggcccagatgatgtacagcatggtctggctctgcagtctccaggagaagttctcacaaacggatatcctgatcctaatgacagcggccatctgccacgatctggaccatcccggctacaacaacacgtaccagatcaatgcccgcacagagctggcggtccgctacaatgacatctcaccgctggagaaccaccactgcgccgtggccttccagatcctcgccgagcctgagtgcaacatcttctccaacatcccacctgatgggttcaagcagatccgacagggaatgatcacattaatcttggccactgacatggcaagacatgcagaaattatggattctttcaaagagaaaatggagaattttgactacagcaacgaggagcacatgaccctgctgaagatgattttgataaaatgctgtgatatctctaacgaggtccgtccaatggaagtcgcagagccttgggtggactgtttattagaggaatattttatgcagagcgaccgtgagaagtcagaaggccttcctgtggcaccgttcatggaccgagacaaagtgaccaaggccacagcccagattgggttcatcaagtttgtcctgatcccaatgtttgaaacagtgaccaagctcttccccatggttgaggagatcatgctgcagccactttgggaatcccgagatcgctacgaggagctgaagcggatagatgacgccatgaaagagttacagaagaagactgacagcttgacgtctggggccaccgagaagtccagagagagaagcagagatgtgaaaaacagtgaaggagactgtgcctgaggaaagcggggggcgtggctgcagttctggacgggctggccgagctgcgcgggatccttgtgcagggaagagctgccctgggcacctggcaccacaagaccatgttttctaagaaccattttgttcactgatacaaaaaaaaaaaaaggaattcatgatgctgtacagaattttatttttaaactgtcttttaaataatatattcttatacggaaa

SEQ ID NO: 22329 - DNA, 1875 bp, Homo sapiens
  source 1..1875: mol_type = unassigned DNA
acagtaaaaagtccgagtgcagccgccgggcgcaggatgggatccggctcctccagctaccggcccaaggccatctacctggacatcgatggacgcattcagaaggtaatcttcagcaagtactgcaactccagcgacatcatggacctgttctgcatcgccaccggcctgcctcggaacacgaccatctccctgctgaccaccgacgacgccatggtctccatcgaccccaccatgcccgcgaattcagaacggaatgagctcattctctatacatcactccgtaacttgttgtttttacctagtaaggagtcatgggcgtcccaccagcactccgtacaaagtgagacctgtggccatcaagcaactctccgagcattcaaaatcaatgaactgaaagctgaagttgcaaatcacttggctgtcctagagaaacgcgtggaattggaaggactaaaagtggtggagattgagaaatgcaagagtgacattaagaagatgagggaggagctggcggccagaagcagcaggaccaactgcccctgtaagtacagttttttggataaccacaagaagttgactcctcgacgcgatgttcccacttaccccaagtacctgctctctccagagaccatcgaggccctgcggaagccgacctttgacgtctggctttgggagcccaatgagatgctgagctgcctggagcacatgtaccacgacctcgggctggtcagggacttcagcatcaaccctgtcaccctcaggaggtggctgttctgcgtccacgacaactacagaaacaaccccttccacaacttccggcactgcttctgcgtggcccagatgatgtacagcatggtctggctctgcagtctccaggagaagttctcacaaacggatatcctgatcctaatgacagcggccatctgccacgatctggaccatcccggctacaacaacacgtaccagatcaatgcccgcacagagctggcggtccgctacaatgacatctcaccgctggagaaccaccactgcgccgtggccttccagatcctcgccgagcctgagtgcaacatcttctccaacatcccacctgatgggttcaagcagatccgacagggaatgatcacattaatcttggccactgacatggcaagacatgcagaaattatggattctttcaaagagaaaatggagaattttgactacagcaacgaggagcacatgaccctgctgaagatgattttgataaaatgctgtgatatctctaacgaggtccgtccaatggaagtcgcagagccttgggtggactgtttattagaggaatattttatgcagagcgaccgtgagaagtcagaaggccttcctgtggcaccgttcatggaccgagacaaagtgaccaaggccacagcccagattgggttcatcaagtttgtcctgatcccaatgtttgaaacagtgaccaagctcttccccatggttgaggagatcatgctgcagccactttgggaatcccgagatcgctacgaggagctgaagcggatagatgacgccatgaaagagttacagaagaagactgacagcttgacgtctggggccaccgagaagtccagagagagaagcagagatgtgaaaaacagtgaaggagactgtgcctgaggaaagcggggggcgtggctgcagttctggacgggctggccgagctgcgcgggatccttgtgcagggaagagctgccctgggcacctggcaccacaagaccatgttttctaagaaccattttgttcactgatacaaaaaaaaaaaaaggaattcatgatgctgtacagaattttatttttaaactgtcttttaaataatatattcttatacggaaa

SEQ ID NO: 22330 - DNA, 1671 bp, Homo sapiens
  source 1..1671: mol_type = unassigned DNA
ggatgggatccggctcctccagctaccggcccaaggccatctacctggacatcgatggacgcattcagaagcactccgtacaaagtgagacctgtggccatcaagcaactctccgagagagaagaattaatccagagcgtgctggcgcaggttgcagagcagttctcaagagcattcaaaatcaatgaactgaaagctgaagttgcaaatcacttggctgtcctagagaaacgcgtggaattggaaggactaaaagtggtggagattgagaaatgcaagagtgacattaagaagatgagggaggagctggcggccagaagcagcaggaccaactgcccctgtaagtacagttttttggataaccacaagaagttgactcctcgacgcgatgttcccacttaccccaagtacctgctctctccagagaccatcgaggccctgcggaagccgacctttgacgtctggctttgggagcccaatgagatgctgagctgcctggagcacatgtaccacgacctcgggctggtcagggacttcagcatcaaccctgtcaccctcaggaggtggctgttctgcgtccacgacaactacagaaacaaccccttccacaacttccggcactgcttctgcgtggcccagatgatgtacagcatggtctggctctgcagtctccaggagaagttctcacaaacggatatcctgatcctaatgacagcggccatctgccacgatctggaccatcccggctacaacaacacgtaccagatcaatgcccgcacagagctggcggtccgctacaatgacatctcaccgctggagaaccaccactgcgccgtggccttccagatcctcgccgagcctgagtgcaacatcttctccaacatcccacctgatgggttcaagcagatccgacagggaatgatcacattaatcttggccactgacatggcaagacatgcagaaattatggattctttcaaagagaaaatggagaattttgactacagcaacgaggagcacatgaccctgctgaagatgattttgataaaatgctgtgatatctctaacgaggtccgtccaatggaagtcgcagagccttgggtggactgtttattagaggaatattttatgcagagcgaccgtgagaagtcagaaggccttcctgtggcaccgttcatggaccgagacaaagtgaccaaggccacagcccagattgggttcatcaagtttgtcctgatcccaatgtttgaaacagtgaccaagctcttccccatggttgaggagatcatgctgcagccactttgggaatcccgagatcgctacgaggagctgaagcggatagatgacgccatgaaagagttacagaagaagactgacagcttgacgtctggggccaccgagaagtccagagagagaagcagagatgtgaaaaacagtgaaggagactgtgcctgaggaaagcggggggcgtggctgcagttctggacgggctggccgagctgcgcgggatccttgtgcagggaagagctgccctgggcacctggcaccacaagaccatgttttctaagaaccattttgttcactgatacaaaaaaaaaaaaaggaattcatgatgctgtacagaattttatttttaaactgtcttttaaataatatattcttatacggaaa

SEQ ID NO: 22331 - DNA, 1963 bp, Homo sapiens
  source 1..1963: mol_type = unassigned DNA
acagtaaaaagtccgagtgcagccgccgggcgcaggatgggatccggctcctccagctaccggcccaaggccatctacctggacatcgatggacgcattcagaaggaacacgaccatctccctgctgaccaccgacgacgccatggtctccatcgaccccaccatgcccgcgaattcagaacgcactccgtacaaagtgagacctgtggccatcaagcaactctccgctggtgtcgaggacaagagaaccacaagccgtggccagtctgctgagagaccactgagggacagacgggttgtgggcctggagcagccccggagggaaggagcatttgaaagtggacaggtagagcccaggcccagagagccccagggctgctaccaggaaggccagcgcatccctccagagagagaagaattaatccagagcgtgctggcgcaggttgcagagcagttctcaagagcattcaaaatcaatgaactgaaagctgaagttgcaaatcacttggctgtcctagagaaacgcgtggaattggaaggactaaaagtggtggagattgagaaatgcaagagtgacattaagaagatgagggaggagctggcggccagaagcagcaggaccaactgcccctgtaagtacagttttttggataaccacaagaagttgactcctcgacgcgatgttcccacttaccccaagtacctgctctctccagagaccatcgaggccctgcggaagccgacctttgacgtctggctttgggagcccaatgagatgctgagctgcctggagcacatgtaccacgacctcgggctggtcagggacttcagcatcaaccctgtcaccctcaggaggtggctgttctgcgtccacgacaactacagaaacaaccccttccacaacttccggcactgcttctgcgtggcccagatgatgtacagcatggtctggctctgcagtctccaggagaagttctcacaaacggatatcctgatcctaatgacagcggccatctgccacgatctggaccatcccggctacaacaacacgtaccagatcaatgcccgcacagagctggcggtccgctacaatgacatctcaccgctggagaaccaccactgcgccgtggccttccagatcctcgccgagcctgagtgcaacatcttctccaacatcccacctgatgggttcaagcagatccgacagggaatgatcacattaatcttggccactgacatggcaagacatgcagaaattatggattctttcaaagagaaaatggagaattttgactacagcaacgaggagcacatgaccctgctgaagatgattttgataaaatgctgtgatatctctaacgaggtccgtccaatggaagtcgcagagccttgggtggactgtttattagaggaatattttatgcagagcgaccgtgagaagtcagaaggccttcctgtggcaccgttcatggaccgagacaaagtgaccaaggccacagcccagattgggttcatcaagtttgtcctgatcccaatgtttgaaacagtgaccaagctcttccccatggttgaggagatcatgctgcagccactttgggaatcccgagatcgctacgaggagctgaagcggatagatgacgccatgaaagagttacagaagaagactgacagcttgacgtctggggccaccgagaagtccagagagagaagcagagatgtgaaaaacagtgaaggagactgtgcctgaggaaagcggggggcgtggctgcagttctggacgggctggccgagctgcgcgggatccttgtgcagggaagagctgccctgggcacctggcaccacaagaccatgttttctaagaaccattttgttcactgatacaaaaaaaaaaaaaggaattcatgatgctgtacagaattttatttttaaactgtcttttaaataatatattcttatacggaaa

SEQ ID NO: 22332 - DNA, 1606 bp, Homo sapiens
  source 1..1606: mol_type = unassigned DNA
acagtaaaaagtccgagtgcagccgccgggcgcaggatgggatccggctcctccagctaccggcccaaggccatctacctggacatcgatggacgcattcagaagagcattcaaaatcaatgaactgaaagctgaagttgcaaatcacttggctgtcctagagaaacgcgtggaattggaaggactaaaagtggtggagattgagaaatgcaagagtgacattaagaagatgagggaggagctggcggccagaagcagcaggaccaactgcccctgtaagtacagttttttggataaccacaagaagttgactcctcgacgcgatgttcccacttaccccaagtacctgctctctccagagaccatcgaggccctgcggaagccgacctttgacgtctggctttgggagcccaatgagatgctgagctgcctggagcacatgtaccacgacctcgggctggtcagggacttcagcatcaaccctgtcaccctcaggaggtggctgttctgcgtccacgacaactacagaaacaaccccttccacaacttccggcactgcttctgcgtggcccagatgatgtacagcatggtctggctctgcagtctccaggagaagttctcacaaacggatatcctgatcctaatgacagcggccatctgccacgatctggaccatcccggctacaacaacacgtaccagatcaatgcccgcacagagctggcggtccgctacaatgacatctcaccgctggagaaccaccactgcgccgtggccttccagatcctcgccgagcctgagtgcaacatcttctccaacatcccacctgatgggttcaagcagatccgacagggaatgatcacattaatcttggccactgacatggcaagacatgcagaaattatggattctttcaaagagaaaatggagaattttgactacagcaacgaggagcacatgaccctgctgaagatgattttgataaaatgctgtgatatctctaacgaggtccgtccaatggaagtcgcagagccttgggtggactgtttattagaggaatattttatgcagagcgaccgtgagaagtcagaaggccttcctgtggcaccgttcatggaccgagacaaagtgaccaaggccacagcccagattgggttcatcaagtttgtcctgatcccaatgtttgaaacagtgaccaagctcttccccatggttgaggagatcatgctgcagccactttgggaatcccgagatcgctacgaggagctgaagcggatagatgacgccatgaaagagttacagaagaagactgacagcttgacgtctggggccaccgagaagtccagagagagaagcagagatgtgaaaaacagtgaaggagactgtgcctgaggaaagcggggggcgtggctgcagttctggacgggctggccgagctgcgcgggatccttgtgcagggaagagctgccctgggcacctggcaccacaagaccatgttttctaagaaccattttgttcactgatacaaaaaaaaaaaaaggaattcatgatgctgtacagaattttatttttaaactgtcttttaaataatatattcttatacggaaa

SEQ ID NO: 22333 - DNA, 1684 bp, Homo sapiens
  source 1..1684: mol_type = unassigned DNA
acagtaaaaagtccgagtgcagccgccgggcgcaggatgggatccggctcctccagctaccggcccaaggccatctacctggacatcgatggacgcattcagaaggaacacgaccatctccctgctgaccaccgacgacgccatggtctccatcgaccccaccatgcccgcgaattcagaacgagcattcaaaatcaatgaactgaaagctgaagttgcaaatcacttggctgtcctagagaaacgcgtggaattggaaggactaaaagtggtggagattgagaaatgcaagagtgacattaagaagatgagggaggagctggcggccagaagcagcaggaccaactgcccctgtaagtacagttttttggataaccacaagaagttgactcctcgacgcgatgttcccacttaccccaagtacctgctctctccagagaccatcgaggccctgcggaagccgacctttgacgtctggctttgggagcccaatgagatgctgagctgcctggagcacatgtaccacgacctcgggctggtcagggacttcagcatcaaccctgtcaccctcaggaggtggctgttctgcgtccacgacaactacagaaacaaccccttccacaacttccggcactgcttctgcgtggcccagatgatgtacagcatggtctggctctgcagtctccaggagaagttctcacaaacggatatcctgatcctaatgacagcggccatctgccacgatctggaccatcccggctacaacaacacgtaccagatcaatgcccgcacagagctggcggtccgctacaatgacatctcaccgctggagaaccaccactgcgccgtggccttccagatcctcgccgagcctgagtgcaacatcttctccaacatcccacctgatgggttcaagcagatccgacagggaatgatcacattaatcttggccactgacatggcaagacatgcagaaattatggattctttcaaagagaaaatggagaattttgactacagcaacgaggagcacatgaccctgctgaagatgattttgataaaatgctgtgatatctctaacgaggtccgtccaatggaagtcgcagagccttgggtggactgtttattagaggaatattttatgcagagcgaccgtgagaagtcagaaggccttcctgtggcaccgttcatggaccgagacaaagtgaccaaggccacagcccagattgggttcatcaagtttgtcctgatcccaatgtttgaaacagtgaccaagctcttccccatggttgaggagatcatgctgcagccactttgggaatcccgagatcgctacgaggagctgaagcggatagatgacgccatgaaagagttacagaagaagactgacagcttgacgtctggggccaccgagaagtccagagagagaagcagagatgtgaaaaacagtgaaggagactgtgcctgaggaaagcggggggcgtggctgcagttctggacgggctggccgagctgcgcgggatccttgtgcagggaagagctgccctgggcacctggcaccacaagaccatgttttctaagaaccattttgttcactgatacaaaaaaaaaaaaaggaattcatgatgctgtacagaattttatttttaaactgtcttttaaataatatattcttatacggaaa

SEQ ID NO: 22334 - DNA, 1885 bp, Homo sapiens
  source 1..1885: mol_type = unassigned DNA
acagtaaaaagtccgagtgcagccgccgggcgcaggatgggatccggctcctccagctaccggcccaaggccatctacctggacatcgatggacgcattcagaagcactccgtacaaagtgagacctgtggccatcaagcaactctccgctggtgtcgaggacaagagaaccacaagccgtggccagtctgctgagagaccactgagggacagacgggttgtgggcctggagcagccccggagggaaggagcatttgaaagtggacaggtagagcccaggcccagagagccccagggctgctaccaggaaggccagcgcatccctccagagagagaagaattaatccagagcgtgctggcgcaggttgcagagcagttctcaagagcattcaaaatcaatgaactgaaagctgaagttgcaaatcacttggctgtcctagagaaacgcgtggaattggaaggactaaaagtggtggagattgagaaatgcaagagtgacattaagaagatgagggaggagctggcggccagaagcagcaggaccaactgcccctgtaagtacagttttttggataaccacaagaagttgactcctcgacgcgatgttcccacttaccccaagtacctgctctctccagagaccatcgaggccctgcggaagccgacctttgacgtctggctttgggagcccaatgagatgctgagctgcctggagcacatgtaccacgacctcgggctggtcagggacttcagcatcaaccctgtcaccctcaggaggtggctgttctgcgtccacgacaactacagaaacaaccccttccacaacttccggcactgcttctgcgtggcccagatgatgtacagcatggtctggctctgcagtctccaggagaagttctcacaaacggatatcctgatcctaatgacagcggccatctgccacgatctggaccatcccggctacaacaacacgtaccagatcaatgcccgcacagagctggcggtccgctacaatgacatctcaccgctggagaaccaccactgcgccgtggccttccagatcctcgccgagcctgagtgcaacatcttctccaacatcccacctgatgggttcaagcagatccgacagggaatgatcacattaatcttggccactgacatggcaagacatgcagaaattatggattctttcaaagagaaaatggagaattttgactacagcaacgaggagcacatgaccctgctgaagatgattttgataaaatgctgtgatatctctaacgaggtccgtccaatggaagtcgcagagccttgggtggactgtttattagaggaatattttatgcagagcgaccgtgagaagtcagaaggccttcctgtggcaccgttcatggaccgagacaaagtgaccaaggccacagcccagattgggttcatcaagtttgtcctgatcccaatgtttgaaacagtgaccaagctcttccccatggttgaggagatcatgctgcagccactttgggaatcccgagatcgctacgaggagctgaagcggatagatgacgccatgaaagagttacagaagaagactgacagcttgacgtctggggccaccgagaagtccagagagagaagcagagatgtgaaaaacagtgaaggagactgtgcctgaggaaagcggggggcgtggctgcagttctggacgggctggccgagctgcgcgggatccttgtgcagggaagagctgccctgggcacctggcaccacaagaccatgttttctaagaaccattttgttcactgatacaaaaaaaaaaaaaggaattcatgatgctgtacagaattttatttttaaactgtcttttaaataatatattcttatacggaaa

SEQ ID NO: 22335 - DNA, 1783 bp, Homo sapiens
  source 1..1783: mol_type = unassigned DNA
acagtaaaaagtccgagtgcagccgccgggcgcaggatgggatccggctcctccagctaccggcccaaggccatctacctggacatcgatggacgcattcagaaggaacacgaccatctccctgctgaccaccgacgacgccatggtctccatcgaccccaccatgcccgcgaattcagaacgcactccgtacaaagtgagacctgtggccatcaagcaactctccgagagagaagaattaatccagagcgtgctggcgcaggttgcagagcagttctcaagagcattcaaaatcaatgaactgaaagctgaagttgcaaatcacttggctgtcctagagaaacgcgtggaattggaaggactaaaagtggtggagattgagaaatgcaagagtgacattaagaagatgagggaggagctggcggccagaagcagcaggaccaactgcccctgtaagtacagttttttggataaccacaagaagttgactcctcgacgcgatgttcccacttaccccaagtacctgctctctccagagaccatcgaggccctgcggaagccgacctttgacgtctggctttgggagcccaatgagatgctgagctgcctggagcacatgtaccacgacctcgggctggtcagggacttcagcatcaaccctgtcaccctcaggaggtggctgttctgcgtccacgacaactacagaaacaaccccttccacaacttccggcactgcttctgcgtggcccagatgatgtacagcatggtctggctctgcagtctccaggagaagttctcacaaacggatatcctgatcctaatgacagcggccatctgccacgatctggaccatcccggctacaacaacacgtaccagatcaatgcccgcacagagctggcggtccgctacaatgacatctcaccgctggagaaccaccactgcgccgtggccttccagatcctcgccgagcctgagtgcaacatcttctccaacatcccacctgatgggttcaagcagatccgacagggaatgatcacattaatcttggccactgacatggcaagacatgcagaaattatggattctttcaaagagaaaatggagaattttgactacagcaacgaggagcacatgaccctgctgaagatgattttgataaaatgctgtgatatctctaacgaggtccgtccaatggaagtcgcagagccttgggtggactgtttattagaggaatattttatgcagagcgaccgtgagaagtcagaaggccttcctgtggcaccgttcatggaccgagacaaagtgaccaaggccacagcccagattgggttcatcaagtttgtcctgatcccaatgtttgaaacagtgaccaagctcttccccatggttgaggagatcatgctgcagccactttgggaatcccgagatcgctacgaggagctgaagcggatagatgacgccatgaaagagttacagaagaagactgacagcttgacgtctggggccaccgagaagtccagagagagaagcagagatgtgaaaaacagtgaaggagactgtgcctgaggaaagcggggggcgtggctgcagttctggacgggctggccgagctgcgcgggatccttgtgcagggaagagctgccctgggcacctggcaccacaagaccatgttttctaagaaccattttgttcactgatacaaaaaaaaaaaaaggaattcatgatgctgtacagaattttatttttaaactgtcttttaaataatatattcttatacggaaa

SEQ ID NO: 22336 - DNA, 1776 bp, Homo sapiens
  source 1..1776: mol_type = unassigned DNA
acagtaaaaagtccgagtgcagccgccgggcgcaggatgggatccggctcctccagctaccggcccaaggccatctacctggacatcgatggacgcattcagaaggtaatcttcagcaagtactgcaactccagcgacatcatggacctgttctgcatcgccaccggcctgcctcgcactccgtacaaagtgagacctgtggccatcaagcaactctccgagagagaagaattaatccagagcgtgctggcgcaggttgcagagcagttctcaagagcattcaaaatcaatgaactgaaagctgaagttgcaaatcacttggctgtcctagagaaacgcgtggaattggaaggactaaaagtggtggagattgagaaatgcaagagtgacattaagaagatgagggaggagctggcggccagaagcagcaggaccaactgcccctgtaagtacagttttttggataaccacaagaagttgactcctcgacgcgatgttcccacttaccccaagtacctgctctctccagagaccatcgaggccctgcggaagccgacctttgacgtctggctttgggagcccaatgagatgctgagctgcctggagcacatgtaccacgacctcgggctggtcagggacttcagcatcaaccctgtcaccctcaggaggtggctgttctgcgtccacgacaactacagaaacaaccccttccacaacttccggcactgcttctgcgtggcccagatgatgtacagcatggtctggctctgcagtctccaggagaagttctcacaaacggatatcctgatcctaatgacagcggccatctgccacgatctggaccatcccggctacaacaacacgtaccagatcaatgcccgcacagagctggcggtccgctacaatgacatctcaccgctggagaaccaccactgcgccgtggccttccagatcctcgccgagcctgagtgcaacatcttctccaacatcccacctgatgggttcaagcagatccgacagggaatgatcacattaatcttggccactgacatggcaagacatgcagaaattatggattctttcaaagagaaaatggagaattttgactacagcaacgaggagcacatgaccctgctgaagatgattttgataaaatgctgtgatatctctaacgaggtccgtccaatggaagtcgcagagccttgggtggactgtttattagaggaatattttatgcagagcgaccgtgagaagtcagaaggccttcctgtggcaccgttcatggaccgagacaaagtgaccaaggccacagcccagattgggttcatcaagtttgtcctgatcccaatgtttgaaacagtgaccaagctcttccccatggttgaggagatcatgctgcagccactttgggaatcccgagatcgctacgaggagctgaagcggatagatgacgccatgaaagagttacagaagaagactgacagcttgacgtctggggccaccgagaagtccagagagagaagcagagatgtgaaaaacagtgaaggagactgtgcctgaggaaagcggggggcgtggctgcagttctggacgggctggccgagctgcgcgggatccttgtgcagggaagagctgccctgggcacctggcaccacaagaccatgttttctaagaaccattttgttcactgatacaaaaaaaaaaaaaggaattcatgatgctgtacagaattttatttttaaactgtcttttaaataatatattcttatacggaaa

SEQ ID NO: 22337 - DNA, 1779 bp, Homo sapiens
  source 1..1779: mol_type = unassigned DNA
tcccgcggcggctggcgtcgggaaagtacagtaaaaagtccgagtgcagccgccgggcgcaggatgggatccggctcctccagctaccggcccaaggccatctacctggacatcgatggacgcattcagaaggtaatcttcagcaagtactgcaactccagcgacatcatggacctgttctgcatcgccaccggcctgcctcggaacacgaccatctccctgctgaccaccgacgacgccatggtctccatcgaccccaccatgcccgcgaattcagaacgagcattcaaaatcaatgaactgaaagctgaagttgcaaatcacttggctgtcctagagaaacgcgtggaattggaaggactaaaagtggtggagattgagaaatgcaagagtgacattaagaagatgagggaggagctggcggccagaagcagcaggaccaactgcccctgtaagtacagttttttggataaccacaagaagttgactcctcgacgcgatgttcccacttaccccaagtacctgctctctccagagaccatcgaggccctgcggaagccgacctttgacgtctggctttgggagcccaatgagatgctgagctgcctggagcacatgtaccacgacctcgggctggtcagggacttcagcatcaaccctgtcaccctcaggaggtggctgttctgcgtccacgacaactacagaaacaaccccttccacaacttccggcactgcttctgcgtggcccagatgatgtacagcatggtctggctctgcagtctccaggagaagttctcacaaacggatatcctgatcctaatgacagcggccatctgccacgatctggaccatcccggctacaacaacacgtaccagatcaatgcccgcacagagctggcggtccgctacaatgacatctcaccgctggagaaccaccactgcgccgtggccttccagatcctcgccgagcctgagtgcaacatcttctccaacatcccacctgatgggttcaagcagatccgacagggaatgatcacattaatcttggccactgacatggcaagacatgcagaaattatggattctttcaaagagaaaatggagaattttgactacagcaacgaggagcacatgaccctgctgaagatgattttgataaaatgctgtgatatctctaacgaggtccgtccaatggaagtcgcagagccttgggtggactgtttattagaggaatattttatgcagagcgaccgtgagaagtcagaaggccttcctgtggcaccgttcatggaccgagacaaagtgaccaaggccacagcccagattgggttcatcaagtttgtcctgatcccaatgtttgaaacagtgaccaagctcttccccatggttgaggagatcatgctgcagccactttgggaatcccgagatcgctacgaggagctgaagcggatagatgacgccatgaaagagttacagaagaagactgacagcttgacgtctggggccaccgagaagtccagagagagaagcagagatgtgaaaaacagtgaaggagactgtgcctgaggaaagcggggggcgtggctgcagttctggacgggctggccgagctgcgcgggatccttgtgcagggaagagctgccctgggcacctggcaccacaagaccatgttttctaagaaccattttgttcactgatacaaaaaaaaaaaaaggaattcatgatgctgtacagaattttatttttaaactgtcttttaaataatatattcttatacgg

SEQ ID NO: 22338 - DNA, 2686 bp, Homo sapiens
  source 1..2686: mol_type = unassigned DNA
atttaaagctgggaggttctgccaccaagcacggccttcccactgggaacacaaacttgctggcgggaagagcccggaaagaaacctgtggatctcccttcgagatcatccaaagagaagaaaggtgacctcacattcgtgccccttagcagcactctgcagaaatgcctcctcagctgcaaaacggcctgaacctctcggccaaagttgtccagggaagcctggacagcctaccccaggcagtgagggagtttctcgagaataacgctgagctgtgtcagcctgatcacatccacatctgtgacggctctgaggaggagaatgggcggcttctgggccagatggaggaagagggcatcctcaggcggctgaagaagtatgacaactgctggttggctctcactgaccccagggatgtggccaggatcgaaagcaagacggttatcgtcacccaagagcaaagagacacagtgcccatccccaaaacaggcctcagccagctcggtcgctggatgtcagaggaggattttgagaaagcgttcaatgccaggttcccagggtgcatgaaaggtcgcaccatgtacgtcatcccattcagcatggggccgctgggctcgcctctgtcaaagatcggcatcgagctgacggattcaccctacgtggtggccagcatgcggatcatgacgcggatgggcacgcccgtcctggaagcagtgggcgatggggagtttgtcaaatgcctccattctgtggggtgccctctgcctttacaaaagcctttggtcaacaactggccctgcaacccggagctgacgctcatcgcccacctgcctgaccgcagagagatcatctcctttggcagtgggtacggcgggaactcgctgctcgggaagaagtgctttgctctcaggatggccagccggctggccaaggaggaagggtggctggcagagcacatgctgattctgggtataaccaaccctgagggtgagaagaagtacctggcggccgcatttcccagcgcctgcgggaagaccaacctggccatgatgaaccccagcctccccgggtggaaggttgagtgcgtcggggatgacattgcctggatgaagtttgacgcacaaggtcatttaagggccatcaacccagaaaatggctttttcggtgtcgctcctgggacttcagtgaagaccaaccccaatgccatcaagaccatccagaagaacacaatctttaccaatgtggccgagaccagcgacgggggcgtttactgggaaggcattgatgagccgctagcttcaggtgtcaccatcacgtcctggaagaataaggagtggagctcagaggatggggaaccttgtgcccaccccaactcgaggttctgcacccctgccagccagtgccccatcattgatgctgcctgggagtctccggaaggtgttcccattgaaggcattatctttggaggccgtagacctgctggtgtccctctagtctatgaagctctcagctggcaacatggagtctttgtgggggcggccatgagatcagaggccacagcggctgcagaacataaaggcaaaatcatcatgcatgacccctttgccatgcggcccttctttggctacaacttcggcaaatacctggcccactggcttagcatggcccagcacccagcagccaaactgcccaagatcttccatgtcaactggttccggaaggacaaggaaggcaaattcctctggccaggctttggagagaactccagggtgctggagtggatgttcaaccggatcgatggaaaagccagcaccaagctcacgcccataggctacatccccaaggaggatgccctgaacctgaaaggcctggggcacatcaacatgatggagcttttcagcatctccaaggaattctgggagaaggaggtggaagacatcgagaagtatctggaggatcaagtcaatgccgacctcccctgtgaaatcgagagagagatccttgccttgaagcaaagaataagccagatgtaatcagggcctgagtgctttacctttaaaatcattccctttcccatccataaggtgcagtaggagcaagagagggcaagtgttcccaaattgacgccaccataataatcatcaccacaccgtgagcagatctgaaaggcacactttgatttttttaaggataagaaccacagaacactgggtagtagctaatgaaattgagaagggaaatcttagcatgcctccaaaaattcacatccaatgcatagtttgttcaaatttaaggttactcaggcattgatcttttcagtgttttttcactttagctatgtggattagctagaatgcacaccaaaaaaatacttgagctgtatatatatatgtgtgtgtgtgtgtgtgtgtgtgtgtgtgtgtgtgcatgtatgtgcacatgtgtctgtgtggtatatttgtgtatgtgtatttgtatgtactgttattgaaaatatatttaatacctttggaaaaatcttgggcaagatgacctactagttttccttgaaaaaaagttgctttgttattaatattgtgcttaaattatttttatacaccattgttccttacctttacataattgcaatatttcccccttactacttcttggaaaaaaattacaaaatgaagttttatagaaaaga

SEQ ID NO: 22339 - DNA, 1358 bp, Homo sapiens
  source 1..1358: mol_type = unassigned DNA
ctgagctgtgtcagcctgatcacatccacatctgtgacggctctgaggaggagaatgggcggcttctgggccagatggaggaagagggcatcctcaggcggctgaagaagtatgacaactggtcgcaccatgtacgtcatcccattcagcatggggccgctgggctcgcctctgtcaaagatcggcatcgagctgacggattcaccctacgtggtggccagcatgcggatcatgacgcggatgggcacgcccgtcctggaagcagtgggcgatggggagtttgtcaaatgcctccattctgtggggtgccctctgcctttacaaaagcctttggtcaacaactggccctgcaacccggagctgacgctcatcgcccacctgcctgaccgcagagagatcatctcctttggcagtgggtacggcgggaactcgctgctcgggaagaagtgctttgctctcaggatggccagccggctggccaaggaggaagggtggctggcagagcacatgctgattctgggtataaccaaccctgagggtgagaagaagtacctggcggccgcatttcccagcgcctgcgggaagaccaacctggccatgatgaaccccagcctccccgggtggaaggttgagtgcgtcggggatgacattgcctggatgaagtttgacgcacaaggtcatttaagggccatcaacccagaaaatggctttttcggtgtcgctcctgggacttcagtgaagaccaaccccaatgccatcaagaccatccagaagaacacaatctttaccaatgtggccgagaccagcgacgggggcgtttactgggaaggcattgatgagccgctagcttcaggtgtcaccatcacgtcctggaagaataaggagtggagctcagaggatggtgtgtccctgccagaggccttggtgtgccgggctgcagggactgcctgtttgagccaggcactcacgagcctttctctgtcttataggggaaccttgtgcccaccccaactcgaggttctgcacccctgccagccagtgccccatcattgatgctgcctgggagtctccggaaggtgttcccattgaaggcattatctttggaggccgtagacctgctggtgtccctctagtctatgaagctctcagctggcaacatggagtctttgtgggggcggccatgagatcagaggccacagcggctgcagaacataaaggcaaaatcatcatgcatgacccctttgccatgcggcccttctttggctacaacttcggcaaatacctggcccactggcttagcatggcccagcacccagcagccaaactgcccaagatcttccatgtcaactggttccgga

SEQ ID NO: 22340 - DNA, 915 bp, Homo sapiens
  source 1..915: mol_type = unassigned DNA
acaacaggtcatttaagggccatcaacccagaaaatggctttttcggtgtcgctcctgggacttcagtgaagaccaaccccaatgccatcaagaccatccagaagaacacaatctttaccaatgtggccgagaccagcgacgggggcgtttactgggaaggcattgatgagccgctagcttcaggtgtcaccatcacgtcctggaagaataaggagtggagctcagaggatggggaaccttgtgcccaccccaactcgaggttctgcacccctgccagccagtgccccatcattgatgctgcctgggagtctccggaaggtgttcccattgaaggcattatctttggaggccgtagacctgctggtgtccctctagtctatgaagctctcagctggcaacatggagtctttgtgggggcggccatgagatcagaggccacagcggctgcagaacataaaggcaaaatcatcatgcatgacccctttgccatgcggcccttctttggctacaacttcggcaaatacctggcccactggcttagcatggcccagcacccagcagccaaactgcccaagatcttccatgtcaactggttccggaaggacaaggaaggcaaattcctctggccaggctttggagagaactccagggtgctggagtggatgttcaaccggatcgatggaaaagccagcaccaagctcacgcccataggctacatccccaaggaggatgccctgaacctgaaaggcctggggcacatcaacatgatggagcttttcagcatctccaaggaattctgggagaaggaggtggaagacatcgagaagtatctggaggatcaagtcaatgccgacctcccctgtgaaatcgagagagagatccttgccttgaagcaaagaataagccagatgtaa

SEQ ID NO: 22341 - DNA, 1439 bp, Homo sapiens
  source 1..1439: mol_type = unassigned DNA
acggccttcccactgggaacacaaacttgctggcgggaagagcccggaaagaaacctgtggatctcccttcgagatcatccaaagagaagaaaggtgacctcacattcgtgccccttagcagcactctgcagaaatgcctcctcagctgcaaaacggcctgaacctctcggccaaagttgtccagggaagcctggacagcctaccccaggcagtgagggagtttctcgagaataacgctgagctgtgtcagcctgatcacatccacatctgtgacggctctgaggaggagaatgggcggcttctgggccagatggaggaagagggcatcctcaggcggctgaagaagtatgacaactggtcatttaagggccatcaacccagaaaatggctttttcggtgtcgctcctgggacttcagtgaagaccaaccccaatgccatcaagaccatccagaagaacacaatctttaccaatgtggccgagaccagcgacgggggcgtttactgggaaggcattgatgagccgctagcttcaggtgtcaccatcacgtcctggaagaataaggagtggagctcagaggatggggaaccttgtgcccaccccaactcgaggttctgcacccctgccagccagtgccccatcattgatgctgcctgggagtctccggaaggtgttcccattgaaggcattatctttggaggccgtagacctgctggtgtccctctagtctatgaagctctcagctggcaacatggagtctttgtgggggcggccatgagatcagaggccacagcggctgcagaacataaaggcaaaatcatcatgcatgacccctttgccatgcggcccttctttggctacaacttcggcaaatacctggcccactggcttagcatggcccagcacccagcagccaaactgcccaagatcttccatgtcaactggttccggaaggacaaggaaggcaaattcctctggccaggctttggagagaactccagggtgctggagtggatgttcaaccggatcgatggaaaagccagcaccaagctcacgcccataggctacatccccaaggaggatgccctgaacctgaaaggcctggggcacatcaacatgatggagcttttcagcatctccaaggaattctgggagaaggaggtggaagacatcgagaagtatctggaggatcaagtcaatgccgacctcccctgtgaaatcgagagagagatccttgccttgaagcaaagaataagccagatgtaatcagggcctgagtgctttacctttaaaatcattccctttcccatccataaggtgcagtaggagcaagagagggcaagtgttcccaaattgacgccaccataataatcatcaccacaccgtgagcagatctgaaaggcacactttgatttttttaaggataagaaccacagaac

SEQ ID NO: 22342 - DNA, 2357 bp, Homo sapiens
  source 1..2357: mol_type = unassigned DNA
ggcggtttggaggcaggggttggggcggcggctgggctgacctggagcctggagccccggggccgagggagctggcctgccagcggggcggaggaaagctagtgccagccctaccaggttccgcccccgcgcctgcccccctcctttttaagcgcctcccgccagcctctgctgtggctcgcttcgccgcgctccctccttccccgccttccatacctccccggctccgctcggttcctggccaccccgcagcccctgcccaggtgccatggccgcattgtaccgccctggcctgcggcttaactggcatgggctgagccccttgggctggccatcatgccgtagcatccagaccctgcgagtgcttagtggagatctgggccagcttcccactggcattcgagattttgtagagcacagtgcccgcctgtgccaaccagagggcatccacatctgtgatggaactgaggctgagaatactgccacactgaccctgctggagcagcagggcctcatccgaaagctccccaagtacaataactgctggctggcccgcacagaccccaaggatgtggcacgagtagagagcaagacggtgattgtaactccttctcagcgggacacggtacaactcccgcctggtggggcccgtgggcagctgggcaactggatgtccccagctgatttccagcgagctgtggatgagaggtttccaggctgcatgcagggccgcaccatgtatgtgcttccattcagcatgggtcctgtgggctccccgctgtcccgcatcggggtgcagctcactgactcagcctatgtggtggcaagcatgcgtattatgacccgactggggacacctgtgcttcaggccctgggagatggtgactttgtcaagtgtctgcactccgtgggccagcccctgacaggacaaggggagccagtgagccagtggccgtgcaacccagagaaaaccctgattggccacgtgcccgaccagcgggagatcatctccttcggcagcggctatggtggcaactccctgctgggcaagaagtgctttgccctacgcatcgcctctcggctggcccgggatgagggctggctggcagagcacatgctgatcctgggcatcaccagccctgcagggaagaagcgctatgtggcagccgccttccctagtgcctgtggcaagaccaacctggctatgatgcggcctgcactgccaggctggaaagtggagtgtgtgggggatgatattgcttggatgaggtttgacagtgaaggtcgactccgggccatcaaccctgagaacggcttctttggggttgcccctggtacctctgccaccaccaatcccaacgccatggctacaatccagagtaacactatttttaccaatgtggctgagaccagtgatggtggcgtgtactgggagggcattgaccagcctcttccacctggtgttactgtgacctcctggctgggcaaaccctggaaacctggtgacaaggagccctgtgcacatcccaactctcgattttgtgccccggctcgccagtgccccatcatggacccagcctgggaggccccagagggtgtccccattgacgccatcatctttggtggccgcagacccaaaggggtacccctggtatacgaggccttcaactggcgtcatggggtgtttgtgggcagcgccatgcgctctgagtccactgctgcagcagaacacaaagggaagatcatcatgcacgacccatttgccatgcggcccttttttggctacaacttcgggcactacctggaacactggctgagcatggaagggcgcaagggggcccagctgccccgtatcttccatgtcaactggttccggcgtgacgaggcagggcacttcctgtggccaggctttggggagaatgctcgggtgctagactggatctgccggcggttagagggggaggacagtgcccgagagacacccattgggctggtgccaaaggaaggagccttggatctcagcggcctcagagctatagacaccactcagctgttctccctccccaaggacttctgggaacaggaggttcgtgacattcggagctacctgacagagcaggtcaaccaggatctgcccaaagaggtgttggctgagcttgaggccctggagagacgtgtgcacaaaatgtgacctgaggccctagtctagcaagaggacatagcaccctcatctgggaatagggaaggcaccttgcagaaaatatgagcaatttgatattaactaacatcttcaatgtgccatagaccttcccacaaagactgtccaataataagagatgcttatctattttacacaa

SEQ ID NO: 22343 - DNA, 1830 bp, Homo sapiens
  source 1..1830: mol_type = unassigned DNA
ggggcggcggctgggctgacctggagcctggagccccggggccgagggagctggcctgccagcggggcggaggaaagctagtgccagccctaccaggttccgcccccgcgcctgcccccctcctttttaagcgcctcccgccagcctctgctgtggctcgcttcgccgcgctccctccttccccgccttccatacctccccggctccgctcggttcctggccaccccgcagcccctgcccaggtgccatggccgcattgtaccgccctggcctgcggcttaactggcatgggctgagccccttgggctggccatcatgccgtagcatccagaccctgcgagtgcttagtggagatctgggccagcttcccactggcattcgagattttgtagagcacagtgcccgcctgtgccaaccagagggcatccacatctgtgatggaactgaggctgagaatactgccacactgaccctgctggagcagcagggcctcatccgaaagctccccaagtacaataactgctggctggcccgcacagaccccaaggatgtggcacgagtagagagcaagacggtgattgtaactccttctcagcgggacacggtacaactcccgcctggtggggcccgtgggcagctgggcaactggatgtccccagctgatttccagcgagctgtggatgagaggtttccaggctgcatgcagggccgcaccatgtatgtgcttccattcagcatgggtcctgtgggctccccgctgtcccgcatcggggtgcagctcactgactcagcctatgtggtggcaagcatgcgtattatgacccgactggggacacctgtgcttcaggccctgggagatggtgactttgtcaagtgtctgcactccgtgggccagcccctgacaggacaaggggagccagtgagccagtggccgtgcaacccagagaaaaccctgattggccacgtgcccgaccagcgggagatcatctccttcggcagcggctatggtggcaactccctgctgggcaagaagtgctttgccctacgcatcgcctctcggctggcccgggatgagggctggctggcagagcacatgctgatcctgggcatcaccagccctgcagggaagaagcgctatgtggcagccgccttccctagtgcctgtggcaagaccaacctggctatgatgcggcctgcactgccaggctggaaagtggagtgtgtgggggatgatattgcttggatgaggtttgacagtgaaggtcgactccgggccatcaaccctgagaacggcttctttggggttgcccctggtacctctgccaccaccaatcccaacgccatggctacaatccagagtaacactatttttaccaatgtggctgagaccagtgatggtggcgtgtactgggagggcattgaccagcctcttccacctggtgttactgtgacctcctggctgggcaaaccctggaaacctggtatgtgcggtggggaaggtgtggcacagcctccaggcctcagcaccttaatggtggaaaagctttctccacaacctccaaccatcttctaggactgccaggaggcacagaagtcatgaacgtttgcagtttccagtcccaggcaaaatctcagttcatgtcccaactccaccagtcactggttttgtgatctggctaagttgctcaacttccctaagctttagtttccacatcagttgaatgagggtagttgtgatagtacctatctcatgagattgttggaggattaaatagtgcataaaaagggtttatcacactgacaaatacacagtaaattctcaataataaa

SEQ ID NO: 22344 - DNA, 2505 bp, Homo sapiens
  source 1..2505: mol_type = unassigned DNA
agcctctgctgtggctcgcttcgccgcgctccctccttccccgccttccatacctccccggctccgctcggttcctggccaccccgcagcccctgcccaggtgccatggccgcattgtaccgccctggcctgcggtgagtgacccccggcccggggcccacccgcaccttccgctgcgctcgccccctcggggctgccagtggcgctctcctgctctcagcctccgccaggtttcccatcctaggcggaggcgggcaggggcgactgctgtgggtccagcctcccgcgccgcgcgtctcttgggagggcagccggccggtgctcctcgtttccgcctgcacctccccttctctgcctcgctcgcctctgaccgcgcgatctctatctgccactctcagaacttcctctctctcctcgctcctctctgctgagccaggtctccgcatatcctcctttccttcccagatacctccctcggacctctaacgggctctcagccagcgccccagggtacttcgagaggcagcagggccctggggacaagggcttaactggcatgggctgagccccttgggctggccatcatgccgtagcatccagaccctgcgagtgcttagtggagatctgggccagcttcccactggcattcgagattttgtagagcacagtgcccgcctgtgccaaccagagggcatccacatctgtgatggaactgaggctgagaatactgccacactgaccctgctggagcagcagggcctcatccgaaagctccccaagtacaataactgctggctggcccgcacagaccccaaggatgtggcacgagtagagagcaagacggtgattgtaactccttctcagcgggacacggtacaactcccgcctggtggggcccgtgggcagctgggcaactggatgtccccagctgatttccagcgagctgtggatgagaggtttccaggctgcatgcagggccgcaccatgtatgtgcttccattcagcatgggtcctgtgggctccccgctgtcccgcatcggggtgcagctcactgactcagcctatgtggtggcaagcatgcgtattatgacccgactggggacacctgtgcttcaggccctgggagatggtgactttgtcaagtgtctgcactccgtgggccagcccctgacaggacaaggggagccagtgagccagtggccgtgcaacccagagaaaaccctgattggccacgtgcccgaccagcgggagatcatctccttcggcagcggctatggtggcaactccctgctgggcaagaagtgctttgccctacgcatcgcctctcggctggcccgggatgagggctggctggcagagcacatgctgatcctgggcatcaccagccctgcagggaagaagcgctatgtggcagccgccttccctagtgcctgtggcaagaccaacctggctatgatgcggcctgcactgccaggctggaaagtggagtgtgtgggggatgatattgcttggatgaggtttgacagtgaaggtcgactccgggccatcaaccctgagaacggcttctttggggttgcccctggtacctctgccaccaccaatcccaacgccatggctacaatccagagtaacactatttttaccaatgtggctgagaccagtgatggtggcgtgtactgggagggcattgaccagcctcttccacctggtgttactgtgacctcctggctgggcaaaccctggaaacctggtgacaaggagccctgtgcacatcccaactctcgattttgtgccccggctcgccagtgccccatcatggacccagcctgggaggccccagagggtgtccccattgacgccatcatctttggtggccgcagacccaaaggggtacccctggtatacgaggccttcaactggcgtcatggggtgtttgtgggcagcgccatgcgctctgagtccactgctgcagcagaacacaaagggaagatcatcatgcacgacccatttgccatgcggcccttttttggctacaacttcgggcactacctggaacactggctgagcatggaagggcgcaagggggcccagctgccccgtatcttccatgtcaactggttccggcgtgacgaggcagggcacttcctgtggccaggctttggggagaatgctcgggtgctagactggatctgccggcggttagagggggaggacagtgcccgagagacacccattgggctggtgccaaaggaaggagccttggatctcagcggcctcagagctatagacaccactcagctgttctccctccccaaggacttctgggaacaggaggttcgtgacattcggagctacctgacagagcaggtcaaccaggatctgcccaaagaggtgttggctgagcttgaggccctggagagacgtgtgcacaaaatgtgacctgaggccctagtctagcaagaggacatagcaccctcatctgggaatagggaaggcaccttgcag

SEQ ID NO: 22345 - DNA, 2012 bp, Homo sapiens
  source 1..2012: mol_type = unassigned DNA
gtggctcgcttcgccgcgctccctccttccccgccttccatacctccccggctccgctcggttcctggccaccccgcagcccctgcccaggtgccatggccgcattgtaccgccctggcctgcgatacctccctcggacctctaacgggctctcagccagcgccccagggtacttcgagaggcagcagggccctggggacaaggctggctggcccgcacagaccccaaggatgtggcacgagtagagagcaagacggtgattgtaactccttctcagcgggacacggtacaactcccgcctggtggggcccgtgggcagctgggcaactggatgtccccagctgatttccagcgagctgtggatgagaggtttccaggctgcatgcagggccgcaccatgtatgtgcttccattcagcatgggtcctgtgggctccccgctgtcccgcatcggggtgcagctcactgactcagcctatgtggtggcaagcatgcgtattatgacccgactggggacacctgtgcttcaggccctgggagatggtgactttgtcaagtgtctgcactccgtgggccagcccctgacaggacaaggggagccagtgagccagtggccgtgcaacccagagaaaaccctgattggccacgtgcccgaccagcgggagatcatctccttcggcagcggctatggtggcaactccctgctgggcaagaagtgctttgccctacgcatcgcctctcggctggcccgggatgagggctggctggcagagcacatgctgatcctgggcatcaccagccctgcagggaagaagcgctatgtggcagccgccttccctagtgcctgtggcaagaccaacctggctatgatgcggcctgcactgccaggctggaaagtggagtgtgtgggggatgatattgcttggatgaggtttgacagtgaaggtcgactccgggccatcaaccctgagaacggcttctttggggttgcccctggtacctctgccaccaccaatcccaacgccatggctacaatccagagtaacactatttttaccaatgtggctgagaccagtgatggtggcgtgtactgggagggcattgaccagcctcttccacctggtgttactgtgacctcctggctgggcaaaccctggaaacctggtgacaaggagccctgtgcacatcccaactctcgattttgtgccccggctcgccagtgccccatcatggacccagcctgggaggccccagagggtgtccccattgacgccatcatctttggtggccgcagacccaaaggggtacccctggtatacgaggccttcaactggcgtcatggggtgtttgtgggcagcgccatgcgctctgagtccactgctgcagcagaacacaaagggaagatcatcatgcacgacccatttgccatgcggcccttttttggctacaacttcgggcactacctggaacactggctgagcatggaagggcgcaagggggcccagctgccccgtatcttccatgtcaactggttccggcgtgacgaggcagggcacttcctgtggccaggctttggggagaatgctcgggtgctagactggatctgccggcggttagagggggaggacagtgcccgagagacacccattgggctggtgccaaaggaaggagccttggatctcagcggcctcagagctatagacaccactcagctgttctccctccccaaggacttctgggaacaggaggttcgtgacattcggagctacctgacagagcaggtcaaccaggatctgcccaaagaggtgttggctgagcttgaggccctggagagacgtgtgcacaaaatgtgacctgaggccctagtctagcaagaggacatagcaccctcatctgggaatagggaaggcaccttgcagaaaatatgagcaatttgatattaactaacatcttcaatgtgccatagaccttcccacaaagactgtccaataataagagatgcttatctatttt

SEQ ID NO: 22346 - DNA, 2912 bp, Homo sapiens
  source 1..2912: mol_type = unassigned DNA
gcgacgcggcgcaggcggcgggagtgcgagctgggcccgtgtttcggccgccgccatggccgcggtggacctggagaagctgcgggcgtcgggcgcgggcaaggccatcggcgtcctgaccagcggcggcgacgcgcaaggcatgaacgctgctgtccgggctgtgacgcgcatgggcatttatgtgggtgccaaagtcttcctcatctacgagggctatgagggcctcgtggagggaggtgagaacatcaagcaggccaactggctgagcgtctccaacatcatccagctgggcggcactatcattggcagcgctcgctgcaaggcctttaccaccagggaggggcgccgggcagcggcctacaacctggtccagcacggcatcaccaacctgtgcgtcatcggcggggatggcagcctcacaggtgccaacatcttccgcagcgagtggggcagcctgctggaggagctggtggcggaaggtaagatctcagagactacagcccggacctactcgcacctgaacatcgcgggcctagtgggctccatcgataacgacttctgcggcaccgacatgaccatcggcacggactcggccctccaccgcatcatggaggtcatcgatgccatcaccaccactgcccagagccaccagaggaccttcgtgctggaagtgatgggccggcactgcgggtacctggcgctggtatctgcactggcctcaggggccgactggctgttcatccccgaggctccacccgaggacggctgggagaacttcatgtgtgagaggctgggtgagactcggagccgtgggtcccgactgaacatcatcatcatcgctgagggtgccattgaccgcaacgggaagcccatctcgtccagctacgtgaaggacctggtggttcagaggctgggcttcgacacccgtgtaactgtgctgggccacgtgcagcggggagggacgccctctgccttcgaccggatcctgagcagcaagatgggcatggaggcggtgatggcgctgctggaagccacgcctgacacgccggcctgcgtggtcaccctctcggggaaccagtcagtgcggctgcccctcatggagtgcgtgcagatgaccaaggaagtgcagaaagccatggatgacaagaggtttgacgaggccacccagctccgtggtgggagcttcgagaacaactggaacatttacaagctcctcgcccaccagaagccccccaaggagaagtctaacttctccctggccatcctgaatgtgggggccccggcggctggcatgaatgcggccgtgcgctcggcggtgcggaccggcatctcccatggacacacagtatacgtggtgcacgatggcttcgaaggcctagccaagggtcaggtgcaagaagtaggctggcacgacgtggccggctggttggggcgtggtggctccatgctggggaccaagaggaccctgcccaagggccagctggagtccattgtggagaacatccgcatctatggtattcacgccctgctggtggtcggtgggtttgaggcctatgaaggggtgctgcagctggtggaggctcgcgggcgctacgaggagctctgcatcgtcatgtgtgtcatcccagccaccatcagcaacaacgtccctggcaccgacttcagcctgggctccgacactgctgtaaatgccgccatggagagctgtgaccgcatcaaacagtctgcctcggggaccaagcgccgtgtgttcatcgtggagaccatggggggttactgtggctacctggccaccgtgactggcattgctgtgggggccgacgccgcctacgtcttcgaggaccctttcaacatccacgacttaaaggtcaacgtggagcacatgacggagaagatgaagacagacattcagaggggcctggtgctgcggaacgagaagtgccatgactactacaccacggagttcctgtacaacctgtactcatcagagggcaagggcgtcttcgactgcaggaccaatgtcctgggccacctgcagcagggtggcgctccaaccccctttgaccggaactatgggaccaagctgggggtgaaggccatgctgtggttgtcggagaagctgcgcgaggtttaccgcaagggacgggtgttcgccaatgccccagactcggcctgcgtgatcggcctgaagaagaaggcggtggccttcagccccgtcactgagctcaagaaagacactgatttcgagcaccgcatgccacgggagcagtggtggctgagcctgcggctcatgctgaagatgctggcacaataccgcatcagtatggccgcctacgtgtcaggggagctggagcacgtgacccgccgcaccctgagcatggacaagggcttctgaggccagccatgcccacgcccctccccagcccccacccatgccagcgcagcgccagggctcagatggggcctgggctgttgtgtctggagcctgcaggcaggtgggggctgcgtccctgctcagcccatcccctgcctctatccctggccacctgccaggcctccctcgggctggtgtcttgagaccagcctgccaggccctccagcaggaggacagagtgccctggggcatccaccttcctgcccaggggacgtggcgctgtcggtgtttggaggctgctgccccctggctttggcgccccatgggccctcagcgtctccccatgctgggctcactacatgggccagcccttgctctacctggccggtaggctgctggcgcctaggttgtgttgagagggggatgcccctggccctgcctcactgtgacctgctcctgcccacgtgcagcacctgtcaccttttctagaaataaaatcaccctgactgtggggtgcatcggtctccggagagca

SEQ ID NO: 22347 - DNA, 1108 bp, Homo sapiens
  source 1..1108: mol_type = unassigned DNA
cgtgtttcggccgccgccatggccgcggtggacctggagaagctgcgggcgtcgggcgcgggcaaggccatcggcgtcctgaccagcggcggcgacgcgcaaggtcccctgacaagcccaccaggccccctgctgagatggctgtgaccctgggctgacccgcccagtggcacattgactccgcctggagctggggagaccagagaggccctgtggttggacggtggcctgggtgcgctgctcctgccctctccttgccctgcctcagctgctgcctgccagaggcgtggcacctcacctcacacctgctccctgctgctgagccccacgccaagctggagagcggatgagaagcatgtgtaaccagggtagaggtcgagagtcctctcgtgggggtctccatgttcaagggagctgccgaggcttgagcaggagcccccagcaggaaactggctttgccaaggcccccgctgggacagactgtttctttcactgcagtcctgggagccgagggcaaggggacaggaaagaggaagtgacctcagagcctggtggcaccagcatcatgtccaggctggggggcatgaacgctgctgtccgggctgtgacgcgcatgggcatttatgtgggtgccaaagtcttcctcatctacgagggctatgagggcctcgtggagggaggtgagaacatcaagcaggccaactggctgagcgtctccaacatcatccagctgggcggcactatcattggcagcgctcgctgcaaggcctttaccaccagggaggggcgccgggcagcggcctacaacctggtccagcacggcatcaccaacctgtgcgtcatcggcggggatggcagcctcacaggtgccaacatcttccgcagcgagtggggcagcctgctggaggagctggtggcggaaggtaagatctcagagactacagcccggacctactcgcacctgaacatcgcgggcctagtgggctccatcgataacgacttctgcggcaccgacatgaccatcggcacggactcggccctccaccgcatcatggaggtcatcgatgccatcaccacccgaggacggctgggagaacttcatgtgtga

SEQ ID NO: 22348 - DNA, 2992 bp, Homo sapiens
  source 1..2992: mol_type = unassigned DNA
atgtgtaaccagggtagaggtcgagagtcctctcgtgggggtctccatgttcaagggagctgccgaggcttgagcaggagcccccagcaggaaactggctttgccaaggcccccgctgggacagactgtttctttcactgcagtcctgggagccgagggcaaggggacaggaaagaggaagtgacctcagagcctggtggcaccagcatcatgtccaggctggggggcatgaacgctgctgtccgggctgtgacgcgcatgggcatttatgtgggtgccaaagtcttcctcatctacgagggctatgagggcctcgtggagggaggtgagaacatcaagcaggccaactggctgagcgtctccaacatcatccagctgggcggcactatcattggcagcgctcgctgcaaggcctttaccaccagggaggggcgccgggcagcggcctacaacctggtccagcacggcatcaccaacctgtgcgtcatcggcggggatggcagcctcacaggtgccaacatcttccgcagcgagtggggcagcctgctggaggagctggtggcggaaggtaagatctcagagactacagcccggacctactcgcacctgaacatcgcgggcctagtgggctccatcgataacgacttctgcggcaccgacatgaccatcggcacggactcggccctccaccgcatcatggaggtcatcgatgccatcaccaccactgcccagagccaccagaggaccttcgtgctggaagtgatgggccggcactgcgggtacctggcgctggtatctgcactggcctcaggggccgactggctgttcatccccgaggctccacccgaggacggctgggagaacttcatgtgtgagaggctgggtgagactcggagccgtgggtcccgactgaacatcatcatcatcgctgagggtgccattgaccgcaacgggaagcccatctcgtccagctacgtgaaggacctggtggttcagaggctgggcttcgacacccgtgtaactgtgctgggccacgtgcagcggggagggacgccctctgccttcgaccggatcctgagcagcaagatgggcatggaggcggtgatggcgctgctggaagccacgcctgacacgccggcctgcgtggtcaccctctcggggaaccagtcagtgcggctgcccctcatggagtgcgtgcagatgaccaaggaagtgcagaaagccatggatgacaagaggtttgacgaggccacccagctccgtggtgggagcttcgagaacaactggaacatttacaagctcctcgcccaccagaagccccccaaggagaagtctaacttctccctggccatcctgaatgtgggggccccggcggctggcatgaatgcggccgtgcgctcggcggtgcggaccggcatctcccatggacacacagtatacgtggtgcacgatggcttcgaaggcctagccaagggtcaggtgcaagaagtaggctggcacgacgtggccggctggttggggcgtggtggctccatgctggggaccaagaggaccctgcccaagggccagctggagtccattgtggagaacatccgcatctatggtattcacgccctgctggtggtcggtgggtttgaggcctatgaaggggtgctgcagctggtggaggctcgcgggcgctacgaggagctctgcatcgtcatgtgtgtcatcccagccaccatcagcaacaacgtccctggcaccgacttcagcctgggctccgacactgctgtaaatgccgccatggagagctgtgaccgcatcaaacagtctgcctcggggaccaagcgccgtgtgttcatcgtggagaccatggggggttactgtggctacctggccaccgtgactggcattgctgtgggggccgacgccgcctacgtcttcgaggaccctttcaacatccacgacttaaaggtcaacgtggagcacatgacggagaagatgaagacagacattcagaggggcctggtgctgcggaacgagaagtgccatgactactacaccacggagttcctgtacaacctgtactcatcagagggcaagggcgtcttcgactgcaggaccaatgtcctgggccacctgcagcagggtggcgctccaaccccctttgaccggaactatgggaccaagctgggggtgaaggccatgctgtggttgtcggagaagctgcgcgaggtttaccgcaagggacgggtgttcgccaatgccccagactcggcctgcgtgatcggcctgaagaagaaggcggtggccttcagccccgtcactgagctcaagaaagacactgatttcgagcaccgcatgccacgggagcagtggtggctgagcctgcggctcatgctgaagatgctggcacaataccgcatcagtatggccgcctacgtgtcaggggagctggagcacgtgacccgccgcaccctgagcatggacaagggcttctgaggccagccatgcccacgcccctccccagcccccacccatgccagcgcagcgccagggctcagatggggcctgggctgttgtgtctggagcctgcaggcaggtgggggctgcgtccctgctcagcccatcccctgcctctatccctggccacctgccaggcctccctcgggctggtgtcttgagaccagcctgccaggccctccagcaggaggacagagtgccctggggcatccaccttcctgcccaggggacgtggcgctgtcggtgtttggaggctgctgccccctggctttggcgccccatgggccctcagcgtctccccatgctgggctcactacatgggccagcccttgctctacctggccggtaggctgctggcgcctaggttgtgttgagagggggatgcccctggccctgcctcactgtgacctgctcctgcccacgtgcagcacctgtcaccttttctagaaataaaatcaccctgactgtggggtgcatcggtctccgg

SEQ ID NO: 22349 - DNA, 2815 bp, Homo sapiens
  source 1..2815: mol_type = unassigned DNA
gtttcggccgccgccatggccgcggtggacctggagaagctgcgggcgtcgggcgcgggcaaggccatcggcgtcctgaccagcggcggcgacgcgcaaggcatgaacgctgctgtccgggctgtgacgcgcatgggcatttatgtgggtgccaaagtcttcctcatctacgagggctatgagggcctcgtggagggaggtgagaacatcaagcaggccaactggctgagcgtctccaacatcatccagctgggcggcactatcattggcagcgctcgctgcaaggcctttaccaccaacctgtgcgtcatcggcggggatggcagcctcacaggtgccaacatcttccgcagcgagtggggcagcctgctggaggagctggtggcggaaggtaagatctcagagactacagcccggacctactcgcacctgaacatcgcgggcctagtgggctccatcgataacgacttctgcggcaccgacatgaccatcggcacggactcggccctccaccgcatcatggaggtcatcgatgccatcaccaccactgcccagagccaccagaggaccttcgtgctggaagtgatgggccggcactgcgggtacctggcgctggtatctgcactggcctcaggggccgactggctgttcatccccgaggctccacccgaggacggctgggagaacttcatgtgtgagaggctgggtgagactcggagccgtgggtcccgactgaacatcatcatcatcgctgagggtgccattgaccgcaacgggaagcccatctcgtccagctacgtgaaggacctggtggttcagaggctgggcttcgacacccgtgtaactgtgctgggccacgtgcagcggggagggacgccctctgccttcgaccggatcctgagcagcaagatgggcatggaggcggtgatggcgctgctggaagccacgcctgacacgccggcctgcgtggtcaccctctcggggaaccagtcagtgcggctgcccctcatggagtgcgtgcagatgaccaaggaagtgcagaaagccatggatgacaagaggtttgacgaggccacccagctccgtggtgggagcttcgagaacaactggaacatttacaagctcctcgcccaccagaagccccccaaggagaagtctaacttctccctggccatcctgaatgtgggggccccggcggctggcatgaatgcggccgtgcgctcggcggtgcggaccggcatctcccatggacacacagtatacgtggtgcacgatggcttcgaaggcctagccaagggtcaggtgcaagaagtaggctggcacgacgtggccggctggttggggcgtggtggctccatgctggggaccaagaggaccctgcccaagggccagctggagtccattgtggagaacatccgcatctatggtattcacgccctgctggtggtcggtgggtttgaggcctatgaaggggtgctgcagctggtggaggctcgcgggcgctacgaggagctctgcatcgtcatgtgtgtcatcccagccaccatcagcaacaacgtccctggcaccgacttcagcctgggctccgacactgctgtaaatgccgccatggagagctgtgaccgcatcaaacagtctgcctcggggaccaagcgccgtgtgttcatcgtggagaccatggggggttactgtggctacctggccaccgtgactggcattgctgtgggggccgacgccgcctacgtcttcgaggaccctttcaacatccacgacttaaaggtcaacgtggagcacatgacggagaagatgaagacagacattcagaggggcctggtgctgcggaacgagaagtgccatgactactacaccacggagttcctgtacaacctgtactcatcagagggcaagggcgtcttcgactgcaggaccaatgtcctgggccacctgcagcagggtggcgctccaaccccctttgaccggaactatgggaccaagctgggggtgaaggccatgctgtggttgtcggagaagctgcgcgaggtttaccgcaagggacgggtgttcgccaatgccccagactcggcctgcgtgatcggcctgaagaagaaggcggtggccttcagccccgtcactgagctcaagaaagacactgatttcgagcaccgcatgccacgggagcagtggtggctgagcctgcggctcatgctgaagatgctggcacaataccgcatcagtatggccgcctacgtgtcaggggagctggagcacgtgacccgccgcaccctgagcatggacaagggcttctgaggccagccatgcccacgcccctccccagcccccacccatgccagcgcagcgccagggctcagatggggcctgggctgttgtgtctggagcctgcaggcaggtgggggctgcgtccctgctcagcccatcccctgcctctatccctggccacctgccaggcctccctcgggctggtgtcttgagaccagcctgccaggccctccagcaggaggacagagtgccctggggcatccaccttcctgcccaggggacgtggcgctgtcggtgtttggaggctgctgccccctggctttggcgccccatgggccctcagcgtctccccatgctgggctcactacatgggccagcccttgctctacctggccggtaggctgctggcgcctaggttgtgttgagagggggatgcccctggccctgcctcactgtgacctgctcctgcccacgtgcagcacctgtcaccttttctagaaataaaatcaccctgactgtggggtgcatcggtctccgg

SEQ ID NO: 22350 - DNA, 3078 bp, Homo sapiens
  source 1..3078: mol_type = unassigned DNA
agacttggtatagtgggagagcctgactgagagtggatcatgacccatgaagagcaccatgcagccaaaaccctggggattggcaaagccattgctgtcttaacctctggtggagatgcccaaggtatgaatgctgctgtcagggctgtggttcgagttggtatcttcaccggtgcccgtgtcttctttgtccatgagggttatcaaggcctggtggatggtggagatcacatcaaggaagccacctgggagagcgtttcgatgatgcttcagctgggaggcacggtgattggaagtgcccggtgcaaggactttcgggaacgagaaggacgactccgagctgcctacaacctggtgaagcgtgggatcaccaatctctgtgtcattgggggtgatggcagcctcactggggctgacaccttccgttctgagtggagtgacttgttgagtgacctccagaaagcaggtaagatcacagatgaggaggctacgaagtccagctacctgaacattgtgggcctggttgggtcaattgacaatgacttctgtggcaccgatatgaccattggcactgactctgccctgcatcggatcatggaaattgtagatgccatcactaccactgcccagagccaccagaggacatttgtgttagaagtaatgggccgccactgtggatacctggcccttgtcacctctctgtcctgtggggccgactgggtttttattcctgaatgtccaccagatgacgactgggaggaacacctttgtcgccgactcagcgagacaaggacccgtggttctcgtctcaacatcatcattgtggctgagggtgcaattgacaagaatggaaaaccaatcacctcagaagacatcaagaatctggtggttaagcgtctgggatatgacacccgggttactgtcttggggcatgtgcagaggggtgggacgccatcagcctttgacagaattctgggcagcaggatgggtgtggaagcagtgatggcacttttggaggggaccccagataccccagcctgtgtagtgagcctctctggtaaccaggctgtgcgcctgcccctcatggaatgtgtccaggtgaccaaagatgtgaccaaggccatggatgagaagaaatttgacgaagccctgaagctgagaggccggagcttcatgaacaactgggaggtgtacaagcttctagctcatgtcagacccccggtatctaagagtggttcgcacacagtggctgtgatgaacgtgggggctccggctgcaggcatgaatgctgctgttcgctccactgtgaggattggccttatccagggcaaccgagtgctcgttgtccatgatggtttcgagggcctggccaaggggcagatagaggaagctggctggagctatgttgggggctggactggccaaggtggctctaaacttgggactaaaaggactctacccaagaagagctttgaacagatcagtgccaatataactaagtttaacattcagggccttgtcatcattgggggctttgaggcttacacagggggcctggaactgatggagggcaggaagcagtttgatgagctctgcatcccatttgtggtcattcctgctacagtctccaacaatgtccctggctcagacttcagcgttggggctgacacagcactcaatactatctgcacaacctgtgaccgcatcaagcagtcagcagctggcaccaagcgtcgggtgtttatcattgagactatgggtggctactgtggctacctggctaccatggctggactggcagctggggccgatgctgcctacatttttgaggagcccttcaccattcgagacctgcaggcaaatgttgaacatctggtgcaaaagatgaaaacaactgtgaaaaggggcttggtgttaaggaatgaaaagtgcaatgagaactataccactgacttcattttcaacctgtactctgaggaggggaagggcatcttcgacagcaggaagaatgtgcttggtcacatgcagcagggtgggagcccaaccccatttgataggaattttgccactaagatgggcgccaaggctatgaactggatgtctgggaaaatcaaagagagttaccgtaatgggcggatctttgccaatactccagattcgggctgtgttctggggatgcgtaagagggctctggtcttccaaccagtggctgagctgaaggaccagacagattttgagcatcgaatccccaaggaacagtggtggctgaaactgaggcccatcctcaaaatcctagccaagtacgagattgacttggacacttcagaccatgcccacctggagcacatcacccggaagcggtccggggaagctgccgtctaaacctctctggagtgaggggaatagattacctgatcatggtcagctcacaccctaataagtccacatcttctcagtgttttagctgtttttttcattaggtttccttttattctgtaccttgcagccatgaccagttctggccaggagctggaggagcaggcagtgggtgggagctccttttaggtagaatttaacatgacttctgccccagctttatctgtcacacaaggctgggcacctctagtgctactgctagatatcacttactcagttagaattttcctaaaaataagctttatttatttctttgtgataacaaagagtcttggttcctctactacttttactacagtgacaaattgtaactacactaataaatgccaactggtcactgtgcttttgcttctcctgttatcatcttcctaagtggaatgtaatactgtcagccccatgtatcagacacttgtctgatgaagcagtaaagacgttaagggtatcacagggggtggaggaagggattatctctagtacactacttgctggctgtctgaaaaattgtcactgccaaactctaaaaacagttctaaatagtgactgagaaggtttgttgctggagtcagggaataaggcagccaaatactctttgcacagttctttagtgggaagagaaattaacaataaatatcaagcactgtg

SEQ ID NO: 22351 - DNA, 3176 bp, Homo sapiens
  source 1..3176: mol_type = unassigned DNA
gcttccgcccagtccagcccgggccggctgaccgggtccgacacagtctcctggaccaggctccctccatcctcacccctcccccagcttcccgccgccactcaccgaaccggaaccggctgccatgcgaaggggtttccggccgggcgcggaacgcaaaacccgggaaccgccgcgaaccggaaccgccttcacagcaccggaagagtcgctaggaggcagccatgcataaagacgagtttcatctgaaatttttcatgtgtgtgattcagtctcgccagttagtcaggactcctcagagaacagctggggaagcttctacttccagcatgctcataccaaagccaccaccaaagacagacatcttgaagagtctagatactatggatgatccagacaccgtgggaagcatacctgttttcaaaactgagtggatcatgacccatgaagagcaccatgcagccaaaaccctggggattggcaaagccattgctgtcttaacctctggtggagatgcccaaggtatgaatgctgctgtcagggctgtggttcgagttggtatcttcaccggtgcccgtgtcttctttgtccatgagggttatcaaggcctggtggatggtggagatcacatcaaggaagccacctgggagagcgtttcgatgatgcttcagctgggaggcacggtgattggaagtgcccggtgcaaggactttcgggaacgagaaggacgactccgagctgcctacaacctggtgaagcgtgggatcaccaatctctgtgtcattgggggtgatggcagcctcactggggctgacaccttccgttctgagtggagtgacttgttgagtgacctccagaaagcaggtaagatcacagatgaggaggctacgaagtccagctacctgaacattgtgggcctggttgggtcaattgacaatgacttctgtggcaccgatatgaccattggcactgactctgccctgcatcggatcatggaaattgtagatgccatcactaccactgcccagagccaccagaggacatttgtgttagaagtaatgggccgccactgtggatacctggcccttgtcacctctctgtcctgtggggccgactgggtttttattcctgaatgtccaccagatgacgactgggaggaacacctttgtcgccgactcagcgagacaaggacccgtggttctcgtctcaacatcatcattgtggctgagggtgcaattgacaagaatggaaaaccaatcacctcagaagacatcaagaatctggtggttaagcgtctgggatatgacacccgggttactgtcttggggcatgtgcagaggggtgggacgccatcagcctttgacagaattctgggcagcaggatgggtgtggaagcagtgatggcacttttggaggggaccccagataccccagcctgtgtagtgagcctctctggtaaccaggctgtgcgcctgcccctcatggaatgtgtccaggtgaccaaagatgtgaccaaggccatggatgagaagaaatttgacgaagccctgaagctgagaggccggagcttcatgaacaactgggaggtgtacaagcttctagctcatgtcagacccccggtatctaagagtggttcgcacacagtggctgtgatgaacgtgggggctccggctgcaggcatgaatgctgctgttcgctccactgtgaggattggccttatccagggcaaccgagtgctcgttgtccatgatggtttcgagggcctggccaaggggcagatagaggaagctggctggagctatgttgggggctggactggccaaggtggctctaaacttgggactaaaaggactctacccaagaagagctttgaacagatcagtgccaatataactaagtttaacattcagggccttgtcatcattgggggctttgaggcttacacagggggcctggaactgatggagggcaggaagcagtttgatgagctctgcatcccatttgtggtcattcctgctacagtctccaacaatgtccctggctcagacttcagcgttggggctgacacagcactcaatactatctgcacaacctgtgaccgcatcaagcagtcagcagctggcaccaagcgtcgggtgtttatcattgagactatgggtggctactgtggctacctggctaccatggctggactggcagctggggccgatgctgcctacatttttgaggagcccttcaccattcgagacctgcaggcaaatgttgaacatctggtgcaaaagatgaaaacaactgtgaaaaggggcttggtgttaaggaatgaaaagtgcaatgagaactataccactgacttcattttcaacctgtactctgaggaggggaagggcatcttcgacagcaggaagaatgtgcttggtcacatgcagcagggtgggagcccaaccccatttgataggaattttgccactaagatgggcgccaaggctatgaactggatgtctgggaaaatcaaagagagttaccgtaatgggcggatctttgccaatactccagattcgggctgtgttctggggatgcgtaagagggctctggtcttccaaccagtggctgagctgaaggaccagacagattttgagcatcgaatccccaaggaacagtggtggctgaaactgaggcccatcctcaaaatcctagccaagtacgagattgacttggacacttcagaccatgcccacctggagcacatcacccggaagcggtccggggaagctgccgtctaaacctctctggagtgaggggaatagattacctgatcatggtcagctcacaccctaataagtccacatcttctcagtgttttagctgtttttttcattaggtttccttttattctgtaccttgcagccatgaccagttctggccaggagctggaggagcaggcagtgggtgggagctccttttaggtagaatttaacatgacttctgccccagctttatctgtcacacaaggctgggcacctctagtgctactgctagatatcacttactcagttagaattttcctaaaaataagctttatttatttctttgtgataacaaagagtcttggttcctctactacttttactacagtgacaaattgtaactacactaataaatgccaactggtcactgtg

SEQ ID NO: 22352 - DNA, 2928 bp, Homo sapiens
  source 1..2928: mol_type = unassigned DNA
aagcaggaggaggcggagccttcttgtcagcatctgttagtggaggttgggaagcctctcctccttccccctccctctttgcctccacctggctcctccccatgttcgtccatcacccctcccccctttcccaaggacaatctgcaagaaagcagcggcggaggagagctaagactaaaagagtggatcatgacccatgaagagcaccatgcagccaaaaccctggggattggcaaagccattgctgtcttaacctctggtggagatgcccaaggtatgaatgctgctgtcagggctgtggttcgagttggtatcttcaccggtgcccgtgtcttctttgtccatgagggttatcaaggcctggtggatggtggagatcacatcaaggaagccacctgggagagcgtttcgatgatgcttcagctgggaggcacggtgattggaagtgcccggtgcaaggactttcgggaacgagaaggacgactccgagctgcctacaacctggtgaagcgtgggatcaccaatctctgtgtcattgggggtgatggcagcctcactggggctgacaccttccgttctgagtggagtgacttgttgagtgacctccagaaagcaggtaagatcacagatgaggaggctacgaagtccagctacctgaacattgtgggcctggttgggtcaattgacaatgacttctgtggcaccgatatgaccattggcactgactctgccctgcatcggatcatggaaattgtagatgccatcactaccactgcccagagccaccagaggacatttgtgttagaagtaatgggccgccactgtggatacctggcccttgtcacctctctgtcctgtggggccgactgggtttttattcctgaatgtccaccagatgacgactgggaggaacacctttgtcgccgactcagcgagacaaggacccgtggttctcgtctcaacatcatcattgtggctgagggtgcaattgacaagaatggaaaaccaatcacctcagaagacatcaagaatctggtggttaagcgtctgggatatgacacccgggttactgtcttggggcatgtgcagaggggtgggacgccatcagcctttgacagaattctgggcagcaggatgggtgtggaagcagtgatggcacttttggaggggaccccagataccccagcctgtgtagtgagcctctctggtaaccaggctgtgcgcctgcccctcatggaatgtgtccaggtgaccaaagatgtgaccaaggccatggatgagaagaaatttgacgaagccctgaagctgagaggccggagcttcatgaacaactgggaggtgtacaagcttctagctcatgtcagacccccggtatctaagagtggttcgcacacagtggctgtgatgaacgtgggggctccggctgcaggcatgaatgctgctgttcgctccactgtgaggattggccttatccagggcaaccgagtgctcgttgtccatgatggtttcgagggcctggccaaggggcagatagaggaagctggctggagctatgttgggggctggactggccaaggtggctctaaacttgggactaaaaggactctacccaagaagagctttgaacagatcagtgccaatataactaagtttaacattcagggccttgtcatcattgggggctttgaggcttacacagggggcctggaactgatggagggcaggaagcagtttgatgagctctgcatcccatttgtggtcattcctgctacagtctccaacaatgtccctggctcagacttcagcgttggggctgacacagcactcaatactatctgcacaacctgtgaccgcatcaagcagtcagcagctggcaccaagcgtcgggtgtttatcattgagactatgggtggctactgtggctacctggctaccatggctggactggcagctggggccgatgctgcctacatttttgaggagcccttcaccattcgagacctgcaggcaaatgttgaacatctggtgcaaaagatgaaaacaactgtgaaaaggggcttggtgttaaggaatgaaaagtgcaatgagaactataccactgacttcattttcaacctgtactctgaggaggggaagggcatcttcgacagcaggaagaatgtgcttggtcacatgcagcagggtgggagcccaaccccatttgataggaattttgccactaagatgggcgccaaggctatgaactggatgtctgggaaaatcaaagagagttaccgtaatgggcggatctttgccaatactccagattcgggctgtgttctggggatgcgtaagagggctctggtcttccaaccagtggctgagctgaaggaccagacagattttgagcatcgaatccccaaggaacagtggtggctgaaactgaggcccatcctcaaaatcctagccaagtacgagattgacttggacacttcagaccatgcccacctggagcacatcacccggaagcggtccggggaagctgccgtctaaacctctctggagtgaggggaatagattacctgatcatggtcagctcacaccctaataagtccacatcttctcagtgttttagctgtttttttcattaggtttccttttattctgtaccttgcagccatgaccagttctggccaggagctggaggagcaggcagtgggtgggagctccttttaggtagaatttaacatgacttctgccccagctttatctgtcacacaaggctgggcacctctagtgctactgctagatatcacttactcagttagaattttcctaaaaataagctttatttatttctttgtgataacaaagagtcttggttcctctactacttttactacagtgacaaattgtaactacactaataaatgccaactggtcactgtg

SEQ ID NO: 22353 - DNA, 2683 bp, Homo sapiens
  source 1..2683: mol_type = unassigned DNA
cagcggcggaggagagctaagactaaaagagtggatcatgacccatgaagagcaccatgcagccaaaaccctggggattggcaaagccattgctgtcttaacctctggtggagatgcccaaggtatgaatgctgctgtcagggctgtggttcgagttggtatcttcaccggtgcccgtgtcttctttgtccatgagggttatcaaggcctggtggatggtggagatcacatcaaggaagccacctgggagagcgtttcgatgatgcttcagctgggaggcacggtgattggaagtgcccggtgcaaggactttcgggaacgagaaggacgactccgagctgcctacaacctggtgaagcgtgggatcaccaatctctgtgtcattgggggtgatggcagcctcactggggctgacaccttccgttctgagtggagtgacttgttgagtgacctccagaaagcaggtaagatcacagatgaggaggctacgaagtccagctacctgaacattgtgggcctggttgggtcaattgacaatgacttctgtggcaccgatatgaccattggcactgactctgccctgcatcggatcatggaaattgtagatgccatcactaccactgcccagagccaccagaggacatttgtgttagaagtaatgggccgccactgtggatacctggcccttgtcacctctctgtcctgtggggccgactgggtttttattcctgaatgtccaccagatgacgactgggaggaacacctttgtcgccgactcagcgagacaaggacccgtggttctcgtctcaacatcatcattgtggctgagggtgcaattgacaagaatggaaaaccaatcacctcagaagacatcaagaatggcagcaggatgggtgtggaagcagtgatggcacttttggaggggaccccagataccccagcctgtgtagtgagcctctctggtaaccaggctgtgcgcctgcccctcatggaatgtgtccaggtgaccaaagatgtgaccaaggccatggatgagaagaaatttgacgaagccctgaagctgagaggccggagcttcatgaacaactgggaggtgtacaagcttctagctcatgtcagacccccggtatctaagagtggttcgcacacagtggctgtgatgaacgtgggggctccggctgcaggcatgaatgctgctgttcgctccactgtgaggattggccttatccagggcaaccgagtgctcgttgtccatgatggtttcgagggcctggccaaggggcagatagaggaagctggctggagctatgttgggggctggactggccaaggtggctctaaacttgggactaaaaggactctacccaagaagagctttgaacagatcagtgccaatataactaagtttaacattcagggccttgtcatcattgggggctttgaggcttacacagggggcctggaactgatggagggcaggaagcagtttgatgagctctgcatcccatttgtggtcattcctgctacagtctccaacaatgtccctggctcagacttcagcgttggggctgacacagcactcaatactatctgcacaacctgtgaccgcatcaagcagtcagcagctggcaccaagcgtcgggtgtttatcattgagactatgggtggctactgtggctacctggctaccatggctggactggcagctggggccgatgctgcctacatttttgaggagcccttcaccattcgagacctgcaggcaaatgttgaacatctggtgcaaaagatgaaaacaactgtgaaaaggggcttggtgttaaggaatgaaaagtgcaatgagaactataccactgacttcattttcaacctgtactctgaggaggggaagggcatcttcgacagcaggaagaatgtgcttggtcacatgcagcagggtgggagcccaaccccatttgataggaattttgccactaagatgggcgccaaggctatgaactggatgtctgggaaaatcaaagagagttaccgtaatgggcggatctttgccaatactccagattcgggctgtgttctggggatgcgtaagagggctctggtcttccaaccagtggctgagctgaaggaccagacagattttgagcatcgaatccccaaggaacagtggtggctgaaactgaggcccatcctcaaaatcctagccaagtacgagattgacttggacacttcagaccatgcccacctggagcacatcacccggaagcggtccggggaagctgccgtctaaacctctctggagtgaggggaatagattacctgatcatggtcagctcacaccctaataagtccacatcttctcagtgttttagctgtttttttcattaggtttccttttattctgtaccttgcagccatgaccagttctggccaggagctggaggagcaggcagtgggtgggagctccttttaggtagaatttaacatgacttctgccccagctttatctgtcacacaaggctgggcacctctagtgctactgctagatatcacttactcagttagaattttcctaaaaataagctttatttatttctttgtgataacaaagagtcttggttcctctactacttttactacagtgacaaattgtaactacactaataaatgccaactggtcactgtg

SEQ ID NO: 22354 - DNA, 585 bp, Homo sapiens
  source 1..585: mol_type = unassigned DNA
atcttgattcctgctgtgtcttaactgaccattgtcttaaattctagagtggatcatgacccatgaagagcaccatgcagccaaaaccctggggattggcaaagccattgctgtcttaacctctggtggagatgcccaaggcatgaatgctgctgttcgctccactgtgaggattggccttatccagggcaaccgagtgctcgttgtccatgatggtttcgagggcctggccaaggggcagatagaggaagctggctggagctatgttgggggctggactggccaaggtggctctaaacttgggactaaaaggactctacccaagaagagctttgaacagatcagtgccaatataactaagtttaacattcagggccttgtcatcattgggggctttgaggcttacacagggggcctggaactgatggagggcaggaagcagtttgatgagctctgcatcccatttgtggtcattcctgctacagtctccaacaatgtccctggctcagacttcagcgttggggctgacacagcactcaatactatctgcacaacctgtgaccgcatcaagcagtcagcagctgg

SEQ ID NO: 22355 - DNA, 2867 bp, Homo sapiens
  source 1..2867: mol_type = unassigned DNA
agacttggtatagtgggagagcctgactgaggtggctctagccagtctaattgccgttcctttagctagtggcatcttgattcctgctgtgtcttaactgaccattgtcttaaattctagagtggatcatgacccatgaagagcaccatgcagccaaaaccctggggattggcaaagccattgctgtcttaacctctggtggagatgcccaaggtatgaatgctgctgtcagggctgtggttcgagttggtatcttcaccggtgcccgtgtcttctttgtccatgagggttatcaaggcctggtggatggtggagatcacatcaaggaagccacctgggagagcgtttcgatgatgcttcagctgggaggcacggtgattggaagtgcccggtgcaaggactttcgggaacgagaaggacgactccgagctgcctacaacctggtgaagcgtgggatcaccaatctctgtgtcattgggggtgatggcagcctcactggggctgacaccttccgttctgagtggagtgacttgttgagtgacctccagaaagcaggtaagatcacagatgaggaggctacgaagtccagctacctgaacattgtgggcctggttgggtcaattgacaatgacttctgtggcaccgatatgaccattggcactgactctgccctgcatcggatcatggaaattgtagatgccatcactaccactgcccagagccaccagaggacatttgtgttagaagtaatgggccgccactgtggatacctggcccttgtcacctctctgtcctgtggggccgactgggtttttattcctgaatgtccaccagatgacgactgggaggaacacctttgtcgccgactcagcgagacaaggacccgtggttctcgtctcaacatcatcattgtggctgagggtgcaattgacaagaatggaaaaccaatcacctcagaagacatcaagaatctggtggttaagcgtctgggatatgacacccgggttactgtcttggggcatgtgcagaggggtgggacgccatcagcctttgacagaattctgggcagcaggatgggtgtggaagcagtgatggcacttttggaggggaccccagataccccagcctgtgtagtgagcctctctggtaaccaggctgtgcgcctgcccctcatggaatgtgtccaggtgaccaaagatgtgaccaaggccatggatgagaagaaatttgacgaagccctgaagctgagaggccggagcttcatgaacaactgggaggtgtacaagcttctagctcatgtcagacccccggtatctaagagtggttcgcacacagtggctgtgatgaacgtgggggctccggctgcaggcatgaatgctgctgttcgctccactgtgaggattggccttatccagggcaaccgagtgctcgttgtccatgatggtttcgagggcctggccaaggggcagatagaggaagctggctggagctatgttgggggctggactggccaaggtggctctaaacttgggactaaaaggactctacccaagaagagctttgaacagatcagtgccaatataactaagtttaacattcagggccttgtcatcattgggggctttgaggcttacacagggggcctggaactgatggagggcaggaagcagtttgatgagctctgcatcccatttgtggtcattcctgctacagtctccaacaatgtccctggctcagacttcagcgttggggctgacacagcactcaatactatctgcacaacctgtgaccgcatcaagcagtcagcagctggcaccaagcgtcgggtgtttatcattgagactatgggtggctactgtggctacctggctaccatggctggactggcagctggggccgatgctgcctacatttttgaggagcccttcaccattcgagacctgcaggcaaatgttgaacatctggtgcaaaagatgaaaacaactgtgaaaaggggcttggtgttaaggaatgaaaagtgcaatgagaactataccactgacttcattttcaacctgtactctgaggaggggaagggcatcttcgacagcaggaagaatgtgcttggtcacatgcagcagggtgggagcccaaccccatttgataggaattttgccactaagatgggcgccaaggctatgaactggatgtctgggaaaatcaaagagagttaccgtaatgggcggatctttgccaatactccagattcgggctgtgttctggggatgcgtaagagggctctggtcttccaaccagtggctgagctgaaggaccagacagattttgagcatcgaatccccaaggaacagtggtggctgaaactgaggcccatcctcaaaatcctagccaagtacgagattgacttggacacttcagaccatgcccacctggagcacatcacccggaagcggtccggggaagctgccgtctaaacctctctggagtgaggggaatagattacctgatcatggtcagctcacaccctaataagtccacatcttctcagtgttttagctgtttttttcattaggtttccttttattctgtaccttgcagccatgaccagttctggccaggagctggaggagcaggcagtgggtgggagctccttttaggtagaatttaacatgacttctgccccagctttatctgtcacacaaggctgggcacctctagtgctactgctagatatcacttactcagttagaattttcctaaaaataagctttatttatttctttgtgataacaaagagtcttggttcctctactacttttactacagtgacaaattgtaactacactaataaatgccaactggtcactgtg

SEQ ID NO: 22356 - DNA, 594 bp, Homo sapiens
  source 1..594: mol_type = unassigned DNA
tttctgatggtggcactagcgatatcacatctcagggagataccacagagtaggagagttggagaaatgtttacgtgagacgcagaagtagtcaagaaatatcactcgggtctcaaggaaggcgggagatgaagccggtaccacagaaagccgagcttcccggtgaaaacagctctccccagagaagacccagctctggcgggaaagccccggaatcgcaaccggcctttccccaaagtggatcatgacccatgaagagcaccatgcagccaaaaccctggggattggcaaagccattgctgtcttaacctctggtggagatgcccaaggtatgaatgctgctgtcagggctgtggttcgagttggtatcttcaccggtgcccgtgtcttctttgtccatgagggttatcaaggcctggtggatggtggagatcacatcaaggaagccacctgggagagcgtttcgatgatgcttcagctgggaggcacggtgattggaagtgcccggtgcaaggactttcgggaacgagaaggacgactccgagctgcctacaacctggtgaagcgtgggatcaccaatctctgtgtcattgg

SEQ ID NO: 22357 - DNA, 571 bp, Homo sapiens
  source 1..571: mol_type = unassigned DNA
atttcagcttgtcagtctacaagggtgtggctttcctctggaagaagtccaaagctctcaggctgcaaagctcagacttgagtggatcatgacccatgaagagcaccatgcagccaaaaccctggggattggcaaagccattgctgtcttaacctctggtggagatgcccaaggtatgaatgctgctgtcagggctgtggttcgagttggtatcttcaccggtgcccgtgtcttctttgtccatgagggttatcaaggcctggtggatggtggagatcacatcaaggaagccacctgggagagcgtttcgatgatgcttcagctgggaggcacggtgattggaagtgcccggtgcaaggactttcgggaacgagaaggacgactccgagctgcctacaacctggtgaagcgtgggatcaccaatctctgtgtcattgggggtgatggcagcctcactggggctgacaccttccgttctgagtggagtgacttgttgagtgacctccagaaagcaggtaagatcacagatgaggaggctacgaagtccagctacctgaacattgtgggcctg

SEQ ID NO: 22358 - DNA, 762 bp, Homo sapiens
  source 1..762: mol_type = unassigned DNA
ggtagtagataaaaggctttatatgaatattacaagaatcaccaccactccaaatataataagtgtaccaaatatgaagtaaaatgactttaacaaggctgacttgaaagtgataaagaagcaagttactgctaacaagatagtggaaatactgcacaggcaccgataaacagaaatcaccaagctcaaggaaagagaaacgaggcatagatccagagatcacgttagggtacaccaagaaagagacggttcaagggaattaccaggaggcgatgagccagagtggatcatgacccatgaagagcaccatgcagccaaaaccctggggattggcaaagccattgctgtcttaacctctggtggagatgcccaaggtatgaatgctgctgtcagggctgtggttcgagttggtatcttcaccggtgcccgtgtcttctttgtccatgagggttatcaaggcctggtggatggtggagatcacatcaaggaagccacctgggagagcgtttcgatgatgcttcagctgggaggcacggtgattggaagtgcccggtgcaaggactttcgggaacgagaaggacgactccgagctgcctacaacctggtgaagcgtgggatcaccaatctctgtgtcattgggggtgatggcagcctcactggggctgacaccttccgttctgagtggagtgacttgttgagtgacctccagaaagcaggtaagatcacagatgaggaggctacgaagtccagctacctgaacat

SEQ ID NO: 22359 - DNA, 452 bp, Homo sapiens
  source 1..452: mol_type = unassigned DNA
accacagaaagccgagcttcccggtgaaaacagctctccccagagaagacccagctctggcgggaaagccccggaatcgcaaccggcctttccccaagtacggctgggcgctgggatggggcctgctgtaacggcagggagacggtctctccgcggcccaggagagagagaccagaaggaacggcctcagagtggatcatgacccatgaagagcaccatgcagccaaaaccctggggattggcaaagccattgctgtcttaacctctggtggagatgcccaaggtatgaatgctgctgtcagggctgtggttcgagttggtatcttcaccggtgcccgtgtcttctttgtccatgagggttatcaaggcctggtggatggtggagatcacatcaaggaagccacctgggagagcgtttcgatgatgcttcagctgggaggcacggtgattgg

SEQ ID NO: 22360 - DNA, 526 bp, Homo sapiens
  source 1..526: mol_type = unassigned DNA
aatctgcaagaaagcagcggcggaggagagctaagactaaaaggcaagaggggccattgagtgaagagcaagggggagagctgggagtgaggtgggaagagtggatcatgacccatgaagagcaccatgcagccaaaaccctggggattggcaaagccattgctgtcttaacctctggtggagatgcccaaggtatgaatgctgctgtcagggctgtggttcgagttggtatcttcaccggtgcccgtgtcttctttgtccatgagggttatcaaggcctggtggatggtggagatcacatcaaggaagccacctgggagagcgtttcgatgatgcttcagctgggaggcacggtgattggaagtgcccggtgcaaggactttcgggaacgagaaggacgactccgagctgcctacaacctggtgaagcgtgggatcaccaatctctgtgtcattgggggtgatggcagcctcactggggctgacaccttccgttctgagtggagtgacttgttgagtgacctcca

SEQ ID NO: 22361 - DNA, 2797 bp, Homo sapiens
  source 1..2797: mol_type = unassigned DNA
aatatctgtctgtttttgtctacgtgcgtgtcattgtgggtctgtaagggatgcttatacatgagtctgcatgaatttctgtgtcctgtgcctctataactgtcttagagatttcaggagaagaatatgagcggtttttacagagtggatcatgacccatgaagagcaccatgcagccaaaaccctggggattggcaaagccattgctgtcttaacctctggtggagatgcccaaggtatgaatgctgctgtcagggctgtggttcgagttggtatcttcaccggtgcccgtgtcttctttgtccatgagggttatcaaggcctggtggatggtggagatcacatcaaggaagccacctgggagagcgtttcgatgatgcttcagctgggaggcacggtgattggaagtgcccggtgcaaggactttcgggaacgagaaggacgactccgagctgcctacaacctggtgaagcgtgggatcaccaatctctgtgtcattgggggtgatggcagcctcactggggctgacaccttccgttctgagtggagtgacttgttgagtgacctccagaaagcaggtaagatcacagatgaggaggctacgaagtccagctacctgaacattgtgggcctggttgggtcaattgacaatgacttctgtggcaccgatatgaccattggcactgactctgccctgcatcggatcatggaaattgtagatgccatcactaccactgcccagagccaccagaggacatttgtgttagaagtaatgggccgccactgtggatacctggcccttgtcacctctctgtcctgtggggccgactgggtttttattcctgaatgtccaccagatgacgactgggaggaacacctttgtcgccgactcagcgagacaaggacccgtggttctcgtctcaacatcatcattgtggctgagggtgcaattgacaagaatggaaaaccaatcacctcagaagacatcaagaatggcagcaggatgggtgtggaagcagtgatggcacttttggaggggaccccagataccccagcctgtgtagtgagcctctctggtaaccaggctgtgcgcctgcccctcatggaatgtgtccaggtgaccaaagatgtgaccaaggccatggatgagaagaaatttgacgaagccctgaagctgagaggccggagcttcatgaacaactgggaggtgtacaagcttctagctcatgtcagacccccggtatctaagagtggttcgcacacagtggctgtgatgaacgtgggggctccggctgcaggcatgaatgctgctgttcgctccactgtgaggattggccttatccagggcaaccgagtgctcgttgtccatgatggtttcgagggcctggccaaggggcagatagaggaagctggctggagctatgttgggggctggactggccaaggtggctctaaacttgggactaaaaggactctacccaagaagagctttgaacagatcagtgccaatataactaagtttaacattcagggccttgtcatcattgggggctttgaggcttacacagggggcctggaactgatggagggcaggaagcagtttgatgagctctgcatcccatttgtggtcattcctgctacagtctccaacaatgtccctggctcagacttcagcgttggggctgacacagcactcaatactatctgcacaacctgtgaccgcatcaagcagtcagcagctggcaccaagcgtcgggtgtttatcattgagactatgggtggctactgtggctacctggctaccatggctggactggcagctggggccgatgctgcctacatttttgaggagcccttcaccattcgagacctgcaggcaaatgttgaacatctggtgcaaaagatgaaaacaactgtgaaaaggggcttggtgttaaggaatgaaaagtgcaatgagaactataccactgacttcattttcaacctgtactctgaggaggggaagggcatcttcgacagcaggaagaatgtgcttggtcacatgcagcagggtgggagcccaaccccatttgataggaattttgccactaagatgggcgccaaggctatgaactggatgtctgggaaaatcaaagagagttaccgtaatgggcggatctttgccaatactccagattcgggctgtgttctggggatgcgtaagagggctctggtcttccaaccagtggctgagctgaaggaccagacagattttgagcatcgaatccccaaggaacagtggtggctgaaactgaggcccatcctcaaaatcctagccaagtacgagattgacttggacacttcagaccatgcccacctggagcacatcacccggaagcggtccggggaagctgccgtctaaacctctctggagtgaggggaatagattacctgatcatggtcagctcacaccctaataagtccacatcttctcagtgttttagctgtttttttcattaggtttccttttattctgtaccttgcagccatgaccagttctggccaggagctggaggagcaggcagtgggtgggagctccttttaggtagaatttaacatgacttctgccccagctttatctgtcacacaaggctgggcacctctagtgctactgctagatatcacttactcagttagaattttcctaaaaataagctttatttatttctttgtgataacaaagagtcttggttcctctactacttttactacagtgacaaattgtaactacactaataaatgccaactggtcactgtg

SEQ ID NO: 22362 - DNA, 1698 bp, Homo sapiens
  source 1..1698: mol_type = unassigned DNA
gaactggatcagatttatgttttttatagatggggtcctttctgtgtgaacggattggagggtcccggggtgggagctgaggcccaggaagagggcgttgcagccggactgatgtatgggtgggaaggcggccgatgcatttctttgccatttttctccccgccgagcttgggtcctcatggagggcggatggcagacatttcactctgggatccgatgcctgtgcatctggaagacttccccaggtgcctgggtctaagaaccaccatctgcctttgagtagagtttccataaatgtaacattcgccaatggatggaagatggccgcacctctaaaatcacagggagcttttcagaagaaaatagaatagcacagcggttctcacggactaagctggcaggggacagtcccctaacatctcagctaacacctaacggtgtctgtgtccggtgaaagcggcttcagcagggacagtcacagagcagcgtggagtgagctggcttgtggggtcgtcttttccgtccccttctatggggcctgggagaagggagcggcagatggccaggcccccaaaacgggacatcgaggtcacctccaggtggctgccatggtggggttgcgggggaccacgttcacacccactccgagggcacatcctggctgctgcacacccttcacctctgcgggatgctgggaccgcatgtttgggcgcggtgggggggccttgctgcactcactcttgggggagctctgggatggtgggcgcgccccgggcctgggctggagtgactgatcgcttctctgtgaccagacctgcgaccgcatcaagcagtccgccagcggaaccaagcggcgcgtgttcatcatcgagaccatgggcggctactgtggctacctggccaacatgggggggctcgcggccggagctgatgccgcatacattttcgaagagcccttcgacatcagggatctgcagtccaacgtggagcacctgacggagaaaatgaagaccaccatccagagaggccttgtgctcagaaatgagagctgcagtgaaaactacaccaccgacttcatttaccagctgtattcagaagagggcaaaggcgtgtttgactgcaggaagaacgtgctgggtcacatgcagcagggtggggcaccctctccatttgatagaaactttggaaccaaaatctctgccagagctatggagtggatcactgcaaaactcaaggaggcccggggcagaggaaaaaaatttaccaccgatgattccatttgtgtgctgggaataagcaaaagaaacgttatttttcaacctgtggcagagctgaagaagcaaacggattttgagcacaggattcccaaagaacagtggtggctcaagctacggcccctcatgaaaatcctggccaagtacaaggccagctatgacgtgtcggactcaggccagctggaacatgtgcagccctggagtgtctgacccagtcccgcctgcatgtgcctgcagccaccgtggactgtctgtttttgtaacacttaagttattttatcagcactttatgcacgtattattgacattaatacctaatcggcgagtgcccatctgccccacctgctccagtgcgtgctgtctgtggagtgtgtctcatgctttcagatgtgcatatgagcagaattaattaaacatttgccta

SEQ ID NO: 22363 - DNA, 2769 bp, Homo sapiens
  source 1..2769: mol_type = unassigned DNA
atttaacattgaagagcggaaggtggcggagactcggcgcgccccaggccccgggtgcacgtgggggcgccggtgcccggatgatggagtgtcccgatccgtgcaatccctggcggggctgggttctcagagaaagaaaacgtgatgcagcagaggatgggattgaagaaacaggagagtgaagtggaaatagcctggcccgcgtgacttaaaccggcccggagatgtgcgggtatgaacgctgccgtccgtgccgtggtgcgcatgggtatctacgtgggggccaaggtgtacttcatctacgagggctaccagggcatggtggacggaggctcaaacatcgcagaggccgactgggagagtgtctccagcatcctgcaagtggtgctgtaaggggtgactggagggagaagcctggctgctggtcacaccgcttcccttgtcctggccggcatgctctggtgggcgggacgatcattggcagtgcgcggtgccaggccttccgcacgcgggaaggccgcctgaaggctgcttgcaacctgctgcagcgaggcatcaccaacctgtgtgtgatcggcggggacgggagcctcaccggggccaacctcttccggaaggagtggagtgggctgctggaggagctggccaggaacggccagatcgataaggaggccgtgcagaagtacgcctacctcaacgtggtgggcatggtgggctccatcgacaatgatttctgcggcaccgacatgaccatcggcacggactccgccctgcacaggatcatcgaggtcgtcgacgccatcatgaccacggcccagagccaccagaggaccttcgttctggaggtgatgggacgacactgtgggtacctggccctggtgagtgccttggcctgcggtgcggactgggtgttccttccagaatctccaccagaggaaggctgggaggagcagatgtgtgtcaaactctcggagaaccgtgcccggaaaaaaaggctgaatattattattgtggctgaaggagcaattgatacccaaaataaacccatcacctctgagaaaatcaaagagcttgtcgtcacgcagctgggctatgacacacgtgtgaccatcctcgggcacgtgcagagaggagggaccccttcggcattcgacaggatcttggccagccgcatgggagtggaggcagtcatcgccttgctagaggccaccccggacaccccagcttgcgtcgtgtcactgaacgggaaccacgccgtgcgcctgccgctgatggagtgcgtgcagatgactcaggatgtgcagaaggcgatggacgagaggagatttcaagatgcggttcgactccgagggaggagctttgcgggcaacctgaacacctacaagcgacttgccatcaagctgccggatgatcagatcccaaagaccaattgcaacgtagctgtcatcaacgtgggggcacccgcggctgggatgaacgcagccgtacgctcagctgtgcgcgtgggcattgccgacggccacaggatgctcgccatctatgatggctttgacggcttcgccaagggccagatcaaagaaatcggctggacagatgtcgggggctggaccggccaaggaggctccattcttgggacaaaacgcgttctcccggggaagtacttggaagagatcgccacacagatgcgcacgcacagcatcaacgcgctgctgatcatcggtggattcgaggcctacctgggactcctggagctgtcagccgcccgggagaagcacgaggagttctgtgtccccatggtcatggttcccgctactgtgtccaacaatgtgccgggttccgatttcagcatcggggcagacaccgccctgaacactatcaccgacacctgcgaccgcatcaagcagtccgccagcggaaccaagcggcgcgtgttcatcatcgagaccatgggcggctactgtggctacctggccaacatgggggggctcgcggccggagctgatgccgcatacattttcgaagagcccttcgacatcagggatctgcagtccaacgtggagcacctgacggagaaaatgaagaccaccatccagagaggccttgtgctcagaaatgagagctgcagtgaaaactacaccaccgacttcatttaccagctgtattcagaagagggcaaaggcgtgtttgactgcaggaagaacgtgctgggtcacatgcagcagggtggggcaccctctccatttgatagaaactttggaaccaaaatctctgccagagctatggagtggatcactgcaaaactcaaggaggcccggggcagaggaaaaaaatttaccaccgatgattccatttgtgtgctgggaataagcaaaagaaacgttatttttcaacctgtggcagagctgaagaagcaaacggattttgagcacaggattcccaaagaacagtggtggctcaagctacggcccctcatgaaaatcctggccaagtacaaggccagctatgacgtgtcggactcaggccagctggaacatgtgcagccctggagtgtctgacccagtcccgcctgcatgtgcctgcagccaccgtggactgtctgtttttgtaacacttaagttattttatcagcactttatgcacgtattattgacattaatacctaatcggcgagtgcccatctgccccacctgctccagtgcgtgctgtctgtggagtgtgtctcatgctttcagatgtgcatatgagcagaattaattaaacatttgccta

SEQ ID NO: 22364 - DNA, 2645 bp, Homo sapiens
  source 1..2645: mol_type = unassigned DNA
gagtcaggcgcgcgcgggcagggtccccattgcctgctgcgcacccggacgtgcggctcccctcggcctcctcgccatggacgcggacgactcccgggcccccaagggctccttgcggaagttcctggagcacctctccggggccggcaaggccatcggcgtgctgaccagcggcggggatgctcaaggtatgaacgctgccgtccgtgccgtggtgcgcatgggtatctacgtgggggccaaggtgtacttcatctacgagggctaccagggcatggtggacggaggctcaaacatcgcagaggccgactgggagagtgtctccagcatcctgcaagtgggcgggacgatcattggcagtgcgcggtgccaggccttccgcacgcgggaaggccgcctgaaggctgcttgcaacctgctgcagcgaggcatcaccaacctgtgtgtgatcggcggggacgggagcctcaccggggccaacctcttccggaaggagtggagtgggctgctggaggagctggccaggaacggccagatcgataaggaggccgtgcagaagtacgcctacctcaacgtggtgggcatggtgggctccatcgacaatgatttctgcggcaccgacatgaccatcggcacggactccgccctgcacaggatcatcgaggtcgtcgacgccatcatgaccacggcccagagccaccagaggaccttcgttctggaggtgatgggacgacactgtgggtacctggccctggtgagtgccttggcctgcggtgcggactgggtgttccttccagaatctccaccagaggaaggctgggaggagcagatgtgtgtcaaactctcggagaaccgtgcccggaaaaaaaggctgaatattattattgtggctgaaggagcaattgatacccaaaataaacccatcacctctgagaaaatcaaagagcttgtcgtcacgcagctgggctatgacacacgtgtgaccatcctcgggcacgtgcagagaggagggaccccttcggcattcgacaggatcttggccagccgcatgggagtggaggcagtcatcgccttgctagaggccaccccggacaccccagcttgcgtcgtgtcactgaacgggaaccacgccgtgcgcctgccgctgatggagtgcgtgcagatgactcaggatgtgcagaaggcgatggacgagaggagatttcaagatgcggttcgactccgagggaggagctttgcgggcaacctgaacacctacaagcgacttgccatcaagctgccggatgatcagatcccaaagaccaattgcaacgtagctgtcatcaacgtgggggcacccgcggctgggatgaacgcagccgtacgctcagctgtgcgcgtgggcattgccgacggccacaggatgctcgccatctatgatggctttgacggcttcgccaagggccagatcaaagaaatcggctggacagatgtcgggggctggaccggccaaggaggctccattcttgggacaaaacgcgttctcccggggaagtacttggaagagatcgccacacagatgcgcacgcacagcatcaacgcgctgctgatcatcggtggattcgaggcctacctgggactcctggagctgtcagccgcccgggagaagcacgaggagttctgtgtccccatggtcatggttcccgctactgtgtccaacaatgtgccgggttccgatttcagcatcggggcagacaccgccctgaacactatcaccgacacctgcgaccgcatcaagcagtccgccagcggaaccaagcggcgcgtgttcatcatcgagaccatgggcggctactgtggctacctggccaacatgggggggctcgcggccggagctgatgccgcatacattttcgaagagcccttcgacatcagggatctgcagtccaacgtggagcacctgacggagaaaatgaagaccaccatccagagaggccttgtgctcagaaatgagagctgcagtgaaaactacaccaccgacttcatttaccagctgtattcagaagagggcaaaggcgtgtttgactgcaggaagaacgtgctgggtcacatgcagcagggtggggcaccctctccatttgatagaaactttggaaccaaaatctctgccagagctatggagtggatcactgcaaaactcaaggaggcccggggcagaggaaaaaaatttaccaccgatgattccatttgtgtgctgggaataagcaaaagaaacgttatttttcaacctgtggcagagctgaagaagcaaacggattttgagcacaggattcccaaagaacagtggtggctcaagctacggcccctcatgaaaatcctggccaagtacaaggccagctatgacgtgtcggactcaggccagctggaacatgtgcagccctggagtgtctgacccagtcccgcctgcatgtgcctgcagccaccgtggactgtctgtttttgtaacacttaagttattttatcagcactttatgcacgtattattgacattaatacctaatcggcgagtgcccatctgccccacctgctccagtgcgtgctgtctgtggagtgtgtctcatgctttcagatgtgcatatgagcagaattaattaaacatttgccta

SEQ ID NO: 22365 - DNA, 2709 bp, Homo sapiens
  source 1..2709: mol_type = unassigned DNA
attgcctgctgcgcacccggacgtgcggctcccctcggcctcctcgccatggacgcggacgactcccgggcccccaagggctccttgcggaagttcctggagcacctctccggggccggcaaggccatcggcgtgctgaccagcggcggggatgctcaaggtatgaacgctgccgtccgtgccgtggtgcgcatgggtatctacgtgggggccaaggtgtacttcatctacgagggctaccagggcatggtggacggaggctcaaacatcgcagaggccgactgggagagtgtctccagcatcctgcaagtggtgctgtaaggggtgactggagggagaagcctggctgctggtcacaccgcttcccttgtcctggccggcatgctctggtgggcgggacgatcattggcagtgcgcggtgccaggccttccgcacgcgggaaggccgcctgaaggctgcttgcaacctgctgcagcgaggcatcaccaacctgtgtgtgatcggcggggacgggagcctcaccggggccaacctcttccggaaggagtggagtgggctgctggaggagctggccaggaacggccagatcgataaggaggccgtgcagaagtacgcctacctcaacgtggtgggcatggtgggctccatcgacaatgatttctgcggcaccgacatgaccatcggcacggactccgccctgcacaggatcatcgaggtcgtcgacgccatcatgaccacggcccagagccaccagaggaccttcgttctggaggtgatgggacgacactgtgggtacctggccctggtgagtgccttggcctgcggtgcggactgggtgttccttccagaatctccaccagaggaaggctgggaggagcagatgtgtgtcaaactctcggagaaccgtgcccggaaaaaaaggctgaatattattattgtggctgaaggagcaattgatacccaaaataaacccatcacctctgagaaaatcaaagagcttgtcgtcacgcagctgggctatgacacacgtgtgaccatcctcgggcacgtgcagagaggagggaccccttcggcattcgacaggatcttggccagccgcatgggagtggaggcagtcatcgccttgctagaggccaccccggacaccccagcttgcgtcgtgtcactgaacgggaaccacgccgtgcgcctgccgctgatggagtgcgtgcagatgactcaggatgtgcagaaggcgatggacgagaggagatttcaagatgcggttcgactccgagggaggagctttgcgggcaacctgaacacctacaagcgacttgccatcaagctgccggatgatcagatcccaaagaccaattgcaacgtagctgtcatcaacgtgggggcacccgcggctgggatgaacgcagccgtacgctcagctgtgcgcgtgggcattgccgacggccacaggatgctcgccatctatgatggctttgacggcttcgccaagggccagatcaaagaaatcggctggacagatgtcgggggctggaccggccaaggaggctccattcttgggacaaaacgcgttctcccggggaagtacttggaagagatcgccacacagatgcgcacgcacagcatcaacgcgctgctgatcatcggtggattcgaggcctacctgggactcctggagctgtcagccgcccgggagaagcacgaggagttctgtgtccccatggtcatggttcccgctactgtgtccaacaatgtgccgggttccgatttcagcatcggggcagacaccgccctgaacactatcaccgacacctgcgaccgcatcaagcagtccgccagcggaaccaagcggcgcgtgttcatcatcgagaccatgggcggctactgtggctacctggccaacatgggggggctcgcggccggagctgatgccgcatacattttcgaagagcccttcgacatcagggatctgcagtccaacgtggagcacctgacggagaaaatgaagaccaccatccagagaggccttgtgctcagaaatgagagctgcagtgaaaactacaccaccgacttcatttaccagctgtattcagaagagggcaaaggcgtgtttgactgcaggaagaacgtgctgggtcacatgcagcagggtggggcaccctctccatttgatagaaactttggaaccaaaatctctgccagagctatggagtggatcactgcaaaactcaaggaggcccggggcagaggaaaaaaatttaccaccgatgattccatttgtgtgctgggaataagcaaaagaaacgttatttttcaacctgtggcagagctgaagaagcaaacggattttgagcacaggattcccaaagaacagtggtggctcaagctacggcccctcatgaaaatcctggccaagtacaaggccagctatgacgtgtcggactcaggccagctggaacatgtgcagccctggagtgtctgacccagtcccgcctgcatgtgcctgcagccaccgtggactgtctgtttttgtaacacttaagttattttatcagcactttatgcacgtattattgacattaatacctaatcggcgagtgcccatctgccccacctgctccagtgcgtgctgtctgtggagtgtgtctcatgctttcagatgtgcatatgagcagaattaattaaacatttgcctatgactccaacag

SEQ ID NO: 22366 - DNA, 705 bp, Homo sapiens
  source 1..705: mol_type = unassigned DNA
ttaaggaagttcacctccagatgtactcagagggcctggtcttagctgccacagatttacaaacccttacagtatgaacgctgccgtccgtgccgtggtgcgcatgggtatctacgtgggggccaaggtgtacttcatctacgagggctaccagggcatggtggacggaggctcaaacatcgcagaggccgactgggagagtgtctccagcatcctgcaagtgggcgggacgatcattggcagtgcgcggtgccaggccttccgcacgcgggaaggccgcctgaaggctgcttgcaacctgctgcagcgaggcatcaccaacctgtgtgtgatcggcggggacgggagcctcaccggggccaacctcttccggaaggagtggagtgggctgctggaggagctggccaggaacggccagatcgataaggaggccgtgcagaagtacgcctacctcaacgtggtgggcatggtgggctccatcgacaatgatttctgcggcaccgacatgaccatcggcacggactccgccctgcacaggatcatcgaggtcgtcgacgccatcatgaccacggcccagagccaccagaggaccttcgttctggaggtgatgggacgacactgtgggtacctggccctggtgagtgccttggcctgcggtgcggactgggtgttccttccagaatctccaccagaggaaggctggga

SEQ ID NO: 22367 - DNA, 496 bp, Homo sapiens
  source 1..496: mol_type = unassigned DNA
tgccgacggccacaggatgctcgccatctatgatggctttgacggcttcgccaagggccagatcaaagaaatcggctggacagatgtcgggggctggaccggccaaggaggctccattcttgggacaaaacgcgttctcccggggaagtacttggaagagatcgccacacagatgcgcacgcacagcatcaacgcgctgctgatcatcggtggattcgaggcttacaagagtgcgtgcgacatggccgaggcacgaggccgccaccaggagctttgcatccccctgtgtgtggtgccggccacgattagcaacaatgtcccaggcacagaaataagcctgggctccgacactggcctgaatgctgttgttgagacctgcgaccgcatcaagcagtccgccagcggaaccaagcggcgcgtgttcatcatcgagaccatgggcggctactgtggctacctggccaacatgggggggctcgcggccggagctgatgcc

SEQ ID NO: 22368 - DNA, 1140 bp, Homo sapiens
  source 1..1140: mol_type = unassigned DNA
gtttccgtgggagagatccagccgtggctgtcgacagcagctgccgactgtgcccaatagagaaggtatctgggaaagagcccagcacggggccggggagtgtgagtgtgtcctggcacaggcaggcagaaggtgtccaacgtgcaactggagagcgcagaggtggctcaagtccccttcctcgcaggagtctggaaggctactgcatagcgtttgccttagtagaaaatggaccatttttgaagcctaggtccctgcaggcctcctggctaactcggctgtcaaagccccttttctctgctttctgagctgtttccaggactgagtgggtgctccctctgtttctctgctttctgagctgtgtccggggctccctctgtttctcttccagccaccagaggaccttcgttctggaggtgatgggacgacactgtgggtacctggccctggtgagtgccttggcctgcggtgcggactgggtgttccttccagaatctccaccagaggaaggctgggaggagcagatgtgtgtcaaactctcggagaaccgtgcccggaaaaaaaggctgaatattattattgtggctgaaggagcaattgatacccaaaataaacccatcacctctgagaaaatcaaagagcttgtcgtcacgcagctgggctatgacacacgtgtgaccatcctcgggcacgtgcagagaggagggaccccttcggcattcgacaggatcttggccagccgcatgggagtggaggcagtcatcgccttgctagaggccaccccggacaccccagcttgcgtcgtgtcactgaacgggaaccacgccgtgcgcctgccgctgatggagtgcgtgcagatgactcaggatgtgcagaaggcgatggacgagaggagatttcaagatgcggttcgactccgagggaggagctttgcgggcaacctgaacacctacaagcgacttgccatcaagctgccggatgatcagatcccaaagaccaattgcaacgtagctgtcatcaacgtgggggcacccgcggctgggatgaacgcagccgtacgctcagctgtgcgcgtgggcattgccgacggccacaggatgctcgccatctatgatggctttgacggcttcgccaagggcc

SEQ ID NO: 22369 - DNA, 658 bp, Homo sapiens
  source 1..658: mol_type = unassigned DNA
attccagtaaaaggaccccagcatcaacgttcttcctgcagggctgggttctcagagaaagaaaacgtgatgcagcagaggatgggattgaagaaacaggagagtgaagtggaaatagcctggcccgcgtgacttaaaccggcccggagatgtgcgggtatgaacgctgccgtccgtgccgtggtgcgcatgggtatctacgtgggggccaaggtgtacttcatctacgagggctaccagggcatggtggacggaggctcaaacatcgcagaggccgactgggagagtgtctccagcatcctgcaagtgggcgggacgatcattggcagtgcgcggtgccaggccttccgcacgcgggaaggccgcctgaaggctgcttgcaacctgctgcagcgaggcatcaccaacctgtgtgtgatcggcggggacgggagcctcaccggggccaacctcttccggaaggagtggagtgggctgctggaggagctggccaggaacggccagatcgataaggaggccgtgcagaagtacgcctacctcaacgtggtgggcatggtgggctccatcgacaatgatttctgcggcaccgacatgaccatcggcacggactccgccctgcacaggatcatcgaggtcgtcgacgccatcatgaccacgg

SEQ ID NO: 22370 - DNA, 453 bp, Homo sapiens
  source 1..453: mol_type = unassigned DNA
acttcatttaccagctgtattcagaagagggcaaaggcgtgtttgactgcaggaagaacgtgctgggtcacatgcagcagggtggggcaccctctccatttgatagaaactttggaaccaaaatctctgccagagctatggagtggatcactgcaaaactcaaggaggcccggggcagaggaaaaaaatttaccaccgatgattccatttgtgtgctgggaataagcaaaagaaacgttatttttcaacctgtggcagagctgaagaagcaaacggattttgagacggtttccatgcagccgccgcggtgaactcccgtctggtggacactcccccagggcctcggtgtgatggagtttcctgaatcagcgcaggcagacgtgggacacccttgtgcaccttttcattttacttctgtttttaaataaaggccctaaatgctgcttaaaataa

SEQ ID NO: 22371 - DNA, 2657 bp, Homo sapiens
  source 1..2657: mol_type = unassigned DNA
tgtttacagctgaagttggctgcatgcagcactccttggagctatctctaccctaacggggaaatgagacaaaaataattgaagggtatttggcttggttaagtgggcagaagtgtcctcatcaaaacaactttgaagacctgctttgtgtgtgggtgcgagtgggtgtgtggcccttaacttgttcacaagggacaacaacaacaaggaattaaccaagctttctcattgagagtgatcgtccatgcaaaccctctattttagttactcatacgacactgttgcagcttcaggttggacagacctattttggagtcccttgactgctttctggacaccctcactgagccagtcggtggaagtgaaggatgagtgattttgaagaatggatttctgggacatatagaaaaatggaagaaggtcctctccctctgttgacttttgctacagctccctaccacgatcagaaaccaggaacaagtggattacggaagaaaacctattattttgaggaaaagccatgctatctggagaatttcatccagagtatattcttttccatagacctaaaagatcgccagggatcatcactggtggttggtggagatgggcggtactttaataaatcagcaatagaaacaatagtgcagatggcagctgccaatgggatcggtcgcttggttatcggacagaatggaatcctctccacccctgctgtatcctgcatcattagaaaaatcaaagccattggtgggatcattctgacagccagtcacaacccagggggccccaatggagattttggaatcaaattcaatatttctaatggaggtcctgctccagaagcaataactgataaaattttccaaatcagcaagacaattgaagaatatgcagtttgccctgacctgaaagtagaccttggtgttctgggaaagcagcagtttgacttggaaaataagttcaaacccttcacagtggaaattgtggattcggtagaagcttatgctacaatgctgagaagcatctttgatttcagtgcactgaaagaactactttctgggccaaaccgactgaagatccgtattgatgctatgcatggagttgtgggaccgtatgtaaagaagatcctctgtgaagaactcggtgcccctgcgaactcggcagttaactgcgttcctctggaggactttggaggccaccaccctgaccccaacctcacctatgcagctgacctggtggagaccatgaagtcaggagagcatgattttggggctgcctttgatggagatggggatcgaaacatgattctgggcaagcatgggttctttgtgaacccttcagactctgtggctgtcattgctgccaacatcttcagcattccgtatttccagcagactggggtccgcggctttgcacggagcatgcccacgagtggtgctctggaccgggtggctagtgctacaaagattgctttgtatgagaccccaactggctggaagttttttgggaatttgatggacgcgagcaaactgtccctttgtggggaggagagcttcgggaccggttctgaccacatccgtgagaaagatggactgtgggctgtccttgcctggctctccatcctagccacccgcaagcagagtgtggaggacattctcaaagatcattggcaaaagtatggccggaatttcttcaccaggtatgattacgaggaggtggaagctgagggcgcaaacaaaatgatgaaggacttggaggccctgatgtttgatcgctcctttgtggggaagcagttctcagcaaatgacaaagtttacactgtggagaaggccgataactttgaatacagcgacccagtggatggaagcatttcaagaaatcagggcttgcgcctcattttcacagatggttctcgaatcgtcttccgactgagcggcactgggagtgccggggccaccattcggctgtacatcgatagctatgagaaggacgttgccaagattaaccaggacccccaggtcatgttggccccccttatttccattgctctgaaagtgtcccagctgcaggagaggacgggacgcactgcacccactgtcatcacctaagaagacaggcctgatgtggtacgtccctccacccccggacccatccaagtcatctgattgaagagcatgacagaaacaaaatgtattcaccaagcattttaggatttgactttttcactaaccagttgacgagcagtgcatttacaaggcactgccaaacaagatgcccttgggagctgtgagggaaagaggacctgcgggcttagatcaatctcaattccttttcatgccctcctgcattgctgctgcgtgggtatttgtctccttagccatcaggtacagtttacactacaatgtaagctataggtggagcatcagcagtgagtgaggccattcttcatccttaggatgtggcaatgaaatgatggtgcaagttcctttctcttttgtgaatctttccccccatttcctgtttacatgtaacccaacaaaatgcaatttctagtgccttctgtccaatcagttctttcctctgagtgagacgtacttggctacagatttctgccttgttttgcgacattgtcccattcacacagatattttggg

SEQ ID NO: 22372 - DNA, 2472 bp, Homo sapiens
  source 1..2472: mol_type = unassigned DNA
cctttcccctcccgccggacctgccaggaggtgggctggcgcggagggagggccctgtcccctgtccctttaaggaggagggccaaacgccggcctagagtgcggcgtagcccccacccgccgtgccctcaccccagagcagctgcagcctcagccggccgcccctccgccagccaagtccgccgctctgacccccggcagcaagtcgccaccatggtgaagatcgtgacagttaagacccaggcgtaccaggaccagaagccgggcacgagcgggctgcggaagcgggtgaaggtgttccagagcagcgccaactacgcggagaacttcatccagagtatcatctccaccgtggagccggcgcagcggcaggaggccacgctggtggtgggcggggacggccggttctacatgaaggaggccatccagctcatcgctcgcatcgctgccgccaacgggatcggtcgcttggttatcggacagaatggaatcctctccacccctgctgtatcctgcatcattagaaaaatcaaagccattggtgggatcattctgacagccagtcacaacccagggggccccaatggagattttggaatcaaattcaatatttctaatggaggtcctgctccagaagcaataactgataaaattttccaaatcagcaagacaattgaagaatatgcagtttgccctgacctgaaagtagaccttggtgttctgggaaagcagcagtttgacttggaaaataagttcaaacccttcacagtggaaattgtggattcggtagaagcttatgctacaatgctgagaagcatctttgatttcagtgcactgaaagaactactttctgggccaaaccgactgaagatccgtattgatgctatgcatggagttgtgggaccgtatgtaaagaagatcctctgtgaagaactcggtgcccctgcgaactcggcagttaactgcgttcctctggaggactttggaggccaccaccctgaccccaacctcacctatgcagctgacctggtggagaccatgaagtcaggagagcatgattttggggctgcctttgatggagatggggatcgaaacatgattctgggcaagcatgggttctttgtgaacccttcagactctgtggctgtcattgctgccaacatcttcagcattccgtatttccagcagactggggtccgcggctttgcacggagcatgcccacgagtggtgctctggaccgggtggctagtgctacaaagattgctttgtatgagaccccaactggctggaagttttttgggaatttgatggacgcgagcaaactgtccctttgtggggaggagagcttcgggaccggttctgaccacatccgtgagaaagatggactgtgggctgtccttgcctggctctccatcctagccacccgcaagcagagtgtggaggacattctcaaagatcattggcaaaagtatggccggaatttcttcaccaggtatgattacgaggaggtggaagctgagggcgcaaacaaaatgatgaaggacttggaggccctgatgtttgatcgctcctttgtggggaagcagttctcagcaaatgacaaagtttacactgtggagaaggccgataactttgaatacagcgacccagtggatggaagcatttcaagaaatcagggcttgcgcctcattttcacagatggttctcgaatcgtcttccgactgagcggcactgggagtgccggggccaccattcggctgtacatcgatagctatgagaaggacgttgccaagattaaccaggacccccaggtcatgttggccccccttatttccattgctctgaaagtgtcccagctgcaggagaggacgggacgcactgcacccactgtcatcacctaagaagacaggcctgatgtggtacgtccctccacccccggacccatccaagtcatctgattgaagagcatgacagaaacaaaatgtattcaccaagcattttaggatttgactttttcactaaccagttgacgagcagtgcatttacaaggcactgccaaacaagatgcccttgggagctgtgagggaaagaggacctgcgggcttagatcaatctcaattccttttcatgccctcctgcattgctgctgcgtgggtatttgtctccttagccatcaggtacagtttacactacaatgtaagctataggtggagcatcagcagtgagtgaggccattcttcatccttaggatgtggcaatgaaatgatggtgcaagttcctttctcttttgtgaatctttccccccatttcctgtttacatgtaacccaacaaaatgcaatttctagtgccttctgtccaatcagttctttcctctgagtgagacgtacttggctacagatttctgccttgttttgcgacattgtcccattcacacagatattttgggataataaaggaaaataagctacaa

SEQ ID NO: 22373 - DNA, 2234 bp, Homo sapiens
  source 1..2234: mol_type = unassigned DNA
atttcacaggaggcctagagaccggcgctcccctttcccctcccgccggacctgccaggaggtgggctggcgcggagggagggccctgtcccctgtccctttaaggaggagggccaaacgccggcctagagtgcggcgtagcccccacccgccgtgccctcaccccagagcagctgcagcctcagccggccgcccctccgccagccaagtccgccgctctgacccccggcagcaagtcgccaccatggtgaaggtgttccagagcagcgccaactacgcggagaacttcatccagagtatcatctccaccgtggagccggcgcagcggcaggaggccacgctggtggtgggcggggacggccggttctacatgaaggaggccatccagctcatcgctcgcatcgctgccgccaacgggatcggtcgcttggttatcggacagaatggaatcctctccacccctgctgtatcctgcatcattagaaaaatcaaagccattggtgggatcattctgacagccagtcacaacccagggggccccaatggagattttggaatcaaattcaatatttctaatggaggtcctgctccagaagcaataactgataaaattttccaaatcagcaagacaattgaagaatatgcagtttgccctgacctgaaagtagaccttggtgttctgggaaagcagcagtttgacttggaaaataagttcaaacccttcacagtggaaattgtggattcggtagaagcttatgctacaatgctgagaagcatctttgatttcagtgcactgaaagaactactttctgggccaaaccgactgaagatccgtattgatgctatgcatggagttgtgggaccgtatgtaaagaagatcctctgtgaagaactcggtgcccctgcgaactcggcagttaactgcgttcctctggaggactttggaggccaccaccctgaccccaacctcacctatgcagctgacctggtggagaccatgaagtcaggagagcatgattttggggctgcctttgatggagatggggatcgaaacatgattctgggcaagcatgggttctttgtgaacccttcagactctgtggctgtcattgctgccaacatcttcagcattccgtatttccagcagactggggtccgcggctttgcacggagcatgcccacgagtggtgctctggaccgggtggctagtgctacaaagattgctttgtatgagaccccaactggctggaagttttttgggaatttgatggacgcgagcaaactgtccctttgtggggaggagagcttcgggaccggttctgaccacatccgtgagaaagatggactgtgggctgtccttgcctggctctccatcctagccacccgcaagcagagtgtggaggacattctcaaagatcattggcaaaagtatggccggaatttcttcaccaggtatgattacgaggaggtggaagctgagggcgcaaacaaaatgatgaaggacttggaggccctgatgtttgatcgctcctttgtggggaagcagttctcagcaaatgacaaagtttacactgtggagaaggccgataactttgaatacagcgacccagtggatggaagcatttcaagaaatcagggcttgcgcctcattttcacagatggttctcgaatcgtcttccgactgagcggcactgggagtgccggggccaccattcggctgtacatcgatagctatgagaaggacgttgccaagattaaccaggacccccaggtcatgttggccccccttatttccattgctctgaaagtgtcccagctgcaggagaggacgggacgcactgcacccactgtcatcacctaagaagacaggcctgatgtggtacgtccctccacccccggacccatccaagtcatctgattgaagagcatgacagaaacaaaatgtattcaccaagcattttaggatttgactttttcactaaccagttgacgagcagtgcatttacaaggcactgccaaacaagatgcccttgggagctgtgagggaaagaggacctgcgggcttagatcaatctcaattccttttcatgccctcctgcattgctgctgcgtgggtatttgtctccttagccatcaggtacagtttacactacaatgtaagctataggtggagcatcagcagtgagtgaggccattcttcatccttaggatgtggcaatgaaatgatggtgcaa

SEQ ID NO: 22374 - DNA, 2345 bp, Homo sapiens
  source 1..2345: mol_type = unassigned DNA
gctcggggccggccgcttccgcgcgctgccgcctcggtttccacctcccgctcctccctctccttcgcgctcgctcttctggcctggaggcccgacggaggtcgccgggctggggaaagtggccacgggacccggcagacctgctcgcctgactcccggggcgccgggaggtgcgggcgcggagcctcccaaggtcacgcccgactctccgtctctagccgctgccttccctctccccgtcccccgcccctcccgaggcgtctgacatttgccctaaccttgcagccttggaagatacgattacggcgcagagtgctgtcgccttaagcaggaaagatcggtcgcttggttatcggacagaatggaatcctctccacccctgctgtatcctgcatcattagaaaaatcaaagccattggtgggatcattctgacagccagtcacaacccagggggccccaatggagattttggaatcaaattcaatatttctaatggaggtcctgctccagaagcaataactgataaaattttccaaatcagcaagacaattgaagaatatgcagtttgccctgacctgaaagtagaccttggtgttctgggaaagcagcagtttgacttggaaaataagttcaaacccttcacagtggaaattgtggattcggtagaagcttatgctacaatgctgagaagcatctttgatttcagtgcactgaaagaactactttctgggccaaaccgactgaagatccgtattgatgctatgcatggagttgtgggaccgtatgtaaagaagatcctctgtgaagaactcggtgcccctgcgaactcggcagttaactgcgttcctctggaggactttggaggccaccaccctgaccccaacctcacctatgcagctgacctggtggagaccatgaagtcaggagagcatgattttggggctgcctttgatggagatggggatcgaaacatgattctgggcaagcatgggttctttgtgaacccttcagactctgtggctgtcattgctgccaacatcttcagcattccgtatttccagcagactggggtccgcggctttgcacggagcatgcccacgagtggtgctctggaccgggtggctagtgctacaaagattgctttgtatgagaccccaactggctggaagttttttgggaatttgatggacgcgagcaaactgtccctttgtggggaggagagcttcgggaccggttctgaccacatccgtgagaaagatggactgtgggctgtccttgcctggctctccatcctagccacccgcaagcagagtgtggaggacattctcaaagatcattggcaaaagtatggccggaatttcttcaccaggtatgattacgaggaggtggaagctgagggcgcaaacaaaatgatgaaggacttggaggccctgatgtttgatcgctcctttgtggggaagcagttctcagcaaatgacaaagtttacactgtggagaaggccgataactttgaatacagcgacccagtggatggaagcatttcaagaaatcagggcttgcgcctcattttcacagatggttctcgaatcgtcttccgactgagcggcactgggagtgccggggccaccattcggctgtacatcgatagctatgagaaggacgttgccaagattaaccaggacccccaggtcatgttggccccccttatttccattgctctgaaagtgtcccagctgcaggagaggacgggacgcactgcacccactgtcatcacctaagaagacaggcctgatgtggtacgtccctccacccccggacccatccaagtcatctgattgaagagcatgacagaaacaaaatgtattcaccaagcattttaggatttgactttttcactaaccagttgacgagcagtgcatttacaaggcactgccaaacaagatgcccttgggagctgtgagggaaagaggacctgcgggcttagatcaatctcaattccttttcatgccctcctgcattgctgctgcgtgggtatttgtctccttagccatcaggtacagtttacactacaatgtaagctataggtggagcatcagcagtgagtgaggccattcttcatccttaggatgtggcaatgaaatgatggtgcaagttcctttctcttttgtgaatctttccccccatttcctgtttacatgtaacccaacaaaatgcaatttctagtgccttctgtccaatcagttctttcctctgagtgagacgtacttggctacagatttctgccttgttttgcgacattgtcccattcacacagatattttgggataataaaggaaaataagct

SEQ ID NO: 22375 - DNA, 3264 bp, Homo sapiens
  source 1..3264: mol_type = unassigned DNA
ggctctccccgcccccgcctccgcctccacgtcttggggccgggccggaaggcagatctcaccgcctgcttccctctgcagcggtagcacaagctcagcgatggcggctccagaaggcagcggtctaggcgaggacgcccggctggaccaggagaccgcccagtggctgcgctgggacaagaattccttaactttggaggcagtgaaacgactaatagcagaaggtaataaagaagaactacgaaaatgttttggggcccgaatggagtttgggacagctggcctccgagctgctatgggacctggaatttctcgtatgaatgacttgaccatcatccagactacacagggattttgcagatacctggaaaaacaattcagtgacttaaagcagaaaggcatcgtgatcagttttgacgcccgagctcatccatccagtgggggtagcagcagaaggtttgcccgacttgctgcaaccacatttatcagtcaggggattcctgtgtacctcttttctgatataacgccaaccccctttgtgcccttcacagtatcacatttgaaactttgtgctggaatcatgataactgcatctcacaatccaaagcaggataatggttataaggtctattgggataatggagctcagatcatttctcctcacgataaagggatttctcaagctattgaagaaaatctagaaccgtggcctcaagcttgggacgattctttaattgatagcagtccacttctccacaatccgagtgcttccatcaataatgactactttgaagaccttaaaaagtactgtttccacaggagcgtgaacagggagacaaaggtgaagtttgtgcacacctctgtccatggggtgggtcatagctttgtgcagtcagctttcaaggcttttgaccttgttcctcctgaggctgttcctgaacagaaagatccggatcctgagtttccaacagtgaaatacccgaatcccgaagaggggaaaggtgtcttgactttgtcttttgctttggctgacaaaaccaaggccagaattgttttagctaacgacccggatgctgatagacttgctgtggcagaaaagcaagacagtggtgaatggagggtgttttcaggcaatgagttgggggccctcctgggctggtggctttttacatcttggaaagagaagaaccaggatcgcagtgctctcaaagacacgtacatgttgtccagcaccgtctcctccaaaatcttgcgggccattgccttaaaggaaggttttcattttgaggaaacattaactggctttaagtggatgggaaacagagccaaacagctaatagaccaggggaaaactgttttatttgcatttgaagaagctattggatacatgtgctgcccttttgttctggacaaagatggagtcagtgccgctgtcataagtgcagagttggctagcttcctagcaaccaagaatttgtctttgtctcagcaactaaaggccatttatgtggagtatggctaccatattactaaagcttcctattttatctgccatgatcaagaaaccattaagaaattatttgaaaacctcagaaactacgatggaaaaaataattatccaaaagcttgtggcaaatttgaaatttctgccattagggaccttacaactggctatgatgatagccaacctgataaaaaagctgttcttcccactagtaaaagcagccaaatgatcaccttcacctttgctaatggaggcgtggccaccatgcgcaccagtgggacagagcccaaaatcaagtactatgcagagctgtgtgccccacctgggaacagtgatcctgagcagctgaagaaggaactgaatgaactggtcagtgctattgaagaacattttttccagccacagaagtacaatctgcagccaaaagcagactaaaatagtccagccttgggtatacttgcatttacctacaattaagctgggtttaacttgttaagcaatatttttaagggccaaatgattcaaaacatcacaggtatttatgtgttttacaaagacctacattcctcattgtttcatgtttgacctttaaggtgaaaaaagaaaatggccaaacccaacaaactaacattcctactaaaaagttgagcttggacatattttgaatttttgtaagtgaagatttttaaactgactaacttaaaaaaatagattgtaattgatgtgccttaatttgcataaatcataaatgtatgtcctctctgtaattgttttaatgtgtgcttgaaatatccagaaaacctatggagttagtaaattctgggctgtcatatgtaggatagccactttttaggtatatgtacatttatatttctatcaattccttagaaagtaaaataaatgaatagatcaaatgttgtgttcatgtttggggaaaatataatttgcagaaacctatgaagtagagcaaagatgctttaaaaagataagtttttttgaactaaattttttttagttctaataatgcacataggatattagtacatcgtacacgtgctaggaaaaaacagcttcagtgtctttgtttaatgtgttgaaactcatctttttaaatcttgaaaaaccaattgtttacttgaaacttgaaagtagcatatttttctgttttttggttgtttgttcatttgtattagcacaatttaatgtaattcctggtttggaggcagcaagacctatgagcaagaactatttacttgaccctcgtttttttctcttgttcttgtgtggtctgaaatctaaaactagactttattatgatagatttcctataagccaatttctaataacaaatagatttattatttaatctgtaccttctatcttctcataattcgtggtcttacagccttccaaaataactccagttgggcacccatgagctaggatcaaactttctttatatactttatatattttacattatttctgatttttaaagcaaatgattgccattatgattacactcaacctaaatagttatgaacagtttcagaacaatgaaaaattacaatactatgtgatagtattgtaactatttttctattttagtcatatgtcgcttatatcctaccagaactcttaaatctataatattcgatatattctacaaactgctttattgtagaagccatatttatgtttattttataatgttttctagtgtcaaactgtactgtggagaaaagaaatgttagatctgt

SEQ ID NO: 22376 - DNA, 2050 bp, Homo sapiens
  source 1..2050: mol_type = unassigned DNA
acaagctcagcgatggcggctccagaaggcagcggtctaggcgaggacgcccggctggaccaggagaccgcccagtggctgcgctgggacaagaattccttaactttggaggcagtgaaacgactaatagcagaaggtaataaagaagaactacgaaaatgttttggggcccgaatggagtttgggacagctggcctccgagctgctatgggacctggaatttctcgtatgaatgacttgaccatcatccagactacacagtatcacatttgaaactttgtgctggaatcatgataactgcatctcacaatccaaagcaggataatggttataaggtctattgggataatggagctcagatcatttctcctcacgataaagggatttctcaagctattgaagaaaatctagaaccgtggcctcaagcttgggacgattctttaattgatagcagtccacttctccacaatccgagtgcttccatcaataatgactactttgaagaccttaaaaagtactgtttccacaggagcgtgaacagggagacaaaggtgaagtttgtgcacacctctgtccatggggtgggtcatagctttgtgcagtcagctttcaaggcttttgaccttgttcctcctgaggctgttcctgaacagaaagatccggatcctgagtttccaacagtgaaatacccgaatcccgaagaggggaaaggtgtcttgactttgtcttttgctttggctgacaaaaccaaggccagaattgttttagctaacgacccggatgctgatagacttgctgtggcagaaaagcaagacagtggtgaatggagggtgttttcaggcaatgagttgggggccctcctgggctggtggctttttacatcttggaaagagaagaaccaggatcgcagtgctctcaaagacacgtacatgttgtccagcaccgtctcctccaaaatcttgcgggccattgccttaaaggaaggttttcattttgaggaaacattaactggctttaagtggatgggaaacagagccaaacagctaatagaccaggggaaaactgttttatttgcatttgaagaagctattggatacatgtgctgcccttttgttctggacaaagatggagtcagtgccgctgtcataagtgcagagttggctagcttcctagcaaccaagaatttgtctttgtctcagcaactaaaggccatttatgtggagtatggctaccatattactaaagcttcctattttatctgccatgatcaagaaaccattaagaaattatttgaaaacctcagaaactacgatggaaaaaataattatccaaaagcttgtggcaaatttgaaatttctgccattagggaccttacaactggctatgatgatagccaacctgataaaaaagctgttcttcccactagtaaaagcagccaaatgatcaccttcacctttgctaatggaggcgtggccaccatgcgcaccagtgggacagagcccaaaatcaagtactatgcagagctgtgtgccccacctgggaacagtgatcctgagcagctgaagaaggaactgaatgaactggtcagtgctattgaagaacattttttccagccacagaagtacaatctgcagccaaaagcagactaaaatagtccagccttgggtatacttgcatttacctacaattaagctgggtttaacttgttaagcaatatttttaagggccaaatgattcaaaacatcacaggtatttatgtgttttacaaagacctacattcctcattgtttcatgtttgacctttaaggtgaaaaaagaaaatggccaaacccaacaaactaacattcctactaaaaagttgagcttggacatattttgaatttttgtaagtgaagatttttaaactgactaacttaaaaaaatagattgtaattgatgtgccttaatttgcataaatcataaatgtatgtcctctctgtaattgttttaatgtgtgcttgaaatatccagaaaacctatggagttagtaaattctgggctgtcatatgta

SEQ ID NO: 22377 - DNA, 1646 bp, Homo sapiens
  source 1..1646: mol_type = unassigned DNA
gcacaagctcagcgatggcggctccagaaggcagcggtctaggcgaggacgcccggctggaccaggagaccgcccagtggctgcgctgggacaagaattccttaactttggaggcagtgaaacgactaatagcagaaggtaataaagaagaactacgaaaatgttttggggcccgaatggagtttgggacagctggcctccgagctgctatgggacctggaatttctcgtatgaatgacttgaccatcatccagactacacagggattttgcagatacctggaaaaacaattcagtgacttaaagcagaaaggcatcgtgatcagttttgacgcccgagctcatccatccagtgggggtagcagcagaaggtttgcccgacttgctgcaaccacatttatcagtcaggggattcctgtgtacctcttttctgatataacgccaaccccctttgtggtagaagcattgaaagcattggaatggaggcttagaccatcgttgtgtttgaagaattttctagctctaccaagtagaagatggaatgagaaggcactgaggaaattactcacctttcttattaggaaatacatcctggaattatgagcagccagttaattctaaggcccttcacagtatcacatttgaaactttgtgctggaatcatgataactgcatctcacaatccaaagcaggataatggttataaggtctattgggataatggagctcagatcatttctcctcacgataaagggatttctcaagctattgaagaaaatctagaaccgtggcctcaagcttgggacgattctttaattgatagcagtccacttctccacaatccgagtgcttccatcaataatgactactttgaagaccttaaaaagtactgtttccacaggagcgtgaacagggagacaaaggtgaagtttgtgcacacctctgtccatggggtgggtcatagctttgtgcagtcagctttcaaggcttttgaccttgttcctcctgaggctgttcctgaacagaaagatccggatcctgagtttccaacagtgaaatacccgaatcccgaagaggggaaaggtgtcttgactttgtcttttgctttggctgacaaaaccaaggccagaattgttttagctaacgacccggatgctgatagacttgctgtggcagaaaagcaagacagtggtgaatggagggtgttttcaggcaatgagttgggggccctcctgggctggtggctttttacatcttggaaagagaagaaccaggatcgcagtgctctcaaagacacgtacatgttgtccagcaccgtctcctccaaaatcttgcgggccattgccttaaaggaaggttttcattttgaggaaacattaactggctttaagtggatgggaaacagagccaaacagctaatagaccaggggaaaactgttttatttgcatttgaagaagctattggtaagaagtgatcatgaacattaaggaattggctgcaaggcaaaaggaaaaggtttggattgggattcaaagatccacagtgaaacacggtttattttgcctctccagcactcaggttgaatgtcgaactgtcctactccaaaattgacatctcagatgatttacagccaaaaggaatgtctt

SEQ ID NO: 22378 - DNA, 8515 bp, Homo sapiens
  source 1..8515: mol_type = unassigned DNA
gggcgggcggcggcggcggcggcggagccaggacccagacatctgggactgttgttctctcgcggcgcgaccgcctcagtcacttcgcccagagacccggacctggtccgctggggagcaggcggccataaaccccctctctcccggttccctgacgccgcggcaggagctgttacgaacaccctgcggttggtctccgatgcccttcagtgaggtggggacgcctggaccctggtgagcgaaccccaagccaccccccaccccaactcagtgtcttcgccggcccccggcccgtacgcctgtctggtcgccatggctgaaaacacagagggggatctgaactccaacctgctccacgccccctaccacaccggggaccctcagctggacacggccatcgggcagtggctccgctgggataagaatcccaaaacaaaagagcagattgaaaacctgttacggaatgggatgaacaaggagctgcgagatcgtctttgttgccgaatgacttttgggactgcaggacttcgttctgccatgggggcagggttttgctatattaatgaccttacagtaatacagtcaacacaggggatgtacaaataccttgagagatgtttctcagacttcaagcagagaggctttgtggttgggtatgacactcggggtcaagtaactagcagctgcagcagccagaggcttgctaaactcactgctgcagtcttgctggccaaagatgttcctgtgtaccttttttcaagatatgttcctacaccttttgtaccatatgcagttcagaagctcaaagcagttgcaggtgtgatgattactgcctctcacaaccgcaaggaagacaatggatacaaggtttactgggaaactggtgctcagatcacatctcctcatgataaagaaattctaaaatgtatagaagaatgtgtggaaccctggaatggttcctggaatgataatttagtggataccagcccgctgaagagagaccctctgcaggacatttgcaggagatacatggaagatctgaaaaagatctgtttttacagggagttaaactcgaagaccaccttgaaatttgtgcacacatcttttcatggggtcggacatgactatgtgcagttggcttttaaagtgtttggttttaagcctccaattccagtaccagaacaaaaagatcctgatccagacttttctaccgttaaatgtccaaatcctgaagaaggagaatctgtgctggaactttccttgagactggcagagaaagaaaatgcccgggtagtgctagccacagatcctgatgcagacagactggcagcagcagaacttcaggagaatggttgttggaaagttttcacagggaatgagttggcagctttgtttggatggtggatgtttgattgctggaagaaaaataaatcaagaaatgctgatgtgaagaacgtttatatgttagccaccacagtctcttctaaaattctgaaggcaattgcacttaaagaaggatttcattttgaagaaacattaccaggttttaaatggattggaagtaggataatagacctcctggaaaatgggaaagaagtcctttttgcatttgaagagtctattggttttctctgtggaacttcagttttggataaagatggggtgagtgcagctgttgtggttgctgagatggcatcttacctggaaaccatgaatataacattgaaacagcaactggttaaggtttatgaaaaatatggttatcatatttcaaaaacttcctatttcttgtgttatgaaccacctaccatcaaaagtatatttgaaaggcttcgtaattttgattctccaaaagaatatccaaaattttgtggaacatttgctatattgcatgtacgggacgttaccactggatatgacagtagccagcctaataagaaatcagtgctgcctgtgagtaaaaacagccaaatgattacatttacttttcaaaatggctgtgttgctacccttcggacaagtggaacagaaccaaagataaagtattatgcagagatgtgtgcgtcacctgaccagagtgacactgctttactggaggaagaactgaagaaactcattgatgctctgatagagaattttcttcagcctagtaagaatggactgatctggcgttctgtttaggggtacaccaatatgtcatgacactgtgtgggcatatggaacagagcaaccgagaactgcatacattgaaccttgtgttagcattctctctctatctcatctggccgagtatctttttccttttattttctttctttttggtcaactggctagactaaacaaagtataagtttgaaatgaaatggtctagagggaaatgattcaaattttttcataattcaaacaaaagttattacactaaaagtattatagtaacgtattgtccttccgttaacagaaacatcacaattcaaaagtgagttttcttattatagtgtgattaagcctagttctgtatctcgtaattgtgtatagcatggtaaaagaaaaaaaaaaagacaggtaaatgttatataattgtagggttagttaaggaaattagtccataaaattggcaagaaaatggtactttccttgattgttatgaaaaagtgtcattgtgacatcacaggtattaatttacaaattagagtatttgaaataggatatttagcatttctgtagtttagaacagatgttacagtgtgtggttttggcatgtctgtttcaggtgcccttggtgcagtataaatttactgtatgtatttaaaattctgatgtttactgaacataaaacaatagtggcaacactcctattggctttgttcttatcaaatttctcagtgccttctcagggtctggtgtgaacagaaaaaacagtgttcctgcatttaccataatttaatcagtcaatttgcagatagctaaggaaaatcttccaaaatctgtaggtgcttcctctatatcaagtgagtttgctgattttaaaatcttaggaatataaataaagatcttaataaaagcaagcttaatgtagttaaggatcttcatattagaattgtgtcatttatcaaaccttttattacagaaaaaaatctgaactgagaaaggagctctgaatttatttgacagtctaacttttgaattacatttttgtaagtagatttattcttttattttatgaagtaatgttaattttactaagaataaaacatccaaattttaagtattatgaaatactaaaactacatgttttaaaacagaggtccagtttattctaacatcttgctgacttctgtagaatttctgattgcatgactattatttatcttcttttagtgtagaaaataattttttacaaaaagtcacttttgggctgggcgcagtggctcacgcctgtaatcccagcactttgggaggctgaggcaggtggatcacaatgtcaggagtttgagactagcctggccaatatggtgaaaccctgtctctactaaaaatacaaaaattagccgggtgtggtggtgggcacctgtagtcccagctactcgggaggctgaggcaggagaattgcttgaacctaggaggctgagattgcagtgagccgaaatcacgccactacactccagcctgggcaacagagggagactccatctcaaaaaaaaaaaaagtcacttttggctaatcatgcagtcttctgaaaaggtttaatagagaaatgctgtttaggctgggcttggtggctcacatctgtaataccagcgctttgggaggctgaggcaggaggattgcttgaggccaggagtttaagttacagaactatgatcacactgccgcactgaagcctggatgacagagtgagaccttatctcaaaaaaaaaaaaaaaaagagagagagagagaaaaagaaatgctgtgtttaatcttcttaaaatgtatcttgtcctacatagttctcagaatacatatggggtatagttaggagataacaataacaagacctaaacaaattgcttatgggagatagcactgtaattagagaatttatttcatataaaataataatataaagtttgaactgattagaatgttccttaaatcatggtttcgtttgttgcagctgtcagctaacatttggttgagctcatataatccaaacctaattgtccaactattgtattgccactattgttaatttgttccttccttactttcttattgttggatcttatatgactgtatgactgtagataatagacagctagctaaatgtagagcaccatttttctcaatgagtttgttttcaaaggctttgcactggagaagatatgtgtagaatttttgttttatttttaaaatgtgtaaaacatcttttgttttatatgcttttaagaatgtagattgtaatttaggaaatggcatatattctgcaaagtggtataatgttgtatatatgaaaaacaggtatatttggtttagttctgtgtttcagtgactgataaacaaaaatgaagctaaaatgaatcaacggctcattcatagttactaaagccatgtcatgactgtcattctattatgaagaaaacagttttatttgagtgctttaatataatgcaacatttaagtcatcttaaggtgaaaagttattgaagtgttcttctctcaagttaacaaaattttacaaatgttcctgaagtgtatcgattgagggaattattttattctagcctgtcatgagtctgtctgagcatgatacttaacatgaacttgatgtagtaggtgcacatttgcctaacaggataaattcagtgatagcccaagctggtcaggagagacagaagtgctggctaggaggtctcagcctcgggcactacaatgtttatctttttctttttgaacaatattgtgaaaatgattgcattctcattgagcatgaaagtcaaaactggaattttctaaagctttggagaaaaggagagaattagtagggcaagatcaaagcatacattggaaataaacagtagaaataagcaaacaatataaagagacacgggaaatgcttctcgtgaagggcaaatgtaacaccataacagtagggaataaactgtgtcccacctgtttacttgtgtttatttgttgttatgatgagtatgcacctaccattttcctttattgtgatcactaaaatgaggccaaggtttaggaggtgagaaaaagtatcccttttacggattcagttcctgctaggatgttgtatcagaatcatgtgagaactcaggaagaggtagagcagaaataaaaaggaagaaaatgtagattagaaaataagacttctgagaaaaagttcaaggaataaagattgtttgactctggagaggagaaagctgttgagatagtttgctaagtttgctaataaagctttattgagtcttttattgaagggttcaaagtaagaaatactatgccatagtgttctccatctctagtgaagacagaaccagagggaataaggatcttttttttaaagacagcatggaaagtttaagatttaggaacttcttgagaaatcttcataatatcttctattcaaaatcttttttttatttttaagggaataaaaattttaaaaattaagagatatacagatgactttttaagggtccttctttccagcacattttttttaaaaactcaggttagaacaaaaatgtcataaagggcactaaaagtaacatttgggtttcactccatatctagaagaatttagctcacaaaacaatttttgtgtgttttgagtaactgatgcataagtgcaatgaataattttcctgcttcactgttatttttaatttaacctggcaaattaagtgagacttgaacaaaattttgttcatcttgaagaatgtatagtggcttaggttatttgaggttttcgttttgaatatatatgttgttattttgatgtagatacgttagcagatggagaggttctaagagattggatactttggaatgtctttatataggaaatagacctcccatttcttaagcaagttgcttctggaattgatgcaacagggatattagctgtagtttaatggataagttgttctatgagctgctgctatcagtacttttttccacattttccattgatatttgtgatgcttgaaaaatccaaacttcacttggatacatttaattttatgcctttttctctctacctcccacttttcctaggcacccttgcacattttgttactgtgaaggactattgccctgttacctcactgataagaaatctcaactgtattcattcagaatgctttaagcttagtcataaactacatttgcctatggacctttggttattttgttaatgttgtcattatatttaagacttattgtaggaagtaattttaaatctatttcataacctgttttgatctgtctgcatactgctatatgttaatttattacggccttttacaattcacttgtcatctgagattgttctagaaactgatgaggaaagagtcgtactaaccaaaatgaatgggcaattgacataacattctatttcaggtttccttgtacttggggagccaaagcacaagatctaaggaaatcttattcacatttgtccctcagagcatcttaccctaagccatagaggtataaatagtaagatgagaattgctcattgtctgactccttgcacagcatgaatttaattctagttggaaacaaagttagtgttgactactggttaccttaaagtattcaccatactatatatttattagaccatctttcctctttgtttattcaagactatgtacttataaaagagaacctataagaatgtgtagagtgaccaaatagggacaaagtgacatacctagagtttgctgctcaaatttttccactagcgtaaccctaaagcagaggggcatgatgaagggggaaggggttctgagagcaaaatcagaatcagcctaccactgacatgaagtgtgttctgtctttaaaatgtaagtgaattttgcattctttataataaaacttttaatataaaaatgatatgtttaatctttactgaaacttatgccaccacaaaggagcaccatgttcatcacgtggctgctcagttttctcccccagtgccctcacccccagtggaggcaagtccttgagctacacacactggctgtagtgcaagatatataaacataggccgggctcggtggctcatgcctgtaatcctagcactttgggaggccgaagcaggtggatcatctgaggtcgggagattgagactagcctgaccgacatggagaaaccctgtgtccactaaaaatacaaaattagccgggtgtggtggcacatgcctgtaatcccagctactcgggaggctgaggcaggagaatcacttgaacccaggaggtggaggttgtggtgagccaagatcgcgccgttgcactccagcctgggcaacaagagtgaaactccatctcaaaaaaaaaaaaaaaagatatataaacatagaacatatccagactatttcctgcccttggaatctgaccttcagaaggattaatgccaaactaaactgacctgaaacagttttgttactattggcattccttgactaaaaaggaccacctgatgctcagtcccgagagtaggaatcgtggtttattatttttcatatccataccacctagttcagtacctgttatagagtgtttaattgctgatactaggaattaagggattttttaaaagtagcaaatagtttaaggaacaatcaaaaaatgaattttctaattcagttttttcaatgaagtcccatcactgaactttataatgtaatgtttattaagcagacatccccttaaatactcagtttctttggagagagcaaagcatatctctctgtggaaattatatataatgcctggtattttacactcaaagcaaggtgttggccaggaaggtaaagaaatggtgtctatgtagacttaatatcactagtctaagtgtcattttgagcctagtagcactaccttccaagtgagtcacaacaaatttgatcctatttggtatgtttttgtccactgttatgattcatcatgtatcttacaagagccactcaagcaagactctgcttctatgtatggtgaggccttgttgttctaggctagaataaactctttgtatgcctcattgaatatgccaggtaaaatttatgcagtcaagaatgaattatttttctgactaaagtgtgtagcagtagttcaaaattgtgcccttgttttaacagtttctgtcaacatcttctcatttttccctacaaaaacaccagggtgtattataagtactgcctgtgagaatttgcactttatgtatttgtgtgtggatttcttgtggttttagccaaatgaagtgttatcagtaataaacaggtctcttcata

SEQ ID NO: 22379 - DNA, 1971 bp, Homo sapiens
  source 1..1971: mol_type = unassigned DNA
aacaccgcggtggccttttcgcttgggccgcattccagggctccggacgtttacgattcactggcctctgccccgagggacccaggataaggttgagagtggaccaatttaagtgtgcccggcgtccaggatagtcctggagctaaaatgggaggagagtggggacaatctgctatctgccctgagtctgcccaggagtggacataccaagttggacaacatcttgtagacatggatttaggtgctattacaaaatactcagcattacacgccaagcccaatggactgatccttcaatacgggactgctggatttcgaacgaaggcagaacatcttgatcatgtcatgtttcgcatgggattattagctgtcctgaggtcaaaacagacaaaatccactataggagtcatggtaacagcgtcccacaatcctgaggaagacaatggtgtaaaattggttgatcctttgggtgaaatgttggcaccatcctgggaggaacatgccacctgtttagcaaatgctgaggaacaagatatgcagagagtgcttattgacatcagcgagaaagaagctgtgaatctgcaacaagatgcctttgtagttattggtagagataccaggcccagcagtgagaaactttcacaatctgtaatagatggtgtgactgttctaggaggtcaattccatgattatggcttgttaacaacaccccagctgcactacatggtgtattgtcgaaacacgggtggccgatatggaaaggcaactatagaaggttactaccagaaactctctaaggcttttgtggaactcaccaaacaggcttcttgcagtggagatgaatacagatcacttaaggttgactgtgcaaatggcataggggccctgaagctaagggaaatggaacactacttctcacagggcctgtcagttcagctgtttaatgatgggtccaagggcaaactcaatcatttatgtggagctgactttgtgaaaagtcatcagaaacctccacagggaatggaaattaagtccaatgaaagatgctgttcttttgatggagatgcagacagaattgtttattactaccatgatgcagatggccactttcatctcatagatggagacaagatagcaacgttaattagcagtttccttaaagagctcctggtggagattggagaaagtttgaatattggtgttgtacaaactgcatatgcaaatggaagttcaacacggtatcttgaagaagttatgaaggtacctgtctattgcactaagactggtgtaaaacatttgcaccacaaggctcaagagtttgacattggagtttattttgaagcaaatgggcatggcactgcactgtttagtacagctgttgaaatgaagataaaacaatcagcagaacaactggaagataagaaaagaaaagctgctaagatgcttgaaaacattattgacttgtttaaccaggcagctggtgatgctatttctgacatgctggtgattgaagcaatcttggctctgaagggcttgactgtacaacagtgggatgctctctatacagatcttccaaacagacaacttaaagttcaggttgcagacaggagagttattagcactaccgatgctgaaagacaagcagttacacccccaggattacaggaggcaatcaatgacctggtgaagaagtacaagctttctcgagcttttgtccggccctctggtacagaagatgtcgtccgagtatatgcagaagcagactcacaagaaagtgcagatcaccttgcacatgaagtgagcttggcagtatttcagctggctggaggaattggagaaaggccccaaccaggtttctgaagataattttcatattcctgagaaactggactttttacaagtctttacaaaactgtcaataataatggcagtactaagagatttataatcataatgtttacaatgcagcct

SEQ ID NO: 22380 - DNA, 556 bp, Homo sapiens
  source 1..556: mol_type = unassigned DNA
gactcgcggaccgcccccccccaacaccgcggtggccttttcgcttgggccgcattccagggctccggacgtttacgattcactggcctctgccccgagggacccaggataaggacatggatttaggtgctattacaaaatactcagcattacacgccaagcccaatggactgatccttcaatacgggactgctggatttcgaacgaaggcagaacatcttgatcatgtcatgtttcgcatgggattattagctgtcctgaggtcaaaacagacaaaatccactataggagtcatggtaacagcgtcccacaatcctgaggaagacaatggtgtaaaattggttgatcctttgggtgaaatgttggcaccatcctgggaggaacatgccacctgtttagcaaatgctgaggaacaagatatgcagagagtgcttattgacatcagcgagaaagaagctgtgaatctgcaacaagatgcctttgtagttattggtagagataccaggcccagcagtgagaaactttcacaatctgtaatagatggtgtgactgttct

SEQ ID NO: 22381 - DNA, 6107 bp, Homo sapiens
  source 1..6107: mol_type = unassigned DNA
gagccggaagccacgcagggccacgtctgcggttctgaggactgggtttgggtgcagacgttgttgcttgggcgcttctccgctgcgtgtaggtgaagggggcttcctgaccgagacatggatttaggtgctattacaaaatactcagcattacacgccaagcccaatggactgatccttcaatacgggactgctggatttcgaacgaaggcagaacatcttgatcatgtcatgtttcgcatgggattattagctgtcctgaggtcaaaacagacaaaatccactataggagtcatggtaacagcgtcccacaatcctgaggaagacaatggtgtaaaattggttgatcctttgggtgaaatgttggcaccatcctgggaggaacatgccacctgtttagcaaatgctgaggaacaagatatgcagagagtgcttattgacatcagcgagaaagaagctgtgaatctgcaacaagatgcctttgtagttattggtagagataccaggcccagcagtgagaaactttcacaatctgtaatagatggtgtgactgttctaggaggtcaattccatgattatggcttgttaacaacaccccagctgcactacatggtgtattgtcgaaacacgggtggccgatatggaaaggcaactatagaaggttactaccagaaactctctaaggcttttgtggaactcaccaaacaggcttcttgcagtggagatgaatacagatcacttaaggttgactgtgcaaatggcataggggccctgaagctaagggaaatggaacactacttctcacagggcctgtcagttcagctgtttaatgatgggtccaagggcaaactcaatcatttatgtggagctgactttgtgaaaagtcatcagaaacctccacagggaatggaaattaagtccaatgaaagatgctgttcttttgatggagatgcagacagaattgtttattactaccatgatgcagatggccactttcatctcatagatggagacaagatagcaacgttaattagcagtttccttaaagagctcctggtggagattggagaaagtttgaatattggtgttgtacaaactgcatatgcaaatggaagttcaacacggtatcttgaagaagttatgaaggtacctgtctattgcactaagactggtgtaaaacatttgcaccacaaggctcaagagtttgacattggagtttattttgaagcaaatgggcatggcactgcactgtttagtacagctgttgaaatgaagataaaacaatcagcagaacaactggaagataagaaaagaaaagctgctaagatgcttgaaaacattattgacttgtttaaccaggcagctggtgatgctatttctgacatgctggtgattgaagcaatcttggctctgaagggcttgactgtacaacagtgggatgctctctatacagatcttccaaacagacaacttaaagttcaggttgcagacaggagagttattagcactaccgatgctgaaagacaagcagttacacccccaggattacaggaggcaatcaatgacctggtgaagaagtacaagctttctcgagcttttgtccggccctctggtacagaagatgtcgtccgagtatatgcagaagcagactcacaagaaagtgcagatcaccttgcacatgaagtgagcttggcagtatttcagctggctggaggaattggagaaaggccccaaccaggtttctgaagataattttcatattcctgagaaactggactttttacaagtctttacaaaactgtcaataataatggcagtactaagagatttataatcataatgtttacaatgcagcctactggattgtctctagatctgtttttcttaaacactaacagaataattctttataaataggtaagccttacacttgttaaagaaatttacctctaatttcagtctcactaatgtaaaatactgggacttaagtatacaattcagtcactaactgtacagttttatgtggggaacaattcatgcaggctactggaaaattaaatcttattaccaactccttgtgatatctttgccatcaccatcacatgagcaagatgatgttttgcagcattccccattgctgatacaaatggagagggcagagaagactttatacaaccagtttttccattgcagagtcttaagaaagattattagatgacttacctatatgactaatgccatcaggaactcagaggtatgaatagggggttgtccatccctcttccatactgaggtggagatgctcatgcaatacttttaaggatgcatggtccagccttcagttattcttcactgctcttggtgaaggtatgtgggagaaaaactaattataatacgtttcccagcctctgatggagaaggaacaccattctgataccagaacatggttaataaggaaaagagaaaaatccccaaccaatcttaattgaaccaagtctgaaaccaatggaaaaaaaaaatgggtagtgtatattttgcaggtttaagacaactcaggacaataaaaacaatggactttacatgtgtatatatatagctctcttaggcaccataatcagtatgagccaacaatatttaaacttgattcaggccacattcagacatttgctcttatatacaaatatttaaattaaatacaatctgaaatgtgttctgttacatacaaaaaaggaaaaactatacaacgcagagcagtgtgtgtgttttaaataattacatttacatgtaagctaaatggaaccagcaatggtgctcaagtttttatcatcccttccagaaaatctttttctaccatctcttctattttttgcctggctttgctggaacatggtttgtggttctccagtttcatgtccttattagggaaggcatttgagtagaggataggactccctgagtgtcctccacatcggcttgtgactttgctgttgaagacttgactgagcacattgaagaacggcaggagctgctccatactgcgcacggtgcagatggtgagcagcaagtgccctggctcccaacccaatgttctccctgagttgtcttcctctggatttttctgcagaaaacaaaaagtgaactggtattaatacaacagacaatgtggtatgttagaaaaattaaaaatatataaactttggcaattggtcaagaaatgaatacaaatgacattaagtttctaactcctgacctgatcaaaacccttggtgcttctgagaccttttactgccatttattagttttacatggagcagtctaacattgtagtaatagttcccaactagaatgcgcagataagcttagttaacagaaatagctttgaacaggaatagagtcaaacataaaagttttatgttgtgctttgtatttactcaaaaagctcccaggtttctgaaccctcactactgtaaccaaggactaggtcacaaaattactacagaaaaaaggaacaaagtgctttatacatttcataatatatccccttttattataattagttaattcccttttatctaaatggcctaaatttgccatgatggtagcagtgtccaaagtgaataattactgtcagtactgcatcacagagaaaggaagggatccctcaggagacactgctgtctccttctgggttgtgctaaacaacatagggaggaaagctggacctggagtcaaaggaattgagttagtgtgctggctctgccatacttacggcacccttgggcaggatatacaaaggttcctcacttataaaatgggacagtctaaaactaccttttagtagagaagtcaaatgagaaggtatgtgaaaactctgtcaactaaatataaagactaataatttgggtattaagaggctagtttgagaagccacctgaattacacaaacacagctacagacatcattctgtctagagaaagataagagagaacaggttggttgaacttgggcagaatcacagatacaattccacactaaagaatgaaaataagcaatgaactagacagaaggaagaaatcatgaagacttaggaagcagaattacaatctgtcatattaacaaatggagtttgccttctaagatcagatgttgctcagaaactttcattgtttacctaataatttaatatcactagtttcctagtgggtcaagcagatgcaaaatccagcttattttcttctatgtgctctcaagcttattgcttattttaaagtaaaatcctgaaaaaggaaaatattaggttggtgcaaacgtaattgcggtttttgcattgttgaaatttgccgttttatattggagtacattcttaaataaatgtggttatgttatacatcattttaagcatatttctcactttttttttgctaatgacttattgctgtttatatttattttagactatggaaatgatgttagacaaaaatcaaatttagcgattttctgagttcaaaataggttataaagcagcagagacaacacacaacatcaacaatgcatttggcccaggaactgctaatgaacatacagtgccgtgatggctcaagaagttttgcaaaggagactagagccttgaagatgaggagtgcagtggccagtcatcggaaattgataatgaccaattgagaacatcatcgaagctgatcctcttacaactataagagagctgcccaagaactcaatgttgaccattttatggtcgttcggcatttgaagcaaattgaaaaggtgaaaaagctcaataaatgggtgcctcatgagctgagtgaaaaataaaaaaattcgttgttttgaagtgtcattttctctattctatgcaacaataatgaatcatttctctatcggattgtgatgtgtgccaaaaggtggattttatacgacaactggcgatgaccagctcagtggctggactgaaagaagctccaaagcacttcccaaagccaaacttgctccaaaaaatggtcatggtcattgtttggtggtttgctgccagtctgatccactacagctttctgaatccaggtgaaaccattacatctgataagtatgctcagcaaatcaatgagatgcaccaaaaactgcaatgcctgcagccggcattggccaccagaaagggcccaattcttttcacgacaacactgggccgcacgttgcacaaccaacgcttcgaaaattgaactaattgggctatgaagttttgcctcatctgccatattcacctgacctcttgccaacaaactaccacttctttaggcatctcagcaacgttttgcagggaaattgcttccacaactagcaggacacagaaaatgctttccaagagttcgtcaaatttggaagcatggatttttatgctacaggagtaaacaaacttatttctcattggcaaaaatgtgttgattgtaatggttcctattttaattaataaagatttgtgtgaacctagttataatgacttaaaattcatggtcccaaacagcaattacttttgcaccaaactaaaaatataagttaaaatggaagagtctaggagcaaaccaagaaaagatcacctacttcatcatctctggtcaaaaacaaaccaaaaaacttaacagctatcacttaagtttgcttcctagcaattatttagcttccagtctagattacaggatatataaaactttctttctttctttcttaactatgacactggcaccaatgagagtcctgtgactgactttcacatttccaccattactcaattactggtaccataccacctctaatcccctaaatcaaactgcaattcaacaataaagggcgtacagagatgactttgtcctgaaggaaaatgaatatccttgtaccctctatatagctaacttccaaatgtaagagaactatggggtaaccttttgtttctattcctatcaagatgagcctttaagagagggacttttattaagctcttgaccaagaagaatacacttgattcagagtttctgatgctcttaatcagaactatatgtattgtctcaatattaaataaagtcaaatgtttccatacaaa

SEQ ID NO: 22382 - DNA, 2013 bp, Homo sapiens
  source 1..2013: mol_type = unassigned DNA
gttgcttgggcgcttctccgctgcgtgtaggtgaagggggcttcctgaccgagacatggatttaggtgctattacaaaatactcagcattacacgccaagcccaatggactgatccttcaatacgggactgctggatttcgaacgaaggcagaacatcttgatcatgtcatgtttcgcatgggattattagctgtcctgaggtcaaaacagacaaaatccactataggagtcatggtaacagcgtcccacaatcctgaggaagacaatggtgtaaaattggttgatcctttgggtgaaatgttggcaccatcctgggaggaacatgccacctgtttagcaaatgctgaggaacaagatatgcagagagtgcttattgacatcagcgagaaagaagctgtgaatctgcaacaagatgcctttgtagttattggtagagataccaggcccagcagtgagaaactttcacaatctgtaatagatggtgtgactgttctaggaggtcaattccatgattatggcttgttaacaacaccccagctgcactacatggtgtattgtcgaaacacgggtggccgatatggaaaggcaactatagaaggttactaccagaaactctctaaggcttttgtggaactcaccaaacaggcttcttgcagtggagatgaatacagatcacttaaggttgactgtgcaaatggcataggggccctgaagctaagggaaatggaacactacttctcacagggcctgtcagttcagctgtttaatgatgggtccaagggcaaactcaatcatttatgtggagctgactttgtgaaaagtcatcagaaacctccacagggaatggaaattaagtccaatgaaagatgctgttcttttgatggagatgcagacagaattgtttattactaccatgatgcagatggccactttcatctcatagatggagacaagatagcaacgttaattagcagtttccttaaagagctcctggtggagattggagaaagtttgaatattggtgttgtacaaactgcatatgcaaatggaagttcaacacggtatcttgaagaagttatgaaggtacctgtctattgcactaagactggtgtaaaacatttgcaccacaaggctcaagagtttgacattggagtttattttgaagcaaatgggcatggcactgcactgtttagtacagctgttgaaatgaagataaaacaatcagcagaacaactggaagataagaaaagaaaagctgctaagatgcttgaaaacattattgacttgtttaaccaggcagctggtgatgctatttctgacatgctggtgattgaagcaatcttggctctgaagggcttgactgtacaacagtgggatgctctctatacagatcttccaaacagacaacttaaagttcaggttgcagacaggagagttattagcactaccgatgctgaaagacaagcagttacacccccaggattacaggaggcaatcaatgacctggtgaagaagtacaagctttctcgagcttttgtccggccctctggtacagaagatgtcgtccgagtatatgcagaagcagactcacaagaaagtgcagatcaccttgcacatgaagtgagcttggcagtatttcagctggctggaggaattggagaaaggccccaaccaggttataaagcagcagagacaacacacaacatcaacaatgcatttggcccaggaactgctaatgaacatacagtgccgtgatggctcaagaagttttgcaaaggagactagagccttgaagatgaggagtgcagtggccagtcatcggaaattgataatgaccaattgagaacatcatcgaagctgatcctcttacaactataagagagctgcccaagaactcaatgttgaccattttatggtcgttcggcatttgaagcaaattgaaaaggtgaaaaagctcaataaatgggtgcctcatgagctgagtgaaaaataaaaaaattcgttgttttgaa

SEQ ID NO: 22383 - DNA, 3191 bp, Homo sapiens
  source 1..3191: mol_type = unassigned DNA
ggaaggcagaagcaatctctgccgagagagtcagccgagcggccgcgcggagaggaggggcgggcggtccccaggcgggcgggtgcagggcgcagggcgccgacctgctggagagggggcccgggcgcgaggcggagtcccggcgcgcagccaggctggtggaggcccccggcaggctgcagattccctccggctccgggagccgcagcaggaccggccaggaggcgccatggaggggagccccatcccggtgctgacagtgcccaccgcgccctacgaggaccagcggccggccggcggcgggggtctgcggcgacccaccggcctcttcgagggccagcgcaactacctgcccaactttatccagagcgtgctgtcgtccatcgacctgcgcgaccgtcagggctgcaccatggtggtgggcagcgacggcaggtactttagcaggacggccatcgagatcgtggtgcagatggccgcggccaacgggattggacgactgattattggacagaatggcatcttgtcgacacctgcggtctcctgcattatcaggaagatcaaggcagctggtggaatcattctaacagccagccactgccctggaggaccagggggagagtttggagtgaagtttaatgttgccaatggagtggagatagtggacccagtggatatctatcttaacctccttcggaccatctttgactttcatgccatcaagggtttgctgactggacccagccaactgaagattcgcattgacgcaatgcacggagttatgggaccttatgtgagaaaagttctgtgtgatgagctgggggccccagccaattctgcaataaactgtgttcccctggaagactttggagggcagcaccctgacccaaacctgacatatgcaacgactcttctggaagcaatgaaaggaggagaatatggatttggagctgcatttgatgctgatggggaccgttatatgatcctaggccaaaatggcttctttgtgagcccttctgactccctggccatcattgctgccaacctctcttgcattccatatttccgtcagatgggggtccgcgggtttgggaggagtatgccaaccagcatggccctggacagagtggccaaatcaatgaaggtccctgtatatgagaccccagctggatggagattcttctcaaatctgatggactcaggacgttgcaatctgtgtggggaagagagctttggcactggctctgaccacctccgagagaaggatggcctgtgggctgtcttggtctggctctccattattgctgcccggaagcagagtgtggaggaaattgtccgagatcactgggccaaatttggccgccactactattgcaggtttgactatgaggggttggatcccaagacgacatattatatcatgagggacctggaggccctggtcacagacaaatccttcattggccagcagtttgctgtggggagccatgtctacagcgtggcgaagacggatagttttgaatacgtggaccctgtggatggcactgtgaccaagaaacagggcctaaggatcattttctcggatgcatcacggctcatcttccggctcagttcctccagtggtgtgcgggccaccctcagactgtacgcagagagctacgagagggatcccagcggccatgaccaggagccacaggcagtgctgagccctctcatagccatcgcactgaaaatatcccagattcatgagagaactggccggaggggacccactgtcatcacctgaatagaggaaagatcactcaccagggccaaagagagtgctcagcgggagatgcttcactgatgccttcttgctacctgtttgtgcctcttatgactttggaaaaacaaaagatattttgcttttgggggatagagggtgggtgggaaaagaaaaaaaatccatttggttttggttttgtcctattcctccaaatgcagcagggcctttagttgtctgttaaagctgcactataatttggtatctacattttatcacacaaaggaacctccccttttgacaacaactgggctaggcagctgttaatcacaacatttgtgcatcacttgtgccaagtgagaaaatgttctaaaatcacaagagagaacagtgccagaatgaaactgaccctaagtcccaggtgcccctgggcaggcagaaggagacactcccagcatggaggagggtttatcttttcatcctaggtcaggtctacaatgggggaaggttttattatagaactcccaacagcccacctcactcctgccacccacccgatggccctgcctcccccatcccatccccaacatccctgtaccaccttctctcacatcttctaaagctttgtacaaatcacaatggtgcacttccaacaaaatatatcaataggtgttttcctctcttattttgtaaatagtattattttagctattaagctggataccttctttcaaattcagccattcagttgtaaagttgggaagaagtttcttgacaagactctgcaattaaatgcttaaaatttggaggggatccttccttgattacatcaagtatgttggtacatgggtttatacaagttcctcttgagaaggcaaaaagaccaccatgtgtgagagctctttgacttggccaataggggcctatcttaatgcacttgtttggacacatttctgatcttatttgtaaaggctgcaaaaggagaggatgaaatgctgtaaaagtaggaaatgaagtggaagctggaagaaaatgtaattggtggtacagctatgggccagatggtggaggggagggtggggacccctgccggcaagcagagtgtcacagctggctttcctcacttgggaaaagggtactgccggtctagcagcctcctctgtactcagccaggacacccagcgcgtgggacctgtttgtgtctgttttgcttccttgggaacggcacagtcactcaccctgccatttgcggaaatgacctggtgcactttgactgttaagcaatgcgttattgctgtagtcaaggttagtgcaagcaaggaaacattcccagtaaggtatttgtttccattttctgtctgtgcttctgtcagaaacttgctaggacatttagtggccaataaaaaagaaattcctaatttcaacctta

SEQ ID NO: 22384 - DNA, 3338 bp, Homo sapiens
  source 1..3338: mol_type = unassigned DNA
ggaaggcagaagcaatctctgccgagagagtcagccgagcggccgcgcggagaggaggggcgggcggtccccaggcgggcgggtgcagggcgcagggcgccgacctgctggagagggggcccgggcgcgaggcggagtcccggcgcgcagccaggctggtggaggcccccggcaggctgcagattccctccggctccgggagccgcagcaggaccggccaggaggcgccatggaggggagccccatcccggtgctgacagtgcccaccgcgccctacgaggaccagcggccggccggcggcgggggtctgcggcgacccaccggcctcttcgagggccagcgcaactacctgcccaactttatccagagcgtgctgtcgtccatcgacctgcgcgaccgtcagggctgcaccatggtggtgggcagcgacggcaggtactttagcaggacggccatcgagatcgtggtgcagatggccgcggccaacgggattggacgactgattattggacagaatggcatcttgtcgacacctgcggtctcctgcattatcaggaagatcaaggcagctggtggaatcattctaacagccagccactgccctggaggaccagggggagagtttggagtgaagtttaatgttgccaatggaggtcctgcacccgatgttgtctcagacaaaatctaccaaatcagcaaaacgattgaggaatatgctatatgtcctgatctccgaatcgacctatctcgactaggaagacaagaatttgacctagaaaacaaattcaaaccattcagagtggagatagtggacccagtggatatctatcttaacctccttcggaccatctttgactttcatgccatcaagggtttgctgactggacccagccaactgaagattcgcattgacgcaatgcacggagttatgggaccttatgtgagaaaagttctgtgtgatgagctgggggccccagccaattctgcaataaactgtgttcccctggaagactttggagggcagcaccctgacccaaacctgacatatgcaacgactcttctggaagcaatgaaaggaggagaatatggatttggagctgcatttgatgctgatggggaccgttatatgatcctaggccaaaatggcttctttgtgagcccttctgactccctggccatcattgctgccaacctctcttgcattccatatttccgtcagatgggggtccgcgggtttgggaggagtatgccaaccagcatggccctggacagagtggccaaatcaatgaaggtccctgtatatgagaccccagctggatggagattcttctcaaatctgatggactcaggacgttgcaatctgtgtggggaagagagctttggcactggctctgaccacctccgagagaaggatggcctgtgggctgtcttggtctggctctccattattgctgcccggaagcagagtgtggaggaaattgtccgagatcactgggccaaatttggccgccactactattgcaggtttgactatgaggggttggatcccaagacgacatattatatcatgagggacctggaggccctggtcacagacaaatccttcattggccagcagtttgctgtggggagccatgtctacagcgtggcgaagacggatagttttgaatacgtggaccctgtggatggcactgtgaccaagaaacagggcctaaggatcattttctcggatgcatcacggctcatcttccggctcagttcctccagtggtgtgcgggccaccctcagactgtacgcagagagctacgagagggatcccagcggccatgaccaggagccacaggcagtgctgagccctctcatagccatcgcactgaaaatatcccagattcatgagagaactggccggaggggacccactgtcatcacctgaatagaggaaagatcactcaccagggccaaagagagtgctcagcgggagatgcttcactgatgccttcttgctacctgtttgtgcctcttatgactttggaaaaacaaaagatattttgcttttgggggatagagggtgggtgggaaaagaaaaaaaatccatttggttttggttttgtcctattcctccaaatgcagcagggcctttagttgtctgttaaagctgcactataatttggtatctacattttatcacacaaaggaacctccccttttgacaacaactgggctaggcagctgttaatcacaacatttgtgcatcacttgtgccaagtgagaaaatgttctaaaatcacaagagagaacagtgccagaatgaaactgaccctaagtcccaggtgcccctgggcaggcagaaggagacactcccagcatggaggagggtttatcttttcatcctaggtcaggtctacaatgggggaaggttttattatagaactcccaacagcccacctcactcctgccacccacccgatggccctgcctcccccatcccatccccaacatccctgtaccaccttctctcacatcttctaaagctttgtacaaatcacaatggtgcacttccaacaaaatatatcaataggtgttttcctctcttattttgtaaatagtattattttagctattaagctggataccttctttcaaattcagccattcagttgtaaagttgggaagaagtttcttgacaagactctgcaattaaatgcttaaaatttggaggggatccttccttgattacatcaagtatgttggtacatgggtttatacaagttcctcttgagaaggcaaaaagaccaccatgtgtgagagctctttgacttggccaataggggcctatcttaatgcacttgtttggacacatttctgatcttatttgtaaaggctgcaaaaggagaggatgaaatgctgtaaaagtaggaaatgaagtggaagctggaagaaaatgtaattggtggtacagctatgggccagatggtggaggggagggtggggacccctgccggcaagcagagtgtcacagctggctttcctcacttgggaaaagggtactgccggtctagcagcctcctctgtactcagccaggacacccagcgcgtgggacctgtttgtgtctgttttgcttccttgggaacggcacagtcactcaccctgccatttgcggaaatgacctggtgcactttgactgttaagcaatgcgttattgctgtagtcaaggttagtgcaagcaaggaaacattcccagtaaggtatttgtttccattttctgtctgtgcttctgtcagaaacttgctaggacatttagtggccaataaaaaagaaattcctaatttcaacctta

SEQ ID NO: 22385 - DNA, 1885 bp, Homo sapiens
  source 1..1885: mol_type = unassigned DNA
gcgcgtcgccgctcttcggttctgctctgtccgccgccatggcccaagctgacatcgcgctgatcggattggccgtcatgggccagaacttaattctgaacatgaatgaccacggctttgtggtctgtgcttttaataggactgtctccaaagttgatgatttcttggccaatgaggcaaagggaaccaaagtggtgggtgcccagtccctgaaagagatggtctccaagctgaagaagccccggcggatcatcctcctggtgaaggctgggcaagctgtggatgatttcatcgagaaattggtaccattgttggatactggtgacatcatcattgacggaggaaattctgaatatagggacaccacaagacggtgccgagacctcaaggccaagggaattttatttgtggggagcggagtcagtggtggagaggaaggggcccggtatggcccatcgctcatgccaggagggaacaaagaagcgtggccccacatcaagaccatcttccaaggcattgctgcaaaagtgggaactggagaaccctgctgtgactgggtgggagatgagggagcaggccacttcgtgaagatggtgcacaacgggatagagtatggggacatgcagctgatctgtgaggcataccacctgatgaaagacgtgctgggcatggcgcaggacgagatggcccaggcctttgaggattggaataagacagagctagactcattcctgattgaaatcacagccaatattctcaagttccaagacaccgatggcaaacacctgctgccaaagatcagggacagcgcggggcagaagggcacagggaagtggaccgccatctccgccctggaatacggcgtacccgtcaccctcattggagaagctgtctttgctcggtgcttatcatctctgaaggatgagagaattcaagctagcaaaaagctgaagggtccccagaagttccagtttgatggtgataagaaatcattcctggaggacattcggaaggcactctacgcttccaagatcatctcttacgctcaaggctttatgctgctaaggcaggcagccaccgagtttggctggactctcaattatggtggcatcgccctgatgtggagagggggctgcatcattagaagtgtattcctaggaaagataaaggatgcatttgatcgaaacccggaacttcagaacctcctactggacgacttctttaagtcagctgttgaaaactgccaggactcctggcggcgggcagtcagcactggggtccaggctggcattcccatgccctgttttaccactgccctctccttctatgacgggtacagacatgagatgcttccagccagcctcatccaggctcagcgggattacttcggggctcacacctatgaactcttggccaaaccagggcagtttatccacaccaactggacaggccatggtggcaccgtgtcatcctcgtcatacaatgcctgatcatgctgctcctgtcaccctccacgattccacagaccaggacattccatgtgcctcatggcactgccacctggccctttgccctattttctgttcagttttttaaaagtgttgtaagagactcctgaggaagacacacagtttatttgtaaagtagctctgtgagagccaccatgccctctgcccttgcctcttgggactgaccaggagctgctcatgtgcgtgagagtgggaaccatctccttgcggcagtggcttccgcgtgccccgtgtgctggtgcggttcccatcacgcagacaggaagggtgtttgcgcactctgatcaactggaacctctgtatcatgcggctgaattccctttttcctttactcaataaaagctacatcagactga

SEQ ID NO: 22386 - DNA, 1959 bp, Homo sapiens
  source 1..1959: mol_type = unassigned DNA
atggcccagtgagtgactcgccaggggcagcccggctcggcctcagcgggcggggaactctttgggggtcgagatctccctcgttctctccgacgcctcccaccctgggggtcgcctgagctcacttggggctctgtgaccctggccctacggcgtctcgggcccagagctccttccctgcgggcccggccccctgccctctcggccgcgcagagctgacatcgcgctgatcggattggccgtcatgggccagaacttaattctgaacatgaatgaccacggctttgtggtctgtgcttttaataggactgtctccaaagttgatgatttcttggccaatgaggcaaagggaaccaaagtggtgggtgcccagtccctgaaagagatggtctccaagctgaagaagccccggcggatcatcctcctggtgaaggctgggcaagctgtggatgatttcatcgagaaattggtaccattgttggatactggtgacatcatcattgacggaggaaattctgaatatagggacaccacaagacggtgccgagacctcaaggccaagggaattttatttgtggggagcggagtcagtggtggagaggaaggggcccggtatggcccatcgctcatgccaggagggaacaaagaagcgtggccccacatcaagaccatcttccaaggcattgctgcaaaagtgggaactggagaaccctgctgtgactgggtgggagatgagggagcaggccacttcgtgaagatggtgcacaacgggatagagtatggggacatgcagctgatctgtgaggcataccacctgatgaaagacgtgctgggcatggcgcaggacgagatggcccaggcctttgaggattggaataagacagagctagactcattcctgattgaaatcacagccaatattctcaagttccaagacaccgatggcaaacacctgctgccaaagatcagggacagcgcggggcagaagggcacagggaagtggaccgccatctccgccctggaatacggcgtacccgtcaccctcattggagaagctgtctttgctcggtgcttatcatctctgaaggatgagagaattcaagctagcaaaaagctgaagggtccccagaagttccagtttgatggtgataagaaatcattcctggaggacattcggaaggcactctacgcttccaagatcatctcttacgctcaaggctttatgctgctaaggcaggcagccaccgagtttggctggactctcaattatggtggcatcgccctgatgtggagagggggctgcatcattagaagtgtattcctaggaaagataaaggatgcatttgatcgaaacccggaacttcagaacctcctactggacgacttctttaagtcagctgttgaaaactgccaggactcctggcggcgggcagtcagcactggggtccaggctggcattcccatgccctgttttaccactgccctctccttctatgacgggtacagacatgagatgcttccagccagcctcatccaggctcagcgggattacttcggggctcacacctatgaactcttggccaaaccagggcagtttatccacaccaactggacaggccatggtggcaccgtgtcatcctcgtcatacaatgcctgatcatgctgctcctgtcaccctccacgattccacagaccaggacattccatgtgcctcatggcactgccacctggccctttgccctattttctgttcagttttttaaaagtgttgtaagagactcctgaggaagacacacagtttatttgtaaagtagctctgtgagagccaccatgccctctgcccttgcctcttgggactgaccaggagctgctcatgtgcgtgagagtgggaaccatctccttgcggcagtggcttccgcgtgccccgtgtgctggtgcggttcccatcacgcagacagg

SEQ ID NO: 22387 - DNA, 1474 bp, Homo sapiens
  source 1..1474: mol_type = unassigned DNA
actcgtcctccgcgcgtcgccgctcttcggttctgctctgtccgccgccatggcccaagctgacatcgcgctgatcggattggccgtcatgggccagaacttaattctgaacatgaatgaccacggctttgtggtctgtgcttttaataggactgtctccaaagttgatgatttcttggccaatgaggcaaagggaaccaaagtggtgggtgcccagtccctgaaagagatggtctccaagctgaagaagccccggcggatcatcctcctggtgaaggctgggcaagctgtggatgatttcatcgagaaattgagacggtgccgagacctcaaggccaagggaattttatttgtggggagcggagtcagtggtggagaggaaggggcccggtatggcccatcgctcatgccaggagggaacaaagaagcgtggccccacatcaagaccatcttccaaggcattgctgcaaaagtgggaactggagaaccctgctgtgactgggtgggagatgagggagcaggccacttcgtgaagatggtgcacaacgggatagagtatggggacatgcagctgatctgtgaggcataccacctgatgaaagacgtgctgggcatggcgcaggacgagatggcccaggcctttgaggattggaataagacagagctagactcattcctgattgaaatcacagccaatattctcaagttccaagacaccgatggcaaacacctgctgccaaagatcagggacagcgcggggcagaagggcacagggaagtggaccgccatctccgccctggaatacggcgtacccgtcaccctcattggagaagctgtctttgctcggtgcttatcatctctgaaggatgagagaattcaagctagcaaaaagctgaagggtccccagaagttccagtttgatggtgataagaaatcattcctggaggacattcggaaggcactctacgcttccaagatcatctcttacgctcaaggctttatgctgctaaggcaggcagccaccgagtttggctggactctcaattatggtggcatcgccctgatgtggagagggggctgcatcattagaagtgtattcctaggaaagataaaggatgcatttgatcgaaacccggaacttcagaacctcctactggacgacttctttaagtcagctgttgaaaactgccaggactcctggcggcgggcagtcagcactggggtccaggctggcattcccatgccctgttttaccactgccctctccttctatgacgggtacagacatgagatgcttccagccagcctcatccaggctcagcgggattacttcggggctcacacctatgaactcttggccaaaccagggcagtttatccacaccaactggacaggccatggtggcaccgtgtcatcctcgtcatacaatgcctgatcatgctgctcctgtcaccctccacgattccacagacca

SEQ ID NO: 22388 - DNA, 1833 bp, Homo sapiens
  source 1..1833: mol_type = unassigned DNA
actcgtcctccgcgcgtcgccgctcttcggttctgctctgtccgccgccatggcccaagctgacatcgcgctgatcggattggccgtcatgggccagaacttaattctgaacatgaatgaccacggctttgtggtctgtgcttttaataggactgtctccaaagttgatgatttcttggccaatgaggcaagctgtggatgatttcatcgagaaattggtaccattgttggatactggtgacatcatcattgacggaggaaattctgaatatagggacaccacaagacggtgccgagacctcaaggccaagggaattttatttgtggggagcggagtcagtggtggagaggaaggggcccggtatggcccatcgctcatgccaggagggaacaaagaagcgtggccccacatcaagaccatcttccaaggcattgctgcaaaagtgggaactggagaaccctgctgtgactgggtgggagatgagggagcaggccacttcgtgaagatggtgcacaacgggatagagtatggggacatgcagctgatctgtgaggcataccacctgatgaaagacgtgctgggcatggcgcaggacgagatggcccaggcctttgaggattggaataagacagagctagactcattcctgattgaaatcacagccaatattctcaagttccaagacaccgatggcaaacacctgctgccaaagatcagggacagcgcggggcagaagggcacagggaagtggaccgccatctccgccctggaatacggcgtacccgtcaccctcattggagaagctgtctttgctcggtgcttatcatctctgaaggatgagagaattcaagctagcaaaaagctgaagggtccccagaagttccagtttgatggtgataagaaatcattcctggaggacattcggaaggcactctacgcttccaagatcatctcttacgctcaaggctttatgctgctaaggcaggcagccaccgagtttggctggactctcaattatggtggcatcgccctgatgtggagagggggctgcatcattagaagtgtattcctaggaaagataaaggatgcatttgatcgaaacccggaacttcagaacctcctactggacgacttctttaagtcagctgttgaaaactgccaggactcctggcggcgggcagtcagcactggggtccaggctggcattcccatgccctgttttaccactgccctctccttctatgacgggtacagacatgagatgcttccagccagcctcatccaggctcagcgggattacttcggggctcacacctatgaactcttggccaaaccagggcagtttatccacaccaactggacaggccatggtggcaccgtgtcatcctcgtcatacaatgcctgatcatgctgctcctgtcaccctccacgattccacagaccaggacattccatgtgcctcatggcactgccacctggccctttgccctattttctgttcagttttttaaaagtgttgtaagagactcctgaggaagacacacagtttatttgtaaagtagctctgtgagagccaccatgccctctgcccttgcctcttgggactgaccaggagctgctcatgtgcgtgagagtgggaaccatctccttgcggcagtggcttccgcgtgccccgtgtgctggtgcggttcccatcacgcagacaggaagggtgtttgcgcactctgatcaactggaacctctgtatcatgcggctgaattccctttttcctttactcaataaaagctacatcagactgatgctctttctccagattcttagtctcacctcg

SEQ ID NO: 22389 - DNA, 3180 bp, Homo sapiens
  source 1..3180: mol_type = unassigned DNA
attctatgctgcagcctaagcatcattcctcttctcttcttagtggagataaaattacccactgctctccttacatttactttgtccatatttgctcctatgctctaggctcgtgcacaacaaacacagtgtgggcccttaccctagaagccaacttctcatgacctttctctatctccagaatccatgcagtgggaatgaaggtaaaagaaggttttcatgggatccagctgagagctctacggggaaaatggatctgaggagccatgtgctccatctcttttattttacaggtagagactaggggtatagagtgaggtgaattaccgcagtgacccacacattgttggcagacctaggattagaactctgtcttcctggttcccagcttggtgcttttgaaagcatacttgctgctttcttaccggcctggtgtctgccactttgggacagagtgtggacttgctcacctgccccatttcttagggattctcattctgtgtttgagcaagaatattcttattctggaaagaaccacataccacaggattctgggtgagcataaggaagattgtcttggggatctgacttagctcacgtatagtggctatgatgaattcagtgtcttattttttgcatatgtatatttttagtctaatattgcctgggtgtctgagcaagtctagatgaatttaattgctctcatttttcccctgcccctcttcctttggtctctcttttaggaaatgtttttctttcaacattcgtttcattcattatttactcattcggccaaccaacatttattgagtgccttccctgtatcagggacaggggcttacaaagtagaatttgatcccacctctgccctcagtagctcagtgtctaatggaggtagtgatgttcattaagcgtcgccagatactgtgctaggtgctgtgcctgttctctctcgcttgttcctcacacacttgagaaggccgaagctgattcatagcttggaaggcaggggccttggatttgaacccaggcctgaccaatggcagaacctatcagatgtgtggacagatgacattgcctttctttctttggatatatcaaaatcagccagcaggcaggaactcccattttgagcaagcaatgtgcaggaatgatagggtatacagagaggaacaggagatggcccctgacttccagcatgtgtctgatggacatccaggctgcaggcatcatggtgctgtctagagagatgagccaggtgcccagagcccatgggccaatgctgccctttcttgagcatgccaaacaaagcggttggtgtgttagaggcacagtctcctccactctaagtaaaaatcagcatgagtcctagcccacatttccctagtgagtataccaaagatatctatgaactggcagtcatcagtgacttcctaaggttccggaaatgcatctcttactcaggagtaagcaatgatgtgcctgcggctttacgagttctcacagaatgactttctggacccaaatgttttttctgcttcaggactgtgaaggccttattgttcgctctgccaccaaggtgaccgctgatgtcatcaacgcagctgagaaactccaggtggtgggcagggctggcacaggtgtggacaatgtggatctggaggccgcaacaaggaagggcatcttggttatgaacacccccaatgggaacagcctcagtgccgcagaactcacttgtggaatgatcatgtgcctggccaggcagattccccaggcgacggcttcgatgaaggacggcaaatgggagcggaagaagttcatgggaacagagctgaatggaaagaccctgggaattcttggcctgggcaggattgggagagaggtagctacccggatgcagtcctttgggatgaagactatagggtatgaccccatcatttccccagaggtctcggcctcctttggtgttcagcagctgcccctggaggagatctggcctctctgtgatttcatcactgtgcacactcctctcctgccctccacgacaggcttgctgaatgacaacacctttgcccagtgcaagaagggggtgcgtgtggtgaactgtgcccgtggagggatcgtggacgaaggcgccctgctccgggccctgcagtctggccagtgtgccggggctgcactggacgtgtttacggaagagccgccacgggaccgggccttggtggaccatgagaatgtcatcagctgtccccacctgggtgccagcaccaaggaggctcagagccgctgtggggaggaaattgctgttcagttcgtggacatggtgaaggggaaatctctcacgggggttgtgaatgcccaggcccttaccagtgccttctctccacacaccaagccttggattggtctggcagaagctctggggacactgatgcgagcctgggctgggtcccccaaagggaccatccaggtgataacacagggaacatccctgaagaatgctgggaactgcctaagccccgcagtcattgtcggcctcctgaaagaggcttccaagcaggcggatgtgaacttggtgaacgctaagctgctggtgaaagaggctggcctcaatgtcaccacctcccacagccctgctgcaccaggggagcaaggcttcggggaatgcctcctggccgtggccctggcaggcgccccttaccaggctgtgggcttggtccaaggcactacgcctgtactgcaggggctcaatggagctgtcttcaggccagaagtgcctctccgcagggacctgcccctgctcctattccggactcagacctctgaccctgcaatgctgcctaccatgattggcctcctggcagaggcaggcgtgcggctgctgtcctaccagacttcactggtgtcagatggggagacctggcacgtcatgggcatctcctccttgctgcccagcctggaagcgtggaagcagcatgtgactgaagccttccagttccacttctaaccttggagctcactggtccctgcctctggggcttttctgaagaaacccacccactgtgatcaatagggagagaaaatccacattcttgggctgaacgcgggcctctgacactgcttacactgcactctgaccctgtagtacagcaataaccgtctaataaagagcctaccccc

SEQ ID NO: 22390 - DNA, 1913 bp, Homo sapiens
  source 1..1913: mol_type = unassigned DNA
gaggaggaggaggagatgactggggagcgggagctggagaatactgcccagttactctagcgcgccaggccgaaccgcagcttcttggcttaggtacttctactcacagcggccgattccgaggccaactccagcaatggcttttgcaaatctgcggaaagtgctcatcagtgacagcctggacccttgctgccggaagatcttgcaagatggagggctgcaggtggtggaaaagcagaaccttagcaaagaggagctgatagcggagctgcaggactgtgaaggccttattgttcgctctgccaccaaggtgaccgctgatgtcatcaacgcagctgagaaactccaggtggtgggcagggctggcacaggtgtggacaatgtggatctggaggccgcaacaaggaagggcatcttggttatgaacacccccaatgggaacagcctcagtgccgcagaactcacttgtggaatgatcatgtgcctggccaggcagattccccaggcgacggcttcgatgaaggacggcaaatgggagcggaagaagttcatgggaacagagctgaatggaaagaccctgggaattcttggcctgggcaggattgggagagaggtagctacccggatgcagtcctttgggatgaagactatagggtatgaccccatcatttccccagaggtctcggcctcctttggtgttcagcagctgcccctggaggagatctggcctctctgtgatttcatcactgtgcacactcctctcctgccctccacgacaggcttgctgaatgacaacacctttgcccagtgcaagaagggggtgcgtgtggtgaactgtgcccgtggagggatcgtggacgaaggcgccctgctccgggccctgcagtctggccagtgtgccggggctgcactggacgtgtttacggaagagccgccacgggaccgggccttggtggaccatgagaatgtcatcagctgtccccacctgggtgccagcaccaaggaggctcagagccgctgtggggaggaaattgctgttcagttcgtggacatggtgaaggggaaatctctcacgggggttgtgaatgcccaggcccttaccagtgccttctctccacacaccaagccttggattggtctggcagaagctctggggacactgatgcgagcctgggctgggtcccccaaagggaccatccaggtgataacacagggaacatccctgaagaatgctgggaactgcctaagccccgcagtcattgtcggcctcctgaaagaggcttccaagcaggcggatgtgaacttggtgaacgctaagctgctggtgaaagaggctggcctcaatgtcaccacctcccacagccctgctgcaccaggggagcaaggcttcggggaatgcctcctggccgtggccctggcaggcgccccttaccaggctgtgggcttggtccaaggcactacgcctgtactgcaggggctcaatggagctgtcttcaggccagaagtgcctctccgcagggacctgcccctgctcctattccggactcagacctctgaccctgcaatgctgcctaccatgattggcctcctggcagaggcaggcgtgcggctgctgtcctaccagacttcactggtgtcagatggggagacctggcacgtcatgggcatctcctccttgctgcccagcctggaagcgtggaagcagcatgtgactgaagccttccagttccacttctaaccttggagctcactggtccctgcctctggggcttttctgaagaaacccacccactgtgatcaatagggagagaaaatccacattcttgggctgaacgcgggcctctgacactgcttacactgcactctgaccctgtagtacagcaataaccgtctaataaagagcctacccccaa

SEQ ID NO: 22391 - DNA, 1448 bp, Homo sapiens
  source 1..1448: mol_type = unassigned DNA
gcagcttcttggcttaggtacttctactcacagcggccgattccgaggccaactccagcaatggcttttgcaaatctgcggaaagtgctcatcagtgacagcctggacccttgctgccggaagatcttgcaagatggagggctgcaggtggtggaaaagcagaaccttagcaaagaggagctgatagcggagctgcaggactgtgaaggccttattgttcgctctgccaccaaggtgaccgctgatgtcatcaacgcagctgagaaactccaggtggtgggcagggctggcacaggtgtggacaatgtggatctggaggccgcaacaaggaagggcatcttggttatgaacacccccaatgggaacagcctcagtgccgcagaactcacttgtggaatgatcatgtgcctggccaggcagattccccaggcgacggcttcgatgaaggacggcaaatgggagcggaagaagttcatgggaacagagctgaatggaaagaccctgggaattcttggcctgggcaggattgggagagaggtagctacccggatgcagtcctttgggatgaagactatagggtatgaccccatcatttccccagaggtctcggcctcctttggtgttcagcagctgcccctggaggagatctggcctctctgtgatttcatcactgtgcacactcctctcctgccctccacgacaggcttgctgaatgacaacacctttgcccagtgcaagaagggggtgcgtgtggtgaactgtgcccgtggagggatcgtggacgaaggcgccctgctccgggccctgcagtctggccagtgtgccggggctgcactggacgtgtttacggaagagccgccacgggaccgggccttggtggaccatgagaatgtcatcagctgtccccacctgggtgccagcaccaaggaggctcagagccgctgtggggaggaaattgctgttcagttcgtggacatggtgaaggggaaatctctcacgggggttgtgaatgcccaggcccttaccagtgccttctctccacacaccaagccttggattggtctggcagaagctctggggacactgatgcgagcctgggctgggtcccccaaagggaccatccaggtgataacacagggcctcctggcagaggcaggcgtgcggctgctgtcctaccagacttcactggtgtcagatggggagacctggcacgtcatgggcatctcctccttgctgcccagcctggaagcgtggaagcagcatgtgactgaagccttccagttccacttctaaccttggagctcactggtccctgcctctggggcttttctgaagaaacccacccactgtgatcaatagggagagaaaatccacattcttgggctgaacgcgggcctctgacactgcttacactgcactctgaccctgtagtacagcaataaccgtct

SEQ ID NO: 22392 - DNA, 2196 bp, Homo sapiens
  source 1..2196: mol_type = unassigned DNA
agttactctagcgcgccaggccgaaccgcagcttcttggcttaggtacttctactcacagcggccgattccgaggccaactccagcaatggcttttgcaaatctgcggaaagtgctcatcagtgacagcctggacccttgctgccggaagatcttgcaagatggagggctgcaggtggtggaaaagcagaaccttagcaaagaggagctgatagcggagctgcaggactgtgaaggccttattgttcgctctgccaccaaggtgaccgctgatgtcatcaacgcagctgagaaactccaggtggtgggcagggctggcacaggtgtggacaatgtggatctggaggccgcaacaaggaagggcatcttggttatgaacacccccaatgggaacagcctcagtgccgcagaactcacttgtggaatgatcatgtgcctggccaggcctgaaaccttccgggaccaagaaattacttttcccatggcgagacctgctttccctcctgctggaggaggatctgggggaatttacctctgctctaactcctccctgcagtttccatctgagctctctggtattcactgatattcactggaccagctttgtttaaaggaatcggtgaaatgctgtggtttaaaagaagctccccattgtcaactgctcaccatgacctcactcatcaaaggtgcatcaaaactaggaaacacgcacaccctattgggaaggaatgcgttcgtttcatcagactgttcctagcagggaggacggtaggagagtgcagattccccaggcgacggcttcgatgaaggacggcaaatgggagcggaagaagttcatgggaacagagctgaatggaaagaccctgggaattcttggcctgggcaggattgggagagaggtagctacccggatgcagtcctttgggatgaagactatagggtatgaccccatcatttccccagaggtctcggcctcctttggtgttcagcagctgcccctggaggagatctggcctctctgtgatttcatcactgtgcacactcctctcctgccctccacgacaggcttgctgaatgacaacacctttgcccagtgcaagaagggggtgcgtgtggtgaactgtgcccgtggagggatcgtggacgaaggcgccctgctccgggccctgcagtctggccagtgtgccggggctgcactggacgtgtttacggaagagccgccacgggaccgggccttggtggaccatgagaatgtcatcagctgtccccacctgggtgccagcaccaaggaggctcagagccgctgtggggaggaaattgctgttcagttcgtggacatggtgaaggggaaatctctcacgggggttgtgaatgcccaggcccttaccagtgccttctctccacacaccaagccttggattggtctggcagaagctctggggacactgatgcgagcctgggctgggtcccccaaagggaccatccaggtgataacacagggaacatccctgaagaatgctgggaactgcctaagccccgcagtcattgtcggcctcctgaaagaggcttccaagcaggcggatgtgaacttggtgaacgctaagctgctggtgaaagaggctggcctcaatgtcaccacctcccacagccctgctgcaccaggggagcaaggcttcggggaatgcctcctggccgtggccctggcaggcgccccttaccaggctgtgggcttggtccaaggcactacgcctgtactgcaggggctcaatggagctgtcttcaggccagaagtgcctctccgcagggacctgcccctgctcctattccggactcagacctctgaccctgcaatgctgcctaccatgattggcctcctggcagaggcaggcgtgcggctgctgtcctaccagacttcactggtgtcagatggggagacctggcacgtcatgggcatctcctccttgctgcccagcctggaagcgtggaagcagcatgtgactgaagccttccagttccacttctaaccttggagctcactggtccctgcctctggggcttttctgaagaaacccacccactgtgatcaatagggagagaaaatccacattcttgggctgaacgcgggcctctgacactgcttacactgcactctgaccctgtagtacagcaataaccgtctaataaagagcctaccccc

SEQ ID NO: 22393 - DNA, 4887 bp, Homo sapiens
  source 1..4887: mol_type = unassigned DNA
cagcggccgggaaggggcggtgcgggaggcggggtgtggggcggtagtgtgggccctgttcctgcccgcgcggtgttccgcattctgcaagcctccggagcgcacgtcggcagtcggctccctcgttgaccgaatcaccgacctctctccccagctgtatttccaaaatgtcgctttctaacaagctgacgctggacaagctggacgttaaagggaagcgggtcgttatgagagtcgacttcaatgttcctatgaagaacaaccagataacaaacaaccagaggattaaggctgctgtcccaagcatcaaattctgcttggacaatggagccaagtcggtagtccttatgagccacctaggccggcctgatggtgtgcccatgcctgacaagtactccttagagccagttgctgtagaactcaaatctctgctgggcaaggatgttctgttcttgaaggactgtgtaggcccagaagtggagaaagcctgtgccaacccagctgctgggtctgtcatcctgctggagaacctccgctttcatgtggaggaagaagggaagggaaaagatgcttctgggaacaaggttaaagccgagccagccaaaatagaagctttccgagcttcactttccaagctaggggatgtctatgtcaatgatgcttttggcactgctcacagagcccacagctccatggtaggagtcaatctgccacagaaggctggtgggtttttgatgaagaaggagctgaactactttgcaaaggccttggagagcccagagcgacccttcctggccatcctgggcggagctaaagttgcagacaagatccagctcatcaataatatgctggacaaagtcaatgagatgattattggtggtggaatggcttttaccttccttaaggtgctcaacaacatggagattggcacttctctgtttgatgaagagggagccaagattgtcaaagacctaatgtccaaagctgagaagaatggtgtgaagattaccttgcctgttgactttgtcactgctgacaagtttgatgagaatgccaagactggccaagccactgtggcttctggcatacctgctggctggatgggcttggactgtggtcctgaaagcagcaagaagtatgctgaggctgtcactcgggctaagcagattgtgtggaatggtcctgtgggggtatttgaatgggaagcttttgcccggggaaccaaagctctcatggatgaggtggtgaaagccacttctaggggctgcatcaccatcataggtggtggagacactgccacttgctgtgccaaatggaacacggaggataaagtcagccatgtgagcactgggggtggtgccagtttggagctcctggaaggtaaagtccttcctggggtggatgctctcagcaatatttagtactttcctgccttttagttcctgtgcacagcccctaagtcaacttagcattttctgcatctccacttggcattagctaaaaccttccatgtcaagattcagctagtggccaagagatgcagtgccaggaacccttaaacagttgcacagcatctcagctcatcttcactgcaccctggatttgcatacattcttcaagatcccatttgaattttttagtgactaaaccattgtgcattctagagtgcatatatttatattttgcctgttaaaaagaaagtgagcagtgttagcttagttctcttttgatgtaggttattatgattagctttgtcactgtttcactactcagcatggaaacaagatgaaattccatttgtaggtagtgagacaaaattgatgatccattaagtaaacaataaaagtgtccattgaaaccgtgatttttttttttttcctgtcatactttgttaggaagggtgagaatagaatcttgaggaacggatcagatgtctatattgctgaatgcaagaagtggggcagcagcagtggagagatgggacaattagataaatgtccattctttatcaagggcctactttatggcagacattgtgctagtgcttttattctaacttttatttttatcagttacacatgatcataatttaaaaagtcaaggcttataacaaaaaagccccagcccattcctcccattcaagattcccactccccagaggtgaccactttcaactcttgagtttttcaggtatatacctccatgtttctaagtaatatgcttatattgttcacttcttttttttttattttttaaagaaatctatttcataccatggaggaaggctctgttccacatatatttccacttcttcattctctcggtatagttttgtcacaattatagattagatcaaaagtctacataactaatacagctgagctatgtagtatgctatgattaaatttacttatgtaacttttattgtctttggcattaacagtgtttcaaaaaattttctgtgtatacccatcagtgattcattcccaaatcttctagaagcataagtgtctcaatatattaaaacatattgaataatccttgttagagttatccctgcaggagtccttagtgctcctttatccaatttgtacttgatgccctctaggcagggtgtacagctagctgttgctctggtatttcctataaccttcttggggatttcttttacctcctgtgttagactcctgttttctggattcccccttttccctctttcttggtctactttttgtagaacacaagactctactagcttcctgagaaagggtgcctgggaggcaaaatctctaagactttgtaagtctgaaaatgtctttattcgacccttatacttgattcctagtttggctatatatagaattttagcctgagtatcactttttgagactcgaagccactgtttcattgtcactattgagaatctaaatggccattcggattctttcatcatctttataattttaccttcctatttctttcctgtccttttaatggagttttgggagagagcagaggtaaacatgatttgaaaaagccatgtctgaccagaaattctgtgctggaaagatatgtatttcacctttagggacaaagaaataaacttttggacaggaccacagagctagtaagtaacagcagggattcaagtccaggtttgtctggttccagtggctgatgcttttccaatgtgcctccgtccctgacatgatgcttctaggctatagatgcttctagactctatccctgacatgatgcttctagactattttgtttaaccctggatagaatagcaaaagaaaattttggtggttgctctaaacaaaacagaaatttgaaagctcaagttttttcttcatttgtattttagttaatactgtacccatatttgtagttaattttaaattgtaccatgtttctgcatacctctatgggtactcaggaattctagtccaatttttgtgactttttcctactgattacctttcctccaacgttttaaaaattatttcaaatggaactgaaagaagcataaactcccataaacccagcacctagactctacaattgccaacattatctatccaacaatctctgactgtaccttttaagtactttctactggactgtttccaggatcacccctcatttatttgggttgttaacctaaagaatgaatgggggaatctccagtcataaacaacttgtcaattaggcaaatatttgagttccttctatgtgcttaaagacgtgatagagggaatataagagcatttatgttctgaaggaatttttaacctaaccaaagaagatagtagataacttgtgtgcatataagctagaacagtataaggggccgggcatggtggcttacgcctgtaatcccaggactttgggaggccaaggcgggcagatcacctgtcaggagtttgggaccagcctggccaacatggtgaaaccccgtttctaccaaaaatacaaaaattagccgggcgtggtggcgtgtgccactgtagtcccagctattcagaaggctgaggcaggagaatcacttgaacccgggaggtggaggttgcagtgagctgagatcacgctactgcattcctgcttgggcgacagagtgagactctgcctcaaaacaaaaaccccacaaaacagtataaggatgtgctttctaatttggaattatgaattattggtaaaatattgcaaaggtgtatgctttaagttgtaaattcacctttaaccctagactatatatgtgtgtttatatgcagaaaaaaataattcccatgtcgtaagtgaacaatttggttctttagctcagtgttttcctgttttcttcatttccaaaatttccctctagcacaggggtttacacatgatcaaaaaggagtatacaatgaagacaccttcctcagtcccctacctaccagtttccctccccagaagcaacctctggaagaccagtttctttcaatctaaggctatttaatatacattaagaggccgggcgcagtggctcacgcctgtaatcccaacaacactttgggaggcccaggcaggcgggtcatgaggtcaggagattgagaccatcctggctaacacggtgaaaccctgtctctactaaaaatacaaaaaattagctgggcgtgatggtgggcgcctgtagtcccagctactcgggaggctgaggcaggagaatggcgtgaacctgggaagcggagctcgcagtgagccgagatcacgccactgcactccagcctgggcaacagtgagactctgcataaagagcatacccatgtgtgtacctatctatctatctatctatctatctatctatctatctatctgtatatagatatattaaaatgtaaatggtggcat

SEQ ID NO: 22394 - DNA, 1366 bp, Homo sapiens
  source 1..1366: mol_type = unassigned DNA
attctgcaagcctccggagcgcacgtcggcagtcggctccctcgttgaccgaatcaccgacctctctccccagctgtatttccaaaatgtcgctttctaacaagctgacgctggacaagctggacgttaaagggaagcgggtcgttatgagagtcgacttcaatgttcctatgaagaacaaccagataacaaacaaccagaggattaaggctgctgtcccaagcatcaaattctgcttggacaatggagccaagtcggtagtccttatgagccacctaggccggcctgatggtcgacccttcctggccatcctgggcggagctaaagttgcagacaagatccagctcatcaataatatgctggacaaagtcaatgagatgattattggtggtggaatggcttttaccttccttaaggtgctcaacaacatggagattggcacttctctgtttgatgaagagggagccaagattgtcaaagacctaatgtccaaagctgagaagaatggtgtgaagattaccttgcctgttgactttgtcactgctgacaagtttgatgagaatgccaagactggccaagccactgtggcttctggcatacctgctggctggatgggcttggactgtggtcctgaaagcagcaagaagtatgctgaggctgtcactcgggctaagcagattgtgtggaatggtcctgtgggggtatttgaatgggaagcttttgcccggggaaccaaagctctcatggatgaggtggtgaaagccacttctaggggctgcatcaccatcataggtggtggagacactgccacttgctgtgccaaatggaacacggaggataaagtcagccatgtgagcactgggggtggtgccagtttggagctcctggaaggtaaagtccttcctggggtggatgctctcagcaatatttagtactttcctgccttttagttcctgtgcacagcccctaagtcaacttagcattttctgcatctccacttggcattagctaaaaccttccatgtcaagattcagctagtggccaagagatgcagtgccaggaacccttaaacagttgcacagcatctcagctcatcttcactgcaccctggatttgcatacattcttcaagatcccatttgaattttttagtgactaaaccattgtgcattctagagtgcatatatttatattttgcctgttaaaaagaaagtgagcagtgttagcttagttctcttttgatgtaggttattatgattagctttgtcactgtttcactactcagcatggaaacaagatgaaattccatttgtaggtagtgagacaaaattgatgatccattaagtaaacaataaaagtgtccattg

SEQ ID NO: 22395 - DNA, 1405 bp, Homo sapiens
  source 1..1405: mol_type = unassigned DNA
attctgcaagcctccggagcgcacgtcggcagtcggctccctcgttgaccgaatcaccgacctctctccccagctgtatttccaaaatgtcgctttctaacaagctgacgctggacaagctggacgttaaagggaagcgggtcgttatgagagtcgacttcaatgttcctatgaagaacaaccagataacaaacaaccagaggattaaggctgctgtcccaagcatcaaattctgcttggacaatggagccaagtcggtagtccttatgagccacctaggccggcctgatggtgtgcccatgcctgacaagtactccttagagccagttgctgtagaactcaaatctctgctgggcaaggatgttctgttcttgaaggactgtgtaggcccagaagtggagaaagcctggagaacctccgctttcatgtggaggaagaagggaagggaaaagatgcttctgggaacaaggttaaagccgagccagccaaaatagaagctttccgagcttcactttccaagctaggggatgtctatgtcaatgatgcttttggcactgctcacagagcccacagctccatggtaggagtcaatctgccacagaaggctggtgggtttttgatgaagaaggagctgaactactttgcaaaggccttggagagcccagagcgacccttcctggccatcctgggcggagctaaagttgcagacaagatccagctcatcaataatatgctggacaaagtcaatgagatgattattggtggtggaatggcttttaccttccttaaggtgctcaacaacatggagattggcacttctctgtttgatgaagagggagccaagattgtcaaagacctaatgtccaaagctgagaagaatggtgtgaagattaccttgcctgttgactttgtcactgctgacaagtttgatgagaatgccaagactggccaagccactgtggcttctggcatacctgctggctggatgggcttggactgtggtcctgaaagcagcaagaagtatgctgaggctgtcactcgggctaagcagattgtgtggaatggtcctgtgggggtatttgaatgggaagcttttgcccggggaaccaaagctctcatggatgaggtggtgaaagccacttctaggggctgcatcaccatcataggtggtggagacactgccacttgctgtgccaaatggaacacggaggataaagtcagccatgtgagcactgggggtggtgccagtttggagctcctggaaggtaaagtccttcctggggtggatgctctcagcaatatttagtactttcctgccttttagttcctgtgcacagcccctaagtcaacttagcattttctgcatctccacttggcattagctaaaaccttccatgtcaagatt

SEQ ID NO: 22396 - DNA, 1769 bp, Homo sapiens
  source 1..1769: mol_type = unassigned DNA
aacctggataccttctacttatttaggctgaggacaggaagttacatggttccctgattattaatgtatttcttttgaacagagagtcacattgtaggcctacttttttggaggtgcttaggcagccatgtggtgtcagctcaattcctttttgtttcaacgtggtggttgctggcggtgtttccggaatggggcttcctgagtagtggctgcctcatttgtcgtctttgtcctgcagaagtgaactatggtatttgctgactcttctggtccactggtttggattgccaagggaaattgatttgttgagagtcgacttcaatgttcctatgaagaacaaccagataacaaacaaccagaggattaaggctgctgtcccaagcatcaaattctgcttggacaatggagccaagtcggtagtccttatgagccacctaggccggcctgatggtgtgcccatgcctgacaagtactccttagagccagttgctgtagaactcaaatctctgctgggcaaggatgttctgttcttgaaggactgtgtaggcccagaagtggagaaagcctgtgccaacccagctgctgggtctgtcatcctgctggagaacctccgctttcatgtggaggaagaagggaagggaaaagatgcttctgggaacaaggttaaagccgagccagccaaaatagaagctttccgagcttcactttccaagctaggggatgtctatgtcaatgatgcttttggcactgctcacagagcccacagctccatggtaggagtcaatctgccacagaaggctggtgggtttttgatgaagaaggagctgaactactttgcaaaggccttggagagcccagagcgacccttcctggccatcctgggcggagctaaagttgcagacaagatccagctcatcaataatatgctggacaaagtcaatgagatgattattggtggtggaatggcttttaccttccttaaggtgctcaacaacatggagattggcacttctctgtttgatgaagagggagccaagattgtcaaagacctaatgtccaaagctgagaagaatggtgtgaagattaccttgcctgttgactttgtcactgctgacaagtttgatgagaatgccaagactggccaagccactgtggcttctggcatacctgctggctggatgggcttggactgtggtcctgaaagcagcaagaagtatgctgaggctgtcactcgggctaagcagattgtgtggaatggtcctgtgggggtatttgaatgggaagcttttgcccggggaaccaaagctctcatggatgaggtggtgaaagccacttctaggggctgcatcaccatcataggtggtggagacactgccacttgctgtgccaaatggaacacggaggataaagtcagccatgtgagcactgggggtggtgccagtttggagctcctggaaggtaaagtccttcctggggtggatgctctcagcaatatttagtactttcctgccttttagttcctgtgcacagcccctaagtcaacttagcattttctgcatctccacttggcattagctaaaaccttccatgtcaagattcagctagtggccaagagatgcagtgccaggaacccttaaacagttgcacagcatctcagctcatcttcactgcaccctggatttgcatacattcttcaagatcccatttgaattttttagtgactaaaccattgtgcattctagagtgcatatatttatattttgcctgtt

SEQ ID NO: 22397 - DNA, 1688 bp, Homo sapiens
  source 1..1688: mol_type = unassigned DNA
aacagtggccgttgtgctggagacagtgaggagaagaaaggggcgggacaagggcaaaggcgttagaagtcaccaccgacccagcccctcaacagcaagttggttcttcagcattaagatccaggtgtcagcctatgtctttatattgtcaagatgtctctttctaagaagttgactttagacaaactggatgttagagggaagcgagtcatcatgagagtagacttcaatgttcccatgaagaagaaccagattacaaacaaccagaggatcaaggcttccatcccaagcatcaagtactgcctggacaatggagccaaggcagtagttcttatgagtcatctaggtcggcctgatggtgttcccatgcctgacaaatattccttagcacctgttgctgttgagctcaaatccttgctgggcaaggatgttctgttcctgaaggactgtgtaggcgcagaagtggagaaagcctgtgccaacccagctcctggttcagtcatcctgctggagaacctgcgctttcatgtggaggaagaagggaagggccaagatccctctggaaagaagattaaagctgagccagataaaatagaagccttccgagcatcactttccaagctaggggacgtctatgtcaatgatgcttttggcactgcacaccgcgctcatagttccatggtgggagtgaatctgccccataaagcatccggattcttgatgaagaaggaactagattactttgctaaagccttggaaaacccagtgagaccctttctggctatacttggtggagccaaagtggcagacaagatccaacttatcaaaaatatgctggacaaagtcaatgagatgattattggtggtggaatggcttataccttccttaaggtactcaacaacatggagattggtgcttccctgtttgatgaagagggagccaagatcgttaaagatatcatggccaaagcacaaaagaatggtgtaaggattacttttcctgttgattttgttactggggacaagtttgacgagaacgctcaggttggaaaagccactgtagcatctggcatatctcctggctggatgggtttggactgtggtcctgagagcaacaagaatcatgctcaagttgtggctcaagcaaggctaattgtttggaatgggccgttaggagtatttgaatgggatgcctttgctaagggaaccaaagccctcatggatgaaattgtgaaagccacttccaagggctgcatcactgttatagggggtggagacactgctacttgctgtgccaaatggaacactgaagataaagtcagccatgtcagcactggaggcggtgccagtctagagcttctggaaggtaaaatccttcctggagtagaggccctcagcaacatgtagttaatatagtgttacttccttctgttttctgtccatggcccttaagtcagcttaatgcttttacatctcgatgtgacttttgttaaaatctactcctagatcaagacctatgtaatggacaagcagcaggccatcaggaactcttaatatcagcacagcaattcattttagtttggtcacgcatttgcctgttcaagttctcatttgaacttcaccattgtgctatctagggaggacatattcttaagttgcctattaaagaaagtgagctgaagaaactg

SEQ ID NO: 22398 - DNA, 1830 bp, Homo sapiens
  source 1..1830: mol_type = unassigned DNA
agcggtccagagcgagtggaaagatttgggcgagaacttgcgcgggagccggactgagcggtgcgagcgcgcaggcgcggccgacggggcgggctgctactccggaatctgctaatcccagtcggtgccgcatccccagcccgccgccatggccgcctacaaactggtgctgatccggcacggcgagagcgcatggaacctggagaaccgcttcagcggctggtacgacgccgacctgagcccggcgggccacgaggaggcgaagcgcggcgggcaggcgctacgagatgctggctatgagtttgacatctgcttcacctcagtgcagaagagagcgatccggaccctctggacagtgctagatgccattgatcagatgtggctgccagtggtgaggacttggcgcctcaatgagcggcactatgggggtctaaccggtctcaataaagcagaaactgctgcaaagcatggtgaggcccaggtgaagatctggaggcgctcctatgatgtcccaccacctccgatggagcccgaccatcctttctacagcaacatcagtaaggatcgcaggtatgcagacctcacagaagatcagctaccctcctgtgagagtctgaaggatactattgccagagctctgcccttctggaatgaagaaatagttccccagatcaaggaggggaaacgtgtactgattgcagcccatggcaacagcctccggggcattgtcaagcatctggagggtctctctgaagaggctatcatggagctgaacctgccgactggtattcccattgtctatgaattggacaagaacttgaagcctatcaagcccatgcagtttctgggggatgaagagacggtgcgcaaagccatggaagctgtggctgcccagggcaaggccaagaagtgaaggccggcggggaggatactgtccccaggagcaccctccctgcccgtcttgtccctctgcccctcccacctgcacatgtcacactgaccacatctgtagacatcttgagttgtagctgcagacggggaccagtggctcccattttcattttagccattttgtcgcctgcacccactcccttcatacaatctagtcagaatagcagttctagagcacaggttctcagtctaagctatggaaaagctccccttatccaacagagtttaaaagtagtgacttgggtttttgcgagtgctttgtttactaaggactttggggaggaaccatgctaagccatgaccagtgaggagaagcaacagagcctgtctgtccccatgagcggagtctgtcctctgctcttctgcagtcaggtcactgcctactgcctgggggctctagtcattccagtggaagacgaatgtaacctgcgtggtgatgtgacaactgtttcctccctgaccccagaggatctggctctaggttgggatcaatcctgaatttcgttatgtgttaatttacttttattaaaaaagtatagtatatataatacaaaacaataacccttctggggtttcttgtggcggttgaaatagtcccacatgtggtcatcagaaaataagccattcctcataccaatataggatcagctccttgacctctgaggggcaggagtgcttcctggtgtgtgtattagaatcccttcctgccttgtttcatggcagtgaaatgcctcttggtcctgtccaagtgtatctttcactgatttctgaatcatgttctagttgcttgaccctgccacatgggtccagtgttcatctgagcataactgtactaaatcctttttccatatcagtataataaaggagtgatgtgcaata

SEQ ID NO: 22399 - DNA, 1385 bp, Homo sapiens
  source 1..1385: mol_type = unassigned DNA
aatcccagtcggtgccgcatccccagcccgccgccatggccgcctacaaactggtgctgatccggcacggcgagagcgcatggaacctggagaaccgcttcagcggctggtacgacgccgacctgagcccggcgggccacgaggaggcgaagcgcggcgggcaggcgctacgagatgctggctatgagtttgacatctgcttcacctcagtgcagaagagagcgatccggaccctctggacagtgctagatgccattgatcagatgtggctgccatgatgtcccaccacctccgatggagcccgaccatcctttctacagcaacatcagtaaggatcgcaggtatgcagacctcacagaagatcagctaccctcctgtgagagtctgaaggatactattgccagagctctgcccttctggaatgaagaaatagttccccagatcaaggaggggaaacgtgtactgattgcagcccatggcaacagcctccggggcattgtcaagcatctggagggtctctctgaagaggctatcatggagctgaacctgccgactggtattcccattgtctatgaattggacaagaacttgaagcctatcaagcccatgcagtttctgggggatgaagagacggtgcgcaaagccatggaagctgtggctgcccagggcaaggccaagaagtgaaggccggcggggaggatactgtccccaggagcaccctccctgcccgtcttgtccctctgcccctcccacctgcacatgtcacactgaccacatctgtagacatcttgagttgtagctgcagacggggaccagtggctcccattttcattttagccattttgtcgcctgcacccactcccttcatacaatctagtcagaatagcagttctagagcacaggttctcagtctaagctatggaaaagctccccttatccaacagagtttaaaagtagtgacttgggtttttgcgagtgctttgtttactaaggactttggggaggaaccatgctaagccatgaccagtgaggagaagcaacagagcctgtctgtccccatgagcggagtctgtcctctgctcttctgcagtcaggtcactgcctactgcctgggggctctagtcattccagtggaagacgaatgtaacctgcgtggtgatgtgacaactgtttcctccctgaccccagaggatctggctctaggttgggatcaatcctgaatttcgttatgtgttaatttacttttattaaaaaagtatagtatatataatacaaaacaataacccttctggggtttcttgtggcggttgaaatagtcccacatgtggtcatcagaaaataagccattcctcataccaatataggatcagctccttgacctctga

SEQ ID NO: 22400 - DNA, 857 bp, Homo sapiens
  source 1..857: mol_type = unassigned DNA
gggagtgttgggaagcagccgtccccgtccagagtcctctgtggtccctgctgccaccatggccactcaccgcctcgtgatggtccggcacggcgagagcacatggaaccaggagaaccgtttctgtggctggttcgatgcagagctgagtgaaaaggggaccgaggaggccaagcggggagccaaggccatcaaggatgccaagatggagtttgacatctgctacacgtcagtgctgaagcgggccatccgcaccctctgggccatcctggacggcacggaccagatgtggctgcctgtggtgcgcacttggcgcctcaatgagcggcattacgggggcctcacaggcctcaacaaggcagaaacggccgccaagcacggggaggagcaggtgaagatctggaggcgctccttcgacatcccgccgcccccgatggacgagaagcacccctactacaactccattagcaaggagcgtcggtacgcaggcctgaagcccggggaactccccacctgcgagagcctcaaggacaccattgcccgggccctgcccttctggaacgaggagattgttccccagatcaaggccggcaagcgagtgctcattgcagcccacgggaacagcctgcggggcattgtcaagcacctggaagggatgtcagaccaggcgatcatggagctgaacctgcccacggggatccccattgtgtatgagctgaacaaggagctgaagcccaccaagcccatgcagttcctgggtgatgaggaaacggtgcggaaggccatggaggctgtggctgcccagggcaaggccaagtgaggggtgggcttgggcaataaaggcacctcccccaaca

SEQ ID NO: 22401 - DNA, 1678 bp, Homo sapiens
  source 1..1678: mol_type = unassigned DNA
atggccgcctacaaactggtgctgatccggcacggcgagagcacatggaacctggagaaccgcttcagctgctggtacgacgccgatctgagcccggcgggccacgaggaggcgaagcgcggcgggcaggcgctacgagatgctggctatgagtttgacatctgcctcacctcagtgcagaagagagtgatccggaccctctggacagtgctagatgccattgatcagatgtggctgccagtggtgaggacttggcgcctcaatgagcggcactatgggggtctaaccggtctcaataaagcagaaactgctgcaaagcatggtgaggcccaggtgaagatctggaggcgctcctatgatgtcccaccacctccgatggagcccgaccatcctttctacagcaacatcagtaaggatcgcaggtatgcagacctcacagaagatcagctaccctcctatgagagtccgaaggatactattgccagagctctgcccttctggaatgaagaaatagttccccagatcaaggaggggaaacgtgtactgattgcagcccatggcaacagcctccagggcattgccaagcatgtggagggtctctctgaagaggctatcatggagctgaacctgccgactggtattcccatcgtctatgaattggacaagaacttgaagcctatcaagcccatgcagtttctgggggatgaagagacggtgtgcaaagccatagaagctgtggctgcccagggcaaggccaagaagtgaaggccagcggggaggatactgtccccaggagcaccctccctgctggtcttgtccctctgcccctcccacctgcacatgtcacactgaccacatctgtagacatcttgagttgtagctgcagatggggaccagtggctcccattttcattttagccattttgtcgcctgcacccactcccttcatacaatctagtcagaatagcagttctagagcacaggttctcagtctaagctgtggaaaagctccccttatccaacagagtttaaaagtagtgacttgggtttttgtgagtgctttgtttactaaggactttggggaggaacatgctaagccacgaccaatgaggagaagcaacagagcctgtctgtccccatgagcagagtctgtcctctgctcttctgcagtcaggccactgcctgggggctctagtcattccagtggaagatgaatgtaatctgcatggtgatgtgacaactgtttcctccttgaccccagaggatctggctctaggttgggatcaatcctgaatttcgttatgtgttatatttacttttattaaaaaagtatagtatatattaataatacaaaacaataacccttctggggtttcttgtggcggttgaaatagtcccacatgtggtcatcagaaaataagccattcctcataccaatataggatcagctccttgacctctgaggggcaggagtgcttcctggtgtgtgtattagaatcccttcctgccttgtttcatggcagtgaaatgcctcttggtcctgtccaagtgtgtctttcactgatttctgaatcatgttctagttgcttgaccctgccacatgggcccagtgttcatctgagcataactgtactaaatccttttaccagatcagtataataaaggagtgatgtgcaat

SEQ ID NO: 22402 - DNA, 3136 bp, Homo sapiens
  source 1..3136: mol_type = unassigned DNA
gctgcgaggagcggccggcgggcggcggcggccggcgggcggcgatggcggcggcggaggccggtggcgacgacgcccgctgcgtgcggctgagcgccgagcgggcacaggcgctgctggccgacgtggacacgctgctgttcgactgcgacggcgtgctgtggcgcggggagaccgccgtgcctggcgcgcccgaggccctgcgggcgctgcgagcccgcggcaagcgcctgggcttcatcaccaacaacagcagcaagacccgcgctgcctacgccgagaagctgcggcgcctgggcttcggcggccccgcggggcccggcgccagcctggaggtcttcggcacggcctactgcaccgcgctctacctgcgccagcgcctggccggcgcccccgcgcccaaggcctacgtgctgggcagcccagccctggccgcggagctggaggccgtgggcgtcgccagcgtgggcgtggggcccgagccactgcagggcgagggtcccggcgactggctgcacgcgccgctggagcccgacgtgcgcgcggtggtggtgggctttgacccgcacttcagctacatgaagctcaccaaggccctgcgctacctgcagcagcccggctgcctgctcgtgggcaccaacatggacaaccggcttccgcttgagaacggccgcttcatcgcgggtaccgggtgtctggtccgagccgtggagatggccgcccagcgccaggccgacatcatcgggaagcccagccgcttcattttcgactgcgtgtcccaggaatacggcatcaaccccgagcgcaccgtcatggtgggagaccgcctggacacagacatcctcctaggcgccacctgtggcctgaagaccatcctgaccctcaccggagtctccactctaggggatgtgaagaataatcaggaaagtgactgcgtgtctaagaagaaaatggtccctgacttctatgttgacagcatagccgaccttttgcctgcccttcaaggttaaagattgagtgtctttaatctgcagaataaaaaaaaagaaattgaaaaccagttacccaaattaataggtggggcttaagcatctgctcggctaagtggcttcaaagagtgtaattggagttaagcaaaggcattcattgttaaccttgtaagtacacgtttgggggacgattttgtttacagatgcttgtaatcgaagatgcacttttaggcttggaaggcgttgtgggctgggttctgggccttgggtggggttggcaggggcaggctctgcacctgtccgggattcaggtaaccagggcctgccgatgggactgaggcgggtctaggggtgtgtgtcctgtattttattgaaaaactcattcagggatccagcccctcagggggcagagggactgattattctgactgttgggagaggcttgcatggaccagagccccatcagtatgactgaaagtccagcggagccttctgtgtccctgtgcctcccagcagggtgggagtggaggaggcggctgctcccaggtggcatctccctgcccttgggtgcaaagtgctgccctcaccactctcccacctcccttacttccttgaaaaccactctgatgtcacaactgagtgtctgttccgtttcagatacccagggctgctgcccagttctgtaaacgcagcccagctaaagctctgctgtctcaagtgtgcatttatacccaggtgatttggacggagcagctaccatggcgtggacgccttcactgaactccgggctgcagtgcagggagctcagagcagtgctgctaccagtttttaactttgaacaactgtgtcaggcaatggatttgaattttaagtgtattaatagctgtgctctgtgtcgtaggcaaaattccactgaaggagcctctgtgccctgcagccggcagcgcggctgaagcatgtgttggccaaggaatgcctgtcatccaggtgccctgcagccagcagcgcggctcaagcatgtgttggccaaggaatgcctgtcagtcatccagggctctgggaggggacgagagttatgtccccaagaacaggaagtcctttacaaagcatccagtctcttcctgtcctccccttccctaggctggggtaggggttagagactggtggcccaggaggtcacctgccttgccctggattccctcttcagtggccagcaggacttggcagggccaccagctcgccaaggttctgggcggggctccagcctctcctgcctgctccttggctctgctgacctttcacaggcctgacagcagactcagcagggccatcccgggatgctgcaccttctggctggctccctaccagcgcctttccctgtacctggcagcttctctcttggccccacagtcacagcactccacttggtcacaaagacttcagagcaataagaggcgtcctgagccttcagcacctcccaggcctgggatatcgggttcagagggtgctgcagagcagcatgagggtggctccacccatgaggctggtgacactgacgctggcttggctaagttggctcaagccgggtctggcctgacagggtgcagtcacaccaggagcgcatggcagatgcagcctcagtgatgcctctcttgccgggtaggggctgggagtccccgtgcatcctgtctctggcccatgaggggctgcagcactgtgggcgccagagcacagattaaactctcaaacccacactggctcaggtgtccttgctctcaccttgcattggcccgggtgatgccgtctcaccacgggtgggaggactcaaagtagatgggtaactggggttccaactccagagctggaatgccaactgcccactcccagcctggttcagaggaagatgttttgaagaatgagggaaagccaggcacaaagggaagccagggaagcaaagggccctggagtgaagctggtgggctgccgtgtcagagcgcccagggcagggagcagagctcagaagtaatgctggcccgggcgcagtggctcacacccgtaatcccaacgctttggaaggctgaggcaggtggattacttgagatcaggagttcaagaccagcctggccaaaatggtgaaaacccatctc

SEQ ID NO: 22403 - DNA, 890 bp, Homo sapiens
  source 1..890: mol_type = unassigned DNA
ctccctcgttgccccagcctcgcgggccgcctaactgccccgttccaagggtgccaccggaccccgctggagaggaacttctccgttggctggatttcatcaccacccattcccgattccacgtttcctttaagcggggctggcggagccgcaaggcggcaaggaactggattgcgattggtcagcacgtgcctcggtcggcggtacaattggctgaggcgctgggccttgggaagcattccccgacgggattggtcgtcgctctcgcagagcccgcctcccgcagtacaagcggcccccgggtcgggtgggaggaggggactccgggaggaggaacatggcggtggcggacctcgctctcattcctgatgtggacatcgactccgacggcgtcttcaagtatgtgctgatccgagtccactcggctccccgctccggggctccggctgcagagagcaaggagatcgtgcgcggctacaagtgggctgagtaccatgcggacatctacgacaaagtgtcgggcgacatgcagaagcaaggctgcgactgtgagtgtctgggcggcgggcgcatctcccaccagagtcaggacaagaagattcacgtgtacggctattccatggcctatggtcctgcccagcacgccatttcaactgagaaaatcaaagccaagtaccccgactacgaggtcacctgggctaacgacggctactgagcactcccagcccggggcctgctgcctccagcagccacttcagagcccccgcctttgcctgcactcctcttgcagggctggccctgcctgctcctgcggcagcctctggtgacgtgctgtccaccaggccttggagacaggctagcctggccacagaattaaacgtgttgccaca

SEQ ID NO: 22404 - DNA, 985 bp, Homo sapiens
  source 1..985: mol_type = unassigned DNA
ggccgggaacgcccctggaccggaataatttccagggggcaagagctttcgaaccaacctcgcgggccgcctaactgccccgttccaagggtgccaccggaccccgctggagaggaacttctccgttggctggatttcatcaccacccattcccgattccacgtttcctttaagcggggctggcggagccgcaaggcggcaaggaactggattgcgattggtcagcacgtgcctcggtcggcggtacaattggctgaggcgctgggccttgggaagcattccccgacgggattggtcgtcgctctcgcagagcccgcctcccgcagtacaagcggcccccgggtcgggtgggaggaggggactccgggaggaggaacatggcggtggcggacctcgctctcattcctgatgtggacatcgactccgacggcgtcttcaagtatgtgctgatccgagtccactcggctccccgctccggggctccggctgcagagagcaaggagatcgtgcgcggctacaagtgggctgagtaccatgcggacatctacgacaaagtgtcgggcgacatgcagaagcaaggctgcgactgtgagtgtctgggcggcgggcgcatctcccaccagagtcaggacaagaagattcacgtgtacggctattccatgatgagacccacgtgcgtccctctgggcgcctcaggccccaggatccaccatcaaggcctatggtcctgcccagcacgccatttcaactgagaaaatcaaagccaagtaccccgactacgaggtcacctgggctaacgacggctactgagcactcccagcccggggcctgctgcctccagcagccacttcagagcccccgcctttgcctgcactcctcttgcagggctggccctgcctgctcctgcggcagcctctggtgacgtgctgtccaccaggccttggagacaggctagcctggccacagaattaaacgtgttgccaca

SEQ ID NO: 22405 - DNA, 1249 bp, Homo sapiens
  source 1..1249: mol_type = unassigned DNA
ggctgccgttgcctccttgtaccggtagcggggttggggacggaagccttcggtcggtggagaggagaaagggagaggccttcgggcggtggacggggaagagagggagtccttcgggcggtggagggggtggagagcgaggccttcgggcggtggagagcggggaggggggaggccttcgggcggtgggagggggagagagggaggcctttgggcggtgggggccacggggagggtggtcttcggactacgtgcgggacaggaggtcagggctggcaagtccctcaggcctccctcgttgccccagcctcgcgggccgcctaactgccccgttccaagggtgccaccggaccccgctggagaggaacttctccgttggctggatttcatcaccacccattcccgattccacgtttcctttaagcggggctggcggagccgcaaggcggcaaggaactggattgcgattggtcagcacgtgcctcggtcggcggtacaattggctgaggcgctgggccttgggaagcattccccgacgggattggtcgtcgctctcgcagagcccgcctcccgcagtacaagcggcccccgggtcgggtgggaggaggggactccgggaggaggaacatggcggtggcggacctcgctctcattcctgatgtggacatcgactccgacggcgtcttcaagtatgtgctgatccgagtccactcggctccccgctccggggctccggctgcagagagcaaggagatcgtgcgcggctacaagtgggctgagtaccatgcggacatctacgacaaagtgtcgggcgacatgcagaagcaaggctgcgactgtgagtgtctgggcggcgggcgcatctcccaccagagtcaggacaagaagattcacgtgtacggctattccatgatgagacccacgtgcgtccctctgggcgcctcaggccccaggatccaccatcaaggcctatggtcctgcccagcacgccatttcaactgagaaaatcaaagccaagtaccccgactacgaggtcacctgggctaacgacggctactgagcactcccagcccggggcctgctgcctccagcagccacttcagagcccccgcctttgcctgcactcctcttgcagggctggccctgcctgctcctgcggcagcctctggtgacgtgctgtccaccaggccttggagacaggctagcctggccacagaattaaacgtgttgccacacctgccggcttctg

SEQ ID NO: 22406 - DNA, 2039 bp, Homo sapiens
  source 1..2039: mol_type = unassigned DNA
caaccatgtaagcagcttcgcttcctgccgcaaccgtccgcggcctgaggagcccaccgccgctctcgggggccgacttccgggggctgagccgttgaagcggaggctggggcggggggcagccggcgcggccggggcaggaggcgcagactcatgaaatggccacagatgataagacgtccccaacactggactctgctaatgatttgcctcgatctcctactagtccttctcatctcacacactttaaacctttgactcctgatcaagatgagcccccttttaaatcagcttatagttcttttgtaaatctctttcgttttaacaaagagagagcagaaggaggccagggagaacagcagcctttgagtggaagttggaccagccctcagctcccttcgaggacacagtctgttaggtcacccacaccttataaaaagcagcttaatgaggaactccagcggcgctcttcagcattaggagacctccgagcttgcacatattgtagaaaaatagccttaagttatgctcattccacagacagtaattctattggggaagacttgaatgctctttcagattctgcttgctctgtgtctgtgcttgatccaagtgaaccccgaacacctgttgggagtaggaaagccagccgtaacatatttttagaggatgatttggcctggcaaagtttgattcatccagattcctcaaatactcctctttcaacaagacttgtatctgtgcaagaggatgctgggaaatctcctgctcgaaatagatcagccagcattactaacctgtcactggatagatctggttctcctatggtaccttcatatgagacatctgtcagtccccaggctaaccgaacatatgttaggacagagaccactgaggatgaacgcaaaattcttctggacagtgtgcagttaaaagacctgtggaaaaaaatctgccatcacagcagtggaatggagtttcaggatcaccgctactggttgagaacgcatcccaactgcattgtaggaaaggaattagtcaactggctaatccgaaatgggcatattgccacaagggcacaagctatagcaattggacaagcaatggttgatggacgttggctggattgtgttagtcatcacgaccagcttttcagagatgagtatgcgctgtatagaccactgcagagtacagaattttctgagacgccttctcccgacagtgactcagtgaactccgtggaaggacactctgagccatcctggtttaaagacataaagtttgatgacagtgacacagaacagatagctgaagaaggtgacgataatttggctaattctgccagtcctagcaagcgcacatcagtcagcagtttccagtccacagtggacagtgactcagccgcttctatcagcctgaacgtggagctggacaacgtgaacttccatatcaagaagccctccaagtacccacatgtgccccctcaccctgctgaccaaaaaggtaggaggtagtcaccatctggaatccaaacacaggctggacagctgggccataggatctcatgccagcctgtccttctggcttcctctgtcccacgtggctgagggtatttggtgtgggttttgttctaccctttctcatttctcccacacctcctccccataccttttttggttgattccttttatttcttgttttctccctcagcaccaccatgcccagtgtaaagcttgtagtctttaaaaggaactacatctgactgctcttcccataatgtgcaacttccaaggtggcatttctttgcatttataacatggatgttctgctctattcttttctctttcttcatttaacattttaaagcctatttgcctttgccgttacccagtaacataatatttcactaaacccattaagatgcttgaactagattgggggaaaatcattcacacattccaaaatatctccataataattcataatgcttattatgtatattctatatttattaaaacaatttcttctctaatgtaaaa

SEQ ID NO: 22407 - DNA, 1898 bp, Homo sapiens
  source 1..1898: mol_type = unassigned DNA
gcagcttcgcttcctgccgcaaccgtccgcggcctgaggagcccaccgccgctctcgggggccgacttccgggggctgagccgttgaagcggaggctggggcggggggcagccggcgcggccggggcaggaggcgcagactcatgaaatggccacagatgataagacgtccccaacactggactctgctaatgatttgcctcgatctcctactagtccttctcatctcacacactttaaacctttgactcctgatcaagatgagcccccttttaaatcagcttatagttcttttgtaaatctctttcgttttaacaaagagagagcagaaggaggccagggagaacagcagcctttgagtggaagttggaccagccctcagctcccttcgaggacacagtctgttaggtcacccacaccttataaaaagcagcttaatgaggaactccagcggcgctcttcagcattagacacaagaaggaaagcagaacctacctttggaggtcatgaccctcgtacagctgttcagcttcgaagcctcagcacagtattaaaacgcctcaaggaaatcatggaggggaaaagccaggatagtgacctgaaacaatactggatgccagatagccaatgtaaagagtgctatgactgtagtgagaaatttacaacctttaggcgcagacaccattgccgactatgtgggcagattttctgcagtcgttgctgtaatcaagaaatccctggaaaatttatgggctatacaggagacctccgagcttgcacatattgtagaaaaatagccttaagttatgctcattccacagacagtaattctattggggaagacttgaatgctctttcagattctgcttgctctgtgtctgtgcttgatccaagtgaaccccgaacacctgttgggagtaggaaagccagccgtaacatatttttagaggatgatttggcctggcaaagtttgattcatccagattcctcaaatactcctctttcaacaagacttgtatctgtgcaagaggatgctgggaaatctcctgctcgaaatagatcagccagcattactaacctgtcactggatagatctggttctcctatggtaccttcatatgagacatctgtcagtccccaggctaaccgaacatatgttaggacagagaccactgaggatgaacgcaaaattcttctggacagtgtgcagttaaaagacctgtggaaaaaaatctgccatcacagcagtggaatggagtttcaggatcaccgctactggttgagaacgcatcccaactgcattgtaggaaaggaattagtcaactggctaatccgaaatgggcatattgccacaagggcacaagctatagcaattggacaagcaatggttgatggacgttggctggattgtgttagtcatcacgaccagcttttcagagatgagtatgcgctgtatagaccactgcagagtacagaattttctgagacgccttctcccgacagtgactcagtgaactccgtggaaggacactctgagccatcctggtttaaagacataaagtttgatgacagtgacacagaacagatagctgaagaaggtgacgataatttggctaattctgccagtcctagcaagcgcacatcagtcagcagtttccagtccacagtggacagtgactcagccgcttctatcagcctgaacgtggagctggacaacgtgaacttccatatcaagaagccctccaagtacccacatgtgccccctcaccctgctgaccaaaaaggtaggaggtagtcaccatctggaatccaaacacaggctggacagctgggccataggatctcatgccagcctgtccttctggcttcctctgtcccacgtggctgagggtatttggt

SEQ ID NO: 22408 - DNA, 9901 bp, Homo sapiens
  source 1..9901: mol_type = unassigned DNA
caaccatgtaagcagcttcgcttcctgccgcaaccgtccgcggcctgaggagcccaccgccgctctcgggggccgacttccgggggctgagccgttgaagcggaggctggggcggggggcagccggcgcggccggggcaggaggcgcagactcatgaaatggccacagatgataagacgtccccaacactggactctgctaatgatttgcctcgatctcctactagtccttctcatctcacacactttaaacctttgactcctgatcaagatgagcccccttttaaatcagcttatagttcttttgtaaatctctttcgttttaacaaagagagagcagaaggaggccagggagaacagcagcctttgagtggaagttggaccagccctcagctcccttcgaggacacagtctgttaggtcacccacaccttataaaaagcagcttaatgaggaactccagcggcgctcttcagcattagacacaagaaggaaagcagaacctacctttggaggtcatgaccctcgtacagctgttcagcttcgaagcctcagcacagtattaaaacgcctcaaggaaatcatggaggggaaaagccaggatagtgacctgaaacaatactggatgccagatagccaatgtaaagagtgctatgactgtagtgagaaatttacaacctttaggcgcagacaccattgccgactatgtgggcagattttctgcagtcgttgctgtaatcaagaaatccctggaaaatttatgggctatacaggagacctccgagcttgcacatattgtagaaaaatagccttaagttatgctcattccacagacagtaattctattggggaagacttgaatgctctttcagattctgcttgctctgtgtctgtgcttgatccaagtgaaccccgaacacctgttgggagtaggaaagccagccgtaacatatttttagaggatgatttggcctggcaaagtttgattcatccagattcctcaaatactcctctttcaacaagacttgtatctgtgcaagaggatgctgggaaatctcctgctcgaaatagatcagccagcattactaacctgtcactggatagatctggttctcctatggtaccttcatatgagacatctgtcagtccccaggctaaccgaacatatgttaggacagagaccactgaggatgaacgcaaaattcttctggacagtgtgcagttaaaagacctgtggaaaaaaatctgccatcacagcagtggaatggagtttcaggatcaccgctactggttgagaacgcatcccaactgcattgtaggaaaggaattagtcaactggctaatccgaaatgggcatattgccacaagggcacaagctatagcaattggacaagcaatggttgatggacgttggctggattgtgttagtcatcacgaccagcttttcagagatgagtatgcgctgtatagaccactgcagagtacagaattttctgagacgccttctcccgacagtgactcagtgaactccgtggaaggacactctgagccatcctggtttaaagacataaagtttgatgacagtgacacagaacagatagctgaagaaggtgacgataatttggctaattctgccagtcctagcaagcgcacatcagtcagcagtttccagtccacagtggacagtgactcagccgcttctatcagcctgaacgtggagctggacaacgtgaacttccatatcaagaagccctccaagtacccacatgtgccccctcaccctgctgaccaaaaagagtatttgatttctgacactggaggacaacagctctcaataagtgacgctttcatcaaagaatccttatttaatcgccgagtagaggaaaaatccaaagagctgcctttcacacctttgggctggcatcataacaacctggagctcctgagggaggagaatggggagaaacaagccatggagaggttgctttcagctaatcataaccacatgatggcactactccagcagttgctccatagtgactcactgtcatcatcttggagggacatcatcgtgtcattggtctgccaggttgttcagacagtccgacctgatgtcaagaaccaggatgatgacatggatatccgtcagtttgtccacatcaaaaaaatcccaggtggaaagaagtttgattctgtggttgtcaatggctttgtttgtaccaagaacattgcacataaaaagatgagttcttgtattaaaaaccccaaaattcttctgttgaagtgttccattgagtatctctacagagaagaaactaagtttacttgcattgatcctattgtgcttcaggaaagggaattcttgaagaattatgtccagcgaatagttgatgttcgacccaccttggttcttgttgagaaaacagtgtctcggattgcccaggacatgttattggaacatggcattactttggtcattaatgtaaagtcacaagttttggaacgaatcagtcgaatgacccaaggtgatttagtgatgtcaatggaccagctgcttacgaaaccacacctgggcacttgtcacaaattttatatgcagatatttcagttgcctaatgaacaaaccaagacactgatgttttttgaaggttgtccacagcacctaggctgtacaatcaagctaagaggaggctctgattatgagctggctcgagttaaggagatcctaatatttatgatctgtgttgcttatcattctcaactagaaatatcctttctcatggatgaatttgctatgcctcccacattaatgcaaaacccttcattccattccctgattgagggacgagggcatgagggggctgtccaagagcagtacggtggaggttccatcccctgggatcctgacatccctcctgagtctctgccctgtgatgatagcagtttgctggaattgaggattgtgtttgagaagggtgagcaggaaaataaaaatcttccgcaggctgttgcctctgtgaagcatcaagaacatagcacaacagcttgcccggcgggtctcccttgtgctttctttgcacctgtaccggaatcattgttgccactccctgtggatgaccaacaagatgctttaggcagcgagcagccagagactttgcagcaaacagttgtgctgcaggatcccaaaagccagataagagcctttagagaccctctacaggatgacactggattatatgttactgaggaagtcacctcctctgaagataaacgaaagacttattctttggcctttaagcaggaattaaaagatgtgatcctctgtatctccccagtaatcacattccgagaaccctttcttttaactgaaaaggggatgagatgctctacccgagattattttgcagagcaggtttactggtctcctctcctcaataaagaattcaaagaaatggagaacaggaggaagaaacagctgctcagggatctctctggacttcagggcatgaatggaagtattcaggccaagtctattcaagtcttaccctcacatgagctagtgagcactagaattgctgagcatctgggcgatagccagagcttgggtagaatgctggccgattatcgagccagaggaggaagaattcagcccaaaaattcagacccttttgctcattcaaaggatgcatcaagtacttcaagtggccaatcaggaagcaaaaatgagggtgatgaagagagagggcttattctgagtgatgctgtgtggtcaacaaaggtggactgtctgaatcccattaatcaccagagactttgtgtgctcttcagcagctcttctgcccagtccagcaatgctcctagtgcctgtgtcagtccttggattgtaacaatggaattttatggaaagaatgatcttacattaggaatatttttagagagatactgtttcaggccttcttatcagtgtccaagcatgttctgtgatacccccatggtacatcatattcggcgctttgttcatggccaaggctgtgtgcagataatcctgaaggagttggattctccagtacctggatatcagcatacaattcttacatattcctggtgtagaatctgcaaacaggtaacaccagttgttgctctttccaatgagtcctggtctatgtcatttgcaaaataccttgaacttaggttttatgggcaccagtatactcgcagagccaacgctgagccctgtggtcactccatccatcatgattatcaccagtatttctcctataaccagatggtggcgtctttcagttattctcccattcggcttcttgaagtatgtgttccactccccaaaatattcattaagcgtcaggccccattaaaagtgtcccttcttcaggatctgaaggacttctttcaaaaagtttcacaggtatatgttgccattgatgaaagacttgcatctttgaaaactgatacatttagtaaaacaagagaggaaaaaatggaagatatttttgcacagaaagagatggaagaaggtgagttcaagaactggattgagaagatgcaagcaaggctcatgtcttcctctgtagatacccctcagcaactgcagtcggtctttgagtcactcattgccaagaaacaaagtctctgtgaagtgctgcaagcttggaataacaggttgcaggaccttttccaacaggaaaagggtagaaagagaccttcagttcctccaagtcctggaagactgagacaaggggaagaaagcaagataagtgcgatggatgcatctccacggaatatttctccaggacttcagaatggagaaaaagaggatcgcttcttaacaactttgtccagccagagctccaccagttctactcatctccaattgcctacgccacctgaagtcatgtctgaacagtcagtgggagggccccctgagctagatacagccagcagttccgaagatgtgtttgatgggcatttgctgggatccacagacagccaagtgaaggaaaagtcaaccatgaaagccatctttgcaaatttgcttccaggaaatagctataatcctattccatttccttttgatccagataaacactacttaatgtatgaacatgaacgagtgcccattgcagtctgcgagaaggaacccagctccatcattgcttttgctctcagttgtaaagaataccgaaatgccttagaggaattgtctaaagcgactcagtggaacagtgccgaagaagggcttccaacaaatagtacttcagatagcagaccaaagagtagcagccctatcagattacctgaaatgagtggaggacagacaaatcgtacaacagaaacagaaccacaaccaaccaaaaaggcttctggaatgttgtccttcttcagagggacagcagggaaaagccccgatctctcttcccagaagagagagaccttacgtggagcagatagtgcttactaccaggttgggcagacgggcaaggaggggaccgagaatcaaggcgttgagcctcaagatgaagtagatggaggagatacacaaaagaagcaactcataaatcctcatgtggaacttcaattttcagatgctaatgccaagttttactgtcggctctactatgcgggagagtttcataagatgcgtgaagtgattctggacagcagtgaagaagatttcattcgttccctctcccactcatcaccctggcaggcccggggaggcaaatcaggagctgccttctatgcaactgaggatgatagatttattttgaagcaaatgcctcgtctggaagtccagtccttcctcgactttgcaccacattacttcaattatattacaaatgctgttcaacaaaagaggcccacggcgttggccaaaattcttggagtttacagaattggttataagaactctcagaacaacactgagaagaagttagatctccttgtcatggaaaatcttttctacgggagaaagatggcacaggtttttgatttgaagggctctcttaggaatcggaatgtaaaaactgacactggaaaagagagttgtgatgtggtcctgctagatgaaaatctcctaaagatggttcgagacaaccctctatatattcgttctcattccaaagctgtgctgagaacctcgatccatagtgactcccatttcctttctagccacctcattatagattattctttgctggttgggcgagatgatactagcaatgagctagtagttggaattatagattatattcgaacatttacatgggacaaaaagcttgagatggttgtgaaatcaacaggaattttaggtggacaaggtaaaatgccaacagtggtgtctccggagttgtacaggactaggttttgtgaggcaatggacaagtatttcctaatggtaccagaccactggacaggcttgggtctgaattgctgaaatcaagcacatattttgaaatggactgtgaaggaaaaggggacaggaacaaaggaccaaaaataagctacatgttttatttcttcatcgtgttcaccactgtatgccaaggcttttcagttctgtggctgtttagactgtccgtaatggaatggtaaaactccatgaatttgcactttggtttttgatacctgtggagctgtctgtaggttgggaagtggcatgaaaattttcttaagctaaaatacagacatgtttcaaagggctaaagttggagatgagtagatagggtgaaaaatgggttaaatttgctagcttaattgttttaagaagaaaacagtgtctcataaattgactatcctggcatcacatttaacatgttatctacttagaaagcatttgtagagctgctgaatttgttttgtgtttttctgtaataatttaatgttacttattatcagaatttctgaaacctttacaaaaattctgatttattccattaatggccggttaaacacgtgggcatttattgttttattgaggaatttgacttaaactgggaatcctgtcatgttgtttatctttccagcttgcctgtttttgagtatgtttgatgtttttaaaattttgtcttctctgtggaagacaggaggctacagcaattaactttaagcctccttttagagatatttttaaaacttgtttaaaatttttgtgcaattcatatattaaattgcacttacttgcatacgctcatattctagggttttttctctatttttagggtatcatagtaaatcattagtaaatgagtctgtagttactaaaccctaatggaataattattaatgaaagatttttgaaatataaaaaataaattaggcccaatccaagaaattgagtgagaaggaaacacttgttttattcacagaggtaaagtgtcttttcaatataaccagcaatttaggtggcatctataaaataaaaaatttctactgtggacatccccttttccaactttctacataatggctagttctgactactaagaaatgttaagaaataggccaagtgcggtggctcacgcctataatcctatcactttgggaggcctaggcaggcagatcacctgaggtcaggagttcaagaccagcctggccaacatgacgaaaccccatctctactaaaaagacaaaaaattagctgggcatggtggcatatacctgtaaccccaactacttgggtggctgaggcaggagaattgtttgaacctgggaggcggaggctgcagtgagctgggattacaccattgcattccagcctgggcaacagagcaagactgtctcaaaaaacaaaacgaaacaaaaaaagaaagttattcttagtaaggaacttcttgtttaatagcatttttgtttattttaaaaagtgatcagaagtagtaaactatctttgaggaaatactgtaaccccagaatatttcctcttgacttctttttgtaacaaggataatttagggatttataaagttgtaaggatttcactgtttttggactgcctataataatagcacattaaccttcacataataagaaatctggacaagttcagttacacagtatgatgaatacttgaattaggaacattgtggaaaatttgctttagagaatcaaggcagtagtttggtatttggtgcttattaaaaatgtggtttgttttgaactggaagcaagttgaccaaggacttatgactaatgtgatgctaagttccacttggccccttttaaaaacgtgtatgtgccttttgaagatacacaaaacactgaggattttagttttgaaatcaaagactattaaaggagctgtacagaggtaaaaaaataaatgtggaacattattaacttactttgtgtctaggaacaatggattttgtatctgatttaaaatgccaacactgttttgtctctgttcattttttctgtgaggatacttaaggttattattcctgtctgtttcctgtactcccctagtcatgagcacttgaagtacaaggtgtctccccctaggtgcaattaggttgtttctttgtttttagtttcaattctatgtgcatagcaggaatgctccacaggaatggcttctgacaataatctgtcctgttgattttgttttccttgcccatgacttgaacaactgtgttttaaagtactgtagtctagtaggtaactttgtggcaaaaattttcaatataatacattctgaaacaatagttgctgccttgcaaaggtaatctctcattttaaaattggacagtattaatgaaggggaaatatacaatttatttctattgagtggtagaactatatgtctggtcccttgctgctcttgtttaggccactatcatagatatatttcaaatattgtactactcagtgttaagtattgaatgactgtttccctttccttcaaggcctagagtatattctgaaaatttaggaatgaggaagaaatcttaatacttccttccttaacatacaacatgagtcccgagaataattgatagtagcaagagaaaactatgtcagtaacatgttgctttgtataaaaatcttatttataaatgtgaagctttttgatgccatcaaaacttattaaaaaataggatttacttttttctaattctgacctaagaaaaataatgagaacaagctgttgcaagctcttttgtagtctattgaatattttatagatattcaaaatttcctacaaactataattttttccatgatttagcagtgagtgattttctagctttggctcttattaggtattgtaaatagtagggttatatcgatatcagcttttgtgatggcattgtggtcatcagcttcatgacattttacccatttgcagtgatcctgtgtaaaactgccaaggaaagtaattacctgtaggagtttgctgagcttgaagagtgaaaactgttgtgaatgagcctgatcataaaacggaccaggccattcattattcctcaagtgttaatatactgacttatgcagtattcaaaccatctagtgcaatgtttttgtttttgttttttttttggtaacacaggtgcagtgtattatagaaaaaataaaaactacaatcattagcagttttaatactgctgtgtcagttttgtaaaaaatgtacattatgtcttttgacatgttgaattttaaactagggaaatgacattgtaaatcatagtagcctcttttaatttaatatgaaaaatgccactatattgaaagtacttaatgtattgtatatatttctctactttggttctagctattttatatgattgacatgttatttaaaagataactgccttgaacttttggagacttgtactgtaaataaagaaatcttaacaataaactcagaatctacttactcca

SEQ ID NO: 22409 - DNA, 9733 bp, Homo sapiens
  source 1..9733: mol_type = unassigned DNA
caaccatgtaagcagcttcgcttcctgccgcaaccgtccgcggcctgaggagcccaccgccgctctcgggggccgacttccgggggctgagccgttgaagcggaggctggggcggggggcagccggcgcggccggggcaggaggcgcagactcatgaaatggccacagatgataagacgtccccaacactggactctgctaatgatttgcctcgatctcctactagtccttctcatctcacacactttaaacctttgactcctgatcaagatgagcccccttttaaatcagcttatagttcttttgtaaatctctttcgttttaacaaagagagagcagaaggaggccagggagaacagcagcctttgagtggaagttggaccagccctcagctcccttcgaggacacagtctgttaggtcacccacaccttataaaaagcagcttaatgaggaactccagcggcgctcttcagcattagacacaagaaggaaagcagaacctacctttggaggtcatgaccctcgtacagctgttcagcttcgaagcctcagcacagtattaaaacgcctcaaggaaatcatggaggggaaaagccaggatagtgacctgaaacaatactggatgccagatagccaatgtaaagagtgctatgactgtagtgagaaatttacaacctttaggcgcagacaccattgccgactatgtgggcagattttctgcagtcgttgctgtaatcaagaaatccctggaaaatttatgggctatacaggagacctccgagcttgcacatattgtagaaaaatagccttaagttatgctcattccacagacagtaattctattggggaagacttgaatgctctttcagattctgcttgctctgtgtctgtgcttgatccaagtgaaccccgaacacctgttgggagtaggaaagccagccgtaacatatttttagaggatgatttggcctggcaaagtttgattcatccagattcctcaaatactcctctttcaacaagacttgtatctgtgcaagaggatgctgggaaatctcctgctcgaaatagatcagccagcattactaacctgtcactggatagatctggttctcctatggtaccttcatatgagacatctgtcagtccccaggctaaccgaacatatgttaggacagagaccactgaggatgaacgcaaaattcttctggacagtgtgcagttaaaagacctgtggaaaaaaatctgccatcacagcagtggaatggagtttcaggatcaccgctactggttgagaacgcatcccaactgcattgtaggaaaggaattagtcaactggctaatccgaaatgggcatattgccacaagggcacaagctatagcaattggacaagcaatggttgatggacgttggctggattgtgttagtcatcacgaccagcttttcagagatgagtatgcgctgtatagaccactgcagagtacagaattttctgagacgccttctcccgacagtgactcagtgaactccgtggaaggacactctgagccatcctggtttaaagacataaagtttgatgacagtgacacagaacagatagctgaagaaggtgacgataatttggctaagtatttgatttctgacactggaggacaacagctctcaataagtgacgctttcatcaaagaatccttatttaatcgccgagtagaggaaaaatccaaagagctgcctttcacacctttgggctggcatcataacaacctggagctcctgagggaggagaatggggagaaacaagccatggagaggttgctttcagctaatcataaccacatgatggcactactccagcagttgctccatagtgactcactgtcatcatcttggagggacatcatcgtgtcattggtctgccaggttgttcagacagtccgacctgatgtcaagaaccaggatgatgacatggatatccgtcagtttgtccacatcaaaaaaatcccaggtggaaagaagtttgattctgtggttgtcaatggctttgtttgtaccaagaacattgcacataaaaagatgagttcttgtattaaaaaccccaaaattcttctgttgaagtgttccattgagtatctctacagagaagaaactaagtttacttgcattgatcctattgtgcttcaggaaagggaattcttgaagaattatgtccagcgaatagttgatgttcgacccaccttggttcttgttgagaaaacagtgtctcggattgcccaggacatgttattggaacatggcattactttggtcattaatgtaaagtcacaagttttggaacgaatcagtcgaatgacccaaggtgatttagtgatgtcaatggaccagctgcttacgaaaccacacctgggcacttgtcacaaattttatatgcagatatttcagttgcctaatgaacaaaccaagacactgatgttttttgaaggttgtccacagcacctaggctgtacaatcaagctaagaggaggctctgattatgagctggctcgagttaaggagatcctaatatttatgatctgtgttgcttatcattctcaactagaaatatcctttctcatggatgaatttgctatgcctcccacattaatgcaaaacccttcattccattccctgattgagggacgagggcatgagggggctgtccaagagcagtacggtggaggttccatcccctgggatcctgacatccctcctgagtctctgccctgtgatgatagcagtttgctggaattgaggattgtgtttgagaagggtgagcaggaaaataaaaatcttccgcaggctgttgcctctgtgaagcatcaagaacatagcacaacagcttgcccggcgggtctcccttgtgctttctttgcacctgtaccggaatcattgttgccactccctgtggatgaccaacaagatgctttaggcagcgagcagccagagactttgcagcaaacagttgtgctgcaggatcccaaaagccagataagagcctttagagaccctctacaggatgacactggattatatgttactgaggaagtcacctcctctgaagataaacgaaagacttattctttggcctttaagcaggaattaaaagatgtgatcctctgtatctccccagtaatcacattccgagaaccctttcttttaactgaaaaggggatgagatgctctacccgagattattttgcagagcaggtttactggtctcctctcctcaataaagaattcaaagaaatggagaacaggaggaagaaacagctgctcagggatctctctggacttcagggcatgaatggaagtattcaggccaagtctattcaagtcttaccctcacatgagctagtgagcactagaattgctgagcatctgggcgatagccagagcttgggtagaatgctggccgattatcgagccagaggaggaagaattcagcccaaaaattcagacccttttgctcattcaaaggatgcatcaagtacttcaagtggccaatcaggaagcaaaaatgagggtgatgaagagagagggcttattctgagtgatgctgtgtggtcaacaaaggtggactgtctgaatcccattaatcaccagagactttgtgtgctcttcagcagctcttctgcccagtccagcaatgctcctagtgcctgtgtcagtccttggattgtaacaatggaattttatggaaagaatgatcttacattaggaatatttttagagagatactgtttcaggccttcttatcagtgtccaagcatgttctgtgatacccccatggtacatcatattcggcgctttgttcatggccaaggctgtgtgcagataatcctgaaggagttggattctccagtacctggatatcagcatacaattcttacatattcctggtgtagaatctgcaaacaggtaacaccagttgttgctctttccaatgagtcctggtctatgtcatttgcaaaataccttgaacttaggttttatgggcaccagtatactcgcagagccaacgctgagccctgtggtcactccatccatcatgattatcaccagtatttctcctataaccagatggtggcgtctttcagttattctcccattcggcttcttgaagtatgtgttccactccccaaaatattcattaagcgtcaggccccattaaaagtgtcccttcttcaggatctgaaggacttctttcaaaaagtttcacaggtatatgttgccattgatgaaagacttgcatctttgaaaactgatacatttagtaaaacaagagaggaaaaaatggaagatatttttgcacagaaagagatggaagaaggtgagttcaagaactggattgagaagatgcaagcaaggctcatgtcttcctctgtagatacccctcagcaactgcagtcggtctttgagtcactcattgccaagaaacaaagtctctgtgaagtgctgcaagcttggaataacaggttgcaggaccttttccaacaggaaaagggtagaaagagaccttcagttcctccaagtcctggaagactgagacaaggggaagaaagcaagataagtgcgatggatgcatctccacggaatatttctccaggacttcagaatggagaaaaagaggatcgcttcttaacaactttgtccagccagagctccaccagttctactcatctccaattgcctacgccacctgaagtcatgtctgaacagtcagtgggagggccccctgagctagatacagccagcagttccgaagatgtgtttgatgggcatttgctgggatccacagacagccaagtgaaggaaaagtcaaccatgaaagccatctttgcaaatttgcttccaggaaatagctataatcctattccatttccttttgatccagataaacactacttaatgtatgaacatgaacgagtgcccattgcagtctgcgagaaggaacccagctccatcattgcttttgctctcagttgtaaagaataccgaaatgccttagaggaattgtctaaagcgactcagtggaacagtgccgaagaagggcttccaacaaatagtacttcagatagcagaccaaagagtagcagccctatcagattacctgaaatgagtggaggacagacaaatcgtacaacagaaacagaaccacaaccaaccaaaaaggcttctggaatgttgtccttcttcagagggacagcagggaaaagccccgatctctcttcccagaagagagagaccttacgtggagcagatagtgcttactaccaggttgggcagacgggcaaggaggggaccgagaatcaaggcgttgagcctcaagatgaagtagatggaggagatacacaaaagaagcaactcataaatcctcatgtggaacttcaattttcagatgctaatgccaagttttactgtcggctctactatgcgggagagtttcataagatgcgtgaagtgattctggacagcagtgaagaagatttcattcgttccctctcccactcatcaccctggcaggcccggggaggcaaatcaggagctgccttctatgcaactgaggatgatagatttattttgaagcaaatgcctcgtctggaagtccagtccttcctcgactttgcaccacattacttcaattatattacaaatgctgttcaacaaaagaggcccacggcgttggccaaaattcttggagtttacagaattggttataagaactctcagaacaacactgagaagaagttagatctccttgtcatggaaaatcttttctacgggagaaagatggcacaggtttttgatttgaagggctctcttaggaatcggaatgtaaaaactgacactggaaaagagagttgtgatgtggtcctgctagatgaaaatctcctaaagatggttcgagacaaccctctatatattcgttctcattccaaagctgtgctgagaacctcgatccatagtgactcccatttcctttctagccacctcattatagattattctttgctggttgggcgagatgatactagcaatgagctagtagttggaattatagattatattcgaacatttacatgggacaaaaagcttgagatggttgtgaaatcaacaggaattttaggtggacaaggtaaaatgccaacagtggtgtctccggagttgtacaggactaggttttgtgaggcaatggacaagtatttcctaatggtaccagaccactggacaggcttgggtctgaattgctgaaatcaagcacatattttgaaatggactgtgaaggaaaaggggacaggaacaaaggaccaaaaataagctacatgttttatttcttcatcgtgttcaccactgtatgccaaggcttttcagttctgtggctgtttagactgtccgtaatggaatggtaaaactccatgaatttgcactttggtttttgatacctgtggagctgtctgtaggttgggaagtggcatgaaaattttcttaagctaaaatacagacatgtttcaaagggctaaagttggagatgagtagatagggtgaaaaatgggttaaatttgctagcttaattgttttaagaagaaaacagtgtctcataaattgactatcctggcatcacatttaacatgttatctacttagaaagcatttgtagagctgctgaatttgttttgtgtttttctgtaataatttaatgttacttattatcagaatttctgaaacctttacaaaaattctgatttattccattaatggccggttaaacacgtgggcatttattgttttattgaggaatttgacttaaactgggaatcctgtcatgttgtttatctttccagcttgcctgtttttgagtatgtttgatgtttttaaaattttgtcttctctgtggaagacaggaggctacagcaattaactttaagcctccttttagagatatttttaaaacttgtttaaaatttttgtgcaattcatatattaaattgcacttacttgcatacgctcatattctagggttttttctctatttttagggtatcatagtaaatcattagtaaatgagtctgtagttactaaaccctaatggaataattattaatgaaagatttttgaaatataaaaaataaattaggcccaatccaagaaattgagtgagaaggaaacacttgttttattcacagaggtaaagtgtcttttcaatataaccagcaatttaggtggcatctataaaataaaaaatttctactgtggacatccccttttccaactttctacataatggctagttctgactactaagaaatgttaagaaataggccaagtgcggtggctcacgcctataatcctatcactttgggaggcctaggcaggcagatcacctgaggtcaggagttcaagaccagcctggccaacatgacgaaaccccatctctactaaaaagacaaaaaattagctgggcatggtggcatatacctgtaaccccaactacttgggtggctgaggcaggagaattgtttgaacctgggaggcggaggctgcagtgagctgggattacaccattgcattccagcctgggcaacagagcaagactgtctcaaaaaacaaaacgaaacaaaaaaagaaagttattcttagtaaggaacttcttgtttaatagcatttttgtttattttaaaaagtgatcagaagtagtaaactatctttgaggaaatactgtaaccccagaatatttcctcttgacttctttttgtaacaaggataatttagggatttataaagttgtaaggatttcactgtttttggactgcctataataatagcacattaaccttcacataataagaaatctggacaagttcagttacacagtatgatgaatacttgaattaggaacattgtggaaaatttgctttagagaatcaaggcagtagtttggtatttggtgcttattaaaaatgtggtttgttttgaactggaagcaagttgaccaaggacttatgactaatgtgatgctaagttccacttggccccttttaaaaacgtgtatgtgccttttgaagatacacaaaacactgaggattttagttttgaaatcaaagactattaaaggagctgtacagaggtaaaaaaataaatgtggaacattattaacttactttgtgtctaggaacaatggattttgtatctgatttaaaatgccaacactgttttgtctctgttcattttttctgtgaggatacttaaggttattattcctgtctgtttcctgtactcccctagtcatgagcacttgaagtacaaggtgtctccccctaggtgcaattaggttgtttctttgtttttagtttcaattctatgtgcatagcaggaatgctccacaggaatggcttctgacaataatctgtcctgttgattttgttttccttgcccatgacttgaacaactgtgttttaaagtactgtagtctagtaggtaactttgtggcaaaaattttcaatataatacattctgaaacaatagttgctgccttgcaaaggtaatctctcattttaaaattggacagtattaatgaaggggaaatatacaatttatttctattgagtggtagaactatatgtctggtcccttgctgctcttgtttaggccactatcatagatatatttcaaatattgtactactcagtgttaagtattgaatgactgtttccctttccttcaaggcctagagtatattctgaaaatttaggaatgaggaagaaatcttaatacttccttccttaacatacaacatgagtcccgagaataattgatagtagcaagagaaaactatgtcagtaacatgttgctttgtataaaaatcttatttataaatgtgaagctttttgatgccatcaaaacttattaaaaaataggatttacttttttctaattctgacctaagaaaaataatgagaacaagctgttgcaagctcttttgtagtctattgaatattttatagatattcaaaatttcctacaaactataattttttccatgatttagcagtgagtgattttctagctttggctcttattaggtattgtaaatagtagggttatatcgatatcagcttttgtgatggcattgtggtcatcagcttcatgacattttacccatttgcagtgatcctgtgtaaaactgccaaggaaagtaattacctgtaggagtttgctgagcttgaagagtgaaaactgttgtgaatgagcctgatcataaaacggaccaggccattcattattcctcaagtgttaatatactgacttatgcagtattcaaaccatctagtgcaatgtttttgtttttgttttttttttggtaacacaggtgcagtgtattatagaaaaaataaaaactacaatcattagcagttttaatactgctgtgtcagttttgtaaaaaatgtacattatgtcttttgacatgttgaattttaaactagggaaatgacattgtaaatcatagtagcctcttttaatttaatatgaaaaatgccactatattgaaagtacttaatgtattgtatatatttctctactttggttctagctattttatatgattgacatgttatttaaaagataactgccttgaacttttggagacttgtactgtaaataaagaaatcttaacaataaactcagaatctacttactcca

SEQ ID NO: 22410 - DNA, 830 bp, Homo sapiens
  source 1..830: mol_type = unassigned DNA
acatccctagagctcagggatttttaaaggccctgctctgagaggtggggctgttcccgctatttatagggactgggagattcctgttcccagctctgagttcctcacacccagctgggcctgctcactgagtcagggcaccctggtaggtggtcacctctgtcactccttctctctcctgcctcccctactccctcacccttccccatcccctgcatgtcatcagagttctgagacagagctcagcccagaatctccttgaagaagcggacacaaagcaaaaagctcttgccagttctgagtggggaaatgcggccttggtcctccccggctcagcttgttgcaggggctcagcctgctgggaggggggaccccttgggccctcggcctataccaccgccccgctttcgtcgggcttccagccagagggaacctccttatcccaggccagcggagccagctctggaactggctggctccaaatgccagcctgatacccctgctgccagcctctgcccggcagactcccccagccagcatcgggtgatgccaccagggcctgccagctgggcaaacgtgggctcccggccccacactgttgccaatggccatgagttgtttgaggtctcagaagagagagatgaggaggttgctgcattttgccacatgctggatatccttcgatctggctctgacatccaagactacttcctcactggctatgtctggagtgctgtcacccctagcccagagcacctcggggatgaggtcaacctgaaggtgactgtgttgtgtgacaggcttcaagaggcactcactttcacctgcaa

SEQ ID NO: 22411 - DNA, 7686 bp, Homo sapiens
  source 1..7686: mol_type = unassigned DNA
aaatttacttccccaaaacactgggacattgggatggaattcactcaccccaaatcatcaccctggttaaggagactaaagaatcagaagacatttgtgctttggggagcagaggccctcagggtatagagaaggaagaagagagaggttcactgtagtcctgaagcagaaataagacctgtggctgaaggaagccttagcaattcactccttcctcttcctgagaactctctgtaggaagtctcacctagcagaggcttcacagtatttcagagaagccaaagattgtttgcctctttggaaactgttatccttccatcatgactgtgtcactcctgccactgttccaccatagagatggcgtcctttgcagcaaaccgtaagttataaggatgagggaagaagagtagagggccaaaaggattccattttgaggaaaaactacagtttgccttgccaggtagaagaatcaggcgcccagacaccatgtcacaaccctccagaactgacgttggcaggaagtagagactttgttgcctgtgtcccccatcctcaccatgtcttcgactcagggcaatggggaacactggaagtccctggagtcagtgggcatcagccgcaaagagctagcgatggccgaagccctgcagatggagtatgatgccctgtcccggctccggcatgacaaggaggagaacagagccaagcagaacgcagacccctctctcatcagctgggatgagcctggggtagacttttacagcaagccagcaggaaggcggaccgacctcaagctgttacgcggtctctctggctctgatcctacccttaactacaactcactctccccacaggaagggccgcccaaccactctacctcccaagggccacagcctggctcagatccctggcccaaaggctccctgtctggagactatctctacatttttgatggttcagatgggggagtctcttcgtccccaggaccaggggacatagagggctcttgcaagaaactatccccacctcctctgcctccccgagcttctatctgggatacccctcccctgcctcccagaaaggggtccccctcatcctccaagatctcccagcccagtgacatcaacactttctctttggtcgaacaattgccgggcaaactgctagagcatcggatcctagaagaggaagaggtgctgggaggtgggggtcaggggcgcctactggggtctgtggactatgatggtatcaatgatgcaattactaggctcaacttgaaatcgacctatgatgcggagatgttgcgggatgccaccaggggctggaaggagggccgagggccgctggacttcagcaaagacacctctggaaaacccgtggccaggagcaagactatgccccctcaggtgcccccccgcacctatgcctcccgctatggcaaccgaaagaatgcgacgcctggcaagaaccgccggatttctgcagccccggtgggctcccggccccacactgttgccaatggccatgagttgtttgaggtctcagaagagagagatgaggaggttgctgcattttgccacatgctggatatccttcgatctggctctgacatccaagactacttcctcactggctatgtctggagtgctgtcacccctagcccagagcacctcggggatgaggtcaacctgaaggtgactgtgttgtgtgacaggcttcaagaggcactcactttcacctgcaactgttcctccactgtagacttgcttatctaccagaccctgtgctacacccatgatgacctgaggaatgtggacgtgggtgactttgtgctaaagccctgcgggctggaggagttcctgcagaacaagcatgccttgggcagtcatgagtacatccaatactgccgcaagtttgacattgacattcggctacagctgatggagcagaaggttgtgcgcagtgacctggcccggacggtgaatgatgaccagagcccctccaccttgaactacctcgtccatctccaagagaggcctgtcaagcagaccatcagcaggcaggccctgagtcttctgttcgacacttaccacaatgaggtggatgccttcctgctggctgatggagacttcccactgaaggctgacagggtggtccagtccgtcaaggccatctgcaacgccctggccgccgtggaaacccctgagatcaccagtgctctcaaccagctgcccccctgcccctcccgcatgcagcctaaaattcagaaggatcccagtgtcttggctgtgagggaaaaccgagagaaggtcgtggaagccctgaccgctgccatcttggacctggtggagctgtactgcaacacattcaacgcagacttccagacggcagtgcccgggagccgcaagcatgacctggtccaggaggcctgccatttcgccaggtccctggccttcactgtctatgccacccaccgcatccccatcatctgggctaccagctatgaagatttctacctctcctgctccctcagccatggcggcaaggagctgtgcagccccctgcagacccgaagagctcacttctccaagtacctcttccacctcatcgtctgggaccagcagatctgcttcccagtgcaggtgaaccggctgcctcgggagacactgctgtgtgccactctctatgctctgcccatccccccaccggggagctcctcagaggccaataagcagcggcgggtgcctgaagccctgggctgggtcactaccccactcttcaacttcaggcaggtcctgacctgtggccggaagcttctgggtttgtggccagcaacacaggaaaatcccagcgcccgttggagtgcacctaatttccaccagccagacagtgtcatcctgcagattgacttccccacctcggcctttgacatcaagttcaccagcccccctggagacaagttcagcccccgctatgagtttggcagcctccgggaagaagaccagcgcaagcttaaagacatcatgcagaaagagtccttgtactggctcactgatgctgacaagaagcgcctgtgggagaagcgatattactgccactcggaggtgagctcgctccccctggtgctcgccagcgcccccagctgggagtgggcttgcctgcctgacatctatgttctcctgaagcagtggacccacatgaaccaccaggatgccctggggctcctgcatgccaccttcccggaccaggaggtgcgtcgtatggctgtgcagtggattggctcactctcagatgctgagctgctagactacctgccccagctggtacaggccctgaagtatgaatgctacctggacagcccgttggtgcgcttcctcctgaaacgagctgtgtctgacttgagagtgactcactacttcttctggttactgaaggacggcctcaaggactctcagttcagcatccgctaccagtatctgctggcagccttactgtgctgctgtggcaaggggctgagagaagagtttaaccgccagtgctggcttgtcaatgccctggccaaactggcccagcaggtccgggaggcagccccatctgcaaggcagggaatcctccgcacgggcctggaggaggtgaagcagttctttgccctcaatggctcgtgccgcttgccactcagccccagtctgctggttaagggaattgtgcccagggactgttcctacttcaactccaatgctgtccccctcaaactctccttccaaaatgtggatcccctgggtgagaacatccgtgtcatcttcaagtgtggggacgaccttcgccaggacatgctaacgctgcagatgattcgcatcatgagcaagatctgggtccaggaggggctggacatgcgcatggtcatcttccgctgcttctccaccggccggggcagagggatggtggagatgatccctaatgctgagaccctgcgtaagatccaggtggagcatggggtgaccggctcgttcaaggaccggcccctggcagactggctgcagaaacacaaccctggggaggacgagtatgagaaggctgtggagaactttatctactcctgcgctggctgctgcgtggccacgtacgtcttgggcatctgtgaccgacataatgacaacatcatgctgaagaccactggtcacatgttccacattgattttggccgcttcctgggccatgcccagatgtttggcaacatcaagcgggaccgtgccccctttgtcttcacctcggacatggcgtatgtcatcaacgggggtgacaagccttccagccgcttccatgattttgttgacctttgctgccaagcctacaacctcattcgcaagcacacccacctcttcctcaaccttctgggcctgatgttgtcctgtgggatccctgaactctcagacctggaggacctcaagtatgtgtacgatgccctgaggcctcaggatacagaggccaatgccactacctacttcactaggttgattgagtccagcctgggcagtgtagccacaaagctcaattttttcatccataatctggctcagatgaagttcacgggctcagatgaccggctgaccctctcctttgcctcccgaacacacactctcaagagctctggccgaatcagtgatgttttcctctgccgccatgagaagatcttccaccccaacaaaggctatatatatgtggtaaaggtgatgcgagagaacactcacgaggccacctacatccagcggacctttgaggagttccaggaattacacaataagttgcggctgctcttcccttcttcccacttgcccagcttccctagtcgcttcgtgatcggccgctcccggggagaggcggtggccgagcggcggagggaggagctaaacggttacatctggcacttgatccacgcaccccctgaggtggccgagtgtgatttggtgtacaccttcttccacccactgccccgggatgagaaggctatgggcaccagcccagctcctaagtcctcagatggcacatgggcccggcccgtcggaaaggtgggaggggaggtgaagctgtccatctcctacaaaaacaataaactcttcatcatggtgatgcatattcggggcttgcaactgctccaggatggaaatgaccctgacccctatgtgaaaatttacctccttcctgaccctcagaaaaccactaagaggaaaaccaaagtggcccggaaaacctgcaatcctacctacaatgagatgttggtatatgatgggatccccaagggtgacctgcagcagcgggagctccagctgagcgtgctgagtgagcagggattctgggagaacgtcctcctcggtgaggtgaacatccgcctgcgagagctggacctggctcaggagaagaccggctggttcgccctgggatctcgaagtcatggcaccttgtgagcccagcagagccaccacccagcatcccaggctggtggcaggagctgggggagaggactctcccctgtgagactcctccttgtgaagggccagggccctgggcaggcctccagctcggtccaggtgattctggcctctgtggtaggaggcagggagagtaagacatgctctgctgtctcttcctctggagactgaacttgggttggttgtgatgagcagccccttggaggctgtgaggttgcagcaaagttttaagtttaccttgtgtcaagggagcaatgcttggtttggggagtgtgtggggtgggctgtatgaagtagcattttgggggtgggtgggtggatatcttaatttttatttttaaaaaatgaaatagtgatgttgtcctaactgggacaggaagccttgcgagaagggacgtacctatgccccagaaggcaagagaggaagactatttggactttttgtatgattaaggttcttattggacttttccctaggttttttttttttgttattgttgttgttgtttcgttttctagctataggaactatctggggaggggcccagtgggtcctcggccagagccctctctaaggacaggttggggagggttggggagggctgcctgtgctggactgaggcttgtgccactgggcctttctgattttgcctccaaaggagagcgctgtgatacctacatgtgtaaggaagggccttccgtattggggttctgccaaggacccgtattcagggacccatgctcttttggggggacttttcctcttgtcttccctactttattaggacttgccctgaataccattttctaccccttgcccctccattctcctggcccttctgggggtcagctggtctctatgaatatgctgggggtgcttccccataggtctctcccttcatttgtctctggtgggacaaaatactgactcagtccttagatgtagtttcacccaagagcatcttggccctgggaagaggtccctaggctgcagatgctactgactgcttgctaggtagcctctggaaagcattccccatccatcactccccacttctttctgctgtgctgcttccctcccaaactccatttctgtcaccctttttataagacttttcctcattctgtggggccataaacctatttagtctggagccaaagggatgccctatctgaaggaaaggggcatggggtgggggattccatcaaaactgttgttttttgccccatgatttttctttggtcagtaggaggctggattggagtggtgattattcccctggagctaagctcaggagcccgaagggagagactgagactgactcccttatctcttcatattctttattccctaccagatggatttttttttttttttttggagacggagtctcgccctgtcgccaggctggagtgtagtggcatgatctcgactcactgcaaaatctgcctcccgggttcaagcgattctcctacctcagcctcccgagtagctgggattacaggcatgtgccaccacgccaagctaatttttgtatttttagtagagacggggtttcaccatgttggccaggatggtctcgatctcttgacctcgtgatctgcctgccttggcctcccaaagtgctgggattacaggcgtgagccaccatgccccgccccagatggattttacatttgctcttttgtgtttcgctccaaagggttgtcttcctcgccaaaaggagggagggactttgaatttgatatgaatctttaaaaccagaattggctggatatttcccatgattgggaaaagagtgaaatgaggacattctgtaaactgtccctccctaattccaaggatcagaaactccccgttttgctgactcattccataactggagaaagaagctccattgaccgaagccacagggcagcatggaagtttaaattttctctaaaattaaaatgccaaggataaagctggctgcttccaggagggggaagaggagtggggagtgggcggtgaaacttttccagatgaacggaccataaatgtgttactggctttgtgcctgtagctcattttattatgacctatatgctcctgatttaaagagatctgtgtactgtttacttcccacttcccagaatcccttgtatctcctttctcgggaattgtattttctaataaatgacatttgagaaaaaaatgaaa

SEQ ID NO: 22412 - DNA, 2375 bp, Homo sapiens
  source 1..2375: mol_type = unassigned DNA
atgtttggcaacatcaagcgggaccgtgccccctttgtcttcacctcggacatggcgtatgtcatcaacgggggtgacaagccttccagccgcttccatgattttgttgacctttgctgccaagcctacaacctcattcgcaagcacacccacctcttcctcaaccttctgggcctgatgttgtcctgtgggatccctgaactctcagacctggaggacctcaagtatgtgtacgatgccctgaggcctcaggatacagaggccaatgccactacctacttcactagggtgattctggcctctgtggtaggaggcagggagagtaagacatgctctgctgtctcttcctctggagactgaacttgggttggttgtgatgagcagccccttggaggctgtgaggttgcagcaaagttttaagtttaccttgtgtcaagggagcaatgcttggtttggggagtgtgtggggtgggctgtatgaagtagcattttgggggtgggtgggtggatatcttaatttttatttttaaaaaatgaaatagtgatgttgtcctaactgggacaggaagccttgcgagaagggacgtacctatgccccagaaggcaagagaggaagactatttggactttttgtatgattaaggttcttattggacttttccctaggttttttttttttgttattgttgttgttgtttcgttttctagctataggaactatctggggaggggcccagtgggtcctcggccagagccctctctaaggacaggttggggagggttggggagggctgcctgtgctggactgaggcttgtgccactgggcctttctgattttgcctccaaaggagagcgctgtgatacctacatgtgtaaggaagggccttccgtattggggttctgccaaggacccgtattcagggacccatgctcttttggggggacttttcctcttgtcttccctactttattaggacttgccctgaataccattttctaccccttgcccctccattctcctggcccttctgggggtcagctggtctctatgaatatgctgggggtgcttccccataggtctctcccttcatttgtctctggtgggacaaaatactgactcagtccttagatgtagtttcacccaagagcatcttggccctgggaagaggtccctaggctgcagatgctactgactgcttgctaggtagcctctggaaagcattccccatccatcactccccacttctttctgctgtgctgcttccctcccaaactccatttctgtcaccctttttataagacttttcctcattctgtggggccataaacctatttagtctggagccaaagggatgccctatctgaaggaaaggggcatggggtgggggattccatcaaaactgttgttttttgccccatgatttttctttggtcagtaggaggctggattggagtggtgattattcccctggagctaagctcaggagcccgaagggagagactgagactgactcccttatctcttcatattctttattccctaccagatggatttttttttttttttttggagacggagtctcgccctgtcgccaggctggagtgtagtggcatgatctcgactcactgcaaaatctgcctcccgggttcaagcgattctcctacctcagcctcccgagtagctgggattacaggcatgtgccaccacgccaagctaatttttgtatttttagtagagacggggtttcaccatgttggccaggatggtctcgatctcttgacctcgtgatctgcctgccttggcctcccaaagtgctgggattacaggcgtgagccaccatgccccgccccagatggattttacatttgctcttttgtgtttcgctccaaagggttgtcttcctcgccaaaaggagggagggactttgaatttgatatgaatctttaaaaccagaattggctggatatttcccatgattgggaaaagagtgaaatgaggacattctgtaaactgtccctccctaattccaaggatcagaaactccccgttttgctgactcattccataactggagaaagaagctccattgaccgaagccacagggcagcatggaagtttaaattttctctaaaattaaaatgccaaggataaagctggctgcttccaggagggggaagaggagtggggagtgggcggtgaaacttttccagatgaacggaccataaatgtgttactggctttgtgcctgtagctcattttattatgacctatatgctcctgatttaaagagatctgtgtactgtttacttcccacttcccagaatcccttgtatctcctttctcgggaattgtattttctaataaatgacatttg

SEQ ID NO: 22413 - DNA, 846 bp, Homo sapiens
  source 1..846: mol_type = unassigned DNA
agtgcgccgggtgtccgggagatggcttcccctctctcgcccgctgctgccgctattgtctcacccggggtggcctgactctgcgagctcgcgcacgctctcggcggagagcacccctccccacccccacaagctggtccttgcgccctttgctgcctctccctctgccccttggagcctagggtctgtgcggagcctggagaggggagcggcccgggagcaggcggcgtgcggccggccagctcctctcgcgctggtgcaagaggcgcctggagccgcagagcgagcccgggaggcgcggagcgagcagcccacgtcgccaggcacaagacacgtcggatgttgcagcagagccagcagctagcgcaggcgcccagacaccatgtcacaaccctccagaactgacgttggcaggaagtagagactttgttgcctgtgtcccccatcctcaccatgtcttcgactcagggcaatggggaacactggaagtccctggagtcagtgggcatcagccgcaaagagctagcgatggccgaagccctgcagatggagtatgatgccctgtcccggctccggcatgacaaggaggagaacagagccaagcagaacgcagacccctctctcatcagctgggatgagcctggggtagacttttacagcaagccagcaggaaggcggaccgacctcaagctgttacgcggtctctctggctctgatcctacccttaactacaactcactctccccacaggaagggccgcccaaccactctacctcccaagggccacagcctggctcagatccctggcccaaaggctccctgtctggagactatctctacattttt

SEQ ID NO: 22414 - DNA, 7318 bp, Homo sapiens
  source 1..7318: mol_type = unassigned DNA
gagcagaggccctcagggtatagagaaggaagaagagagaggttcactgtagtcctgaagcagaaataagacctgtggctgaaggaagccttagcaattcactccttcctcttcctgagaactctctgtaggaagtctcacctagcagaggcttcacagtatttcagagaagccaaagattgtttgcctctttggaaactgttatccttccatcatgactgtgtcactcctgccactgttccaccatagagatggcgtcctttgcagcaaaccgtaagttataaggatgagggaagaagagtagagggccaaaaggattccattttgaggaaaaactacagtttgccttgccaggtagaagaatcaggcgcccagacaccatgtcacaaccctccagaactgacgttggcaggaagtagagactttgttgcctgtgtcccccatcctcaccatgtcttcgactcagggcaatggggaacactggaagtccctggagtcagtgggcatcagccgcaaagagctagcgatggccgaagccctgcagatggagtatgatgccctgtcccggctccggcatgacaaggaggagaacagagccaagcagaacgcagacccctctctcatcagctgggatgagcctggggtagacttttacagcaagccagcaggaaggcggaccgacctcaagctgttacgcggtctctctggctctgatcctacccttaactacaactcactctccccacaggaagggccgcccaaccactctacctcccaagggccacagcctggctcagatccctggcccaaaggctccctgtctggagactatctctacatttttgatggttcagatgggggagtctcttcgtccccaggaccaggggacatagagggctcttgcaagaaactatccccacctcctctgcctccccgagcttctatctgggatacccctcccctgcctcccagaaaggggtccccctcatcctccaagatctcccagcccagtgacatcaacactttctctttggtcgaacaattgccgggcaaactgctagagcatcggatcctagaagaggaagaggtgctgggaggtgggggtcaggggcgcctactggggtctgtggactatgatggtatcaatgatgcaattactaggctcaacttgaaatcgacctatgatgcggagatgttgcgggatgccaccaggggctggaaggagggccgagggccgctggacttcagcaaagacacctctggaaaacccgtggccaggagcaagactatgccccctcaggtgcccccccgcacctatgcctcccgctatggcaaccgaaagaatgcgacgcctggcaagaaccgccggatttctgcagccccggtgggctcccggccccacactgttgccaatggccatgagttgtttgaggtctcagaagagagagatgaggaggttgctgcattttgccacatgctggatatccttcgatctggctctgacatccaagactacttcctcactggctatgtctggagtgctgtcacccctagcccagagcacctcggggatgaggtcaacctgaaggtgactgtgttgtgtgacaggcttcaagaggcactcactttcacctgcaactgttcctccactgtagacttgcttatctaccagaccctgtgctacacccatgatgacctgaggaatgtggacgtgggtgactttgtgctaaagccctgcgggctggaggagttcctgcagaacaagcatgccttgggcagtcatgagtacatccaatactgccgcaagtttgacattgacattcggctacagctgatggagcagaaggttgtgcgcagtgacctggcccggacggtgaatgatgaccagagcccctccaccttgaactacctcgtccatctccaagagaggcctgtcaagcagaccatcagcaggcaggccctgagtcttctgttcgacacttaccacaatgaggtggatgccttcctgctggctgatggagacttcccactgaaggctgacagggtggtccagtccgtcaaggccatctgcaacgccctggccgccgtggaaacccctgagatcaccagtgctctcaaccagctgcccccctgcccctcccgcatgcagcctaaaattcagaaggatcccagtgtcttggctgtgagggaaaaccgagagaaggtcgtggaagccctgaccgctgccatcttggacctggtggagctgtactgcaacacattcaacgcagacttccagacggcagtgcccgggagccgcaagcatgacctggtccaggaggcctgccatttcgccaggtccctggccttcactgtctatgccacccaccgcatccccatcatctgggctaccagctatgaagatttctacctctcctgctccctcagccatggcggcaaggagctgtgcagccccctgcagacccgaagagctcacttctccaagtacctcttccacctcatcgtctgggaccagcagatctgcttcccagtgcaggtgaaccggctgcctcgggagacactgctgtgtgccactctctatgctctgcccatccccccaccggggagctcctcagaggccaataagcagcggcgggtgcctgaagccctgggctgggtcactaccccactcttcaacttcaggcaggtcctgacctgtggccggaagcttctgggtttgtggccagcaacacaggaaaatcccagcgcccgttggagtgcacctaatttccaccagccagacagtgtcatcctgcagattgacttccccacctcggcctttgacatcaagttcaccagcccccctggagacaagttcagcccccgctatgagtttggcagcctccgggaagaagaccagcgcaagcttaaagacatcatgcagaaagagtccttgtactggctcactgatgctgacaagaagcgcctgtgggagaagcgatattactgccactcggagtggacccacatgaaccaccaggatgccctggggctcctgcatgccaccttcccggaccaggaggtgcgtcgtatggctgtgcagtggattggctcactctcagatgctgagctgctagactacctgccccagctggtacaggccctgaagtatgaatgctacctggacagcccgttggtgcgcttcctcctgaaacgagctgtgtctgacttgagagtgactcactacttcttctggttactgaaggacggcctcaaggactctcagttcagcatccgctaccagtatctgctggcagccttactgtgctgctgtggcaaggggctgagagaagagtttaaccgccagtgctggcttgtcaatgccctggccaaactggcccagcaggtccgggaggcagccccatctgcaaggcagggaatcctccgcacgggcctggaggaggtgaagcagttctttgccctcaatggctcgtgccgcttgccactcagccccagtctgctggttaagggaattgtgcccagggactgttcctacttcaactccaatgctgtccccctcaaactctccttccaaaatgtggatcccctgggtgagaacatccgtgtcatcttcaagtgtggggacgaccttcgccaggacatgctaacgctgcagatgattcgcatcatgagcaagatctgggtccaggaggggctggacatgcgcatggtcatcttccgctgcttctccaccggccggggcagagggatggtggagatgatccctaatgctgagaccctgcgtaagatccaggtggagcatggggtgaccggctcgttcaaggaccggcccctggcagactggctgcagaaacacaaccctggggaggacgagtatgagaaggctgtggagaactttatctactcctgcgctggctgctgcgtggccacgtacgtcttgggcatctgtgaccgacataatgacaacatcatgctgaagaccactggtcacatgttccacattgattttggccgcttcctgggccatgcccagatgtttggcaacatcaagcgggaccgtgccccctttgtcttcacctcggacatggcgtatgtcatcaacgggggtgacaagccttccagccgcttccatgattttgttgacctttgctgccaagcctacaacctcattcgcaagcacacccacctcttcctcaaccttctgggcctgatgttgtcctgtgggatccctgaactctcagacctggaggacctcaagtatgtgtacgatgccctgaggcctcaggatacagaggccaatgccactacctacttcactaggttgattgagtccagcctgggcagtgtagccacaaagctcaattttttcatccataatctggctcagatgaagttcacgggctcagatgaccggctgaccctctcctttgcctcccgaacacacactctcaagagctctggccgaatcagtgatgttttcctctgccgccatgagaagatcttccaccccaacaaaggctatatatatgtggtaaaggtgatgcgagagaacactcacgaggccacctacatccagcggacctttgaggagttccaggaattacacaataagttgcggctgctcttcccttcttcccacttgcccagcttccctagtcgcttcgtgatcggccgctcccggggagaggcggtggccgagcggcggagggaggagctaaacggttacatctggcacttgatccacgcaccccctgaggtggccgagtgtgatttggtgtacaccttcttccacccactgccccgggatgagaaggctatgggcaccagcccagctcctaagtcctcagatggcacatgggcccggcccgtcggaaaggtgggaggggaggtgaagctgtccatctcctacaaaaacaataaactcttcatcatggtgatgcatattcggggcttgcaactgctccaggatggaaatgaccctgacccctatgtgaaaatttacctccttcctgaccctcagaaaaccactaagaggaaaaccaaagtggcccggaaaacctgcaatcctacctacaatgagatgttggtatatgatgggatccccaagggtgacctgcagcagcgggagctccagctgagcgtgctgagtgagcagggattctgggagaacgtcctcctcggtgaggtgaacatccgcctgcgagagctggacctggctcaggagaagaccggctggttcgccctgggatctcgaagtcatggcaccttgtgagcccagcagagccaccacccagcatcccaggctggtggcaggagctgggggagaggactctcccctgtgagactcctccttgtgaagggccagggccctgggcaggcctccagctcggtccaggtgattctggcctctgtggtaggaggcagggagagtaagacatgctctgctgtctcttcctctggagactgaacttgggttggttgtgatgagcagccccttggaggctgtgaggttgcagcaaagttttaagtttaccttgtgtcaagggagcaatgcttggtttggggagtgtgtggggtgggctgtatgaagtagcattttgggggtgggtgggtggatatcttaatttttatttttaaaaaatgaaatagtgatgttgtcctaactgggacaggaagccttgcgagaagggacgtacctatgccccagaaggcaagagaggaagactatttggactttttgtatgattaaggttcttattggacttttccctaggttttttttttttgttattgttgttgttgtttcgttttctagctataggaactatctggggaggggcccagtgggtcctcggccagagccctctctaaggacaggttggggagggttggggagggctgcctgtgctggactgaggcttgtgccactgggcctttctgattttgcctccaaaggagagcgctgtgatacctacatgtgtaaggaagggccttccgtattggggttctgccaaggacccgtattcagggacccatgctcttttggggggacttttcctcttgtcttccctactttattaggacttgccctgaataccattttctaccccttgcccctccattctcctggcccttctgggggtcagctggtctctatgaatatgctgggggtgcttccccataggtctctcccttcatttgtctctggtgggacaaaatactgactcagtccttagatgtagtttcacccaagagcatcttggccctgggaagaggtccctaggctgcagatgctactgactgcttgctaggtagcctctggaaagcattccccatccatcactccccacttctttctgctgtgctgcttccctcccaaactccatttctgtcaccctttttataagacttttcctcattctgtggggccataaacctatttagtctggagccaaagggatgccctatctgaaggaaaggggcatggggtgggggattccatcaaaactgttgttttttgccccatgatttttctttggtcagtaggaggctggattggagtggtgattattcccctggagctaagctcaggagcccgaagggagagactgagactgactcccttatctcttcatattctttattccctaccagatggatttttttttttttttttggagacggagtctcgccctgtcgccaggctggagtgtagtggcatgatctcgactcactgcaaaatctgcctcccgggttcaagcgattctcctacctcagcctcccgagtagctgggattacaggcatgtgccaccacgccaagctaatttttgtatttttagtagagacggggtttcaccatgttggccaggatggtctcgatctcttgacctcgtgatctgcctgccttggcctcccaaagtgctgggattacaggcgtgagccaccatgccccgccccagatggattttacatttgctcttttgtgtttcgctccaaagggttgtcttcctcgccaaaaggagggagggactttgaatttgatatgaatctttaaaaccagaattggctggatatttcccatgattgggaaaagagtgaaatgaggacattctgtaaactgtccctccctaattccaaggatcagaaactccccgttttgctgactcattccataactggagaaagaagctccattgaccgaagccacagggcagcatggaagtttaaattttctctaaaattaaaatgccaaggataaagctggctgcttccaggagggggaagaggagtggggagtgggcggtgaaacttttccag

SEQ ID NO: 22415 - DNA, 727 bp, Homo sapiens
  source 1..727: mol_type = unassigned DNA
ggcttcccctctctcgcccgctgctgccgctattgtctcacccggggtggcctgactctgcgagctcgcgcacgctctcggcggagagcacccctccccacccccacaagctggtccttgcgccctttgctgcctctccctctgccccttggagcctagggtctgtgcggagcctggagaggggagcggcccgggagcaggcggcgtgcggccggccagctcctctcgcgctggtgcaagaggcgcctggagccgcagagcgagcccgggaggcgcggagcgagcagcccacgtcgccaggcacaagacacgtcggatgttgcagcagagccagcagctagcgcagatggcgtcctttgcagcaaaccgtaagttataaggatgagggaagaagagtagagggccaaaaggattccattttgaggaaaaactacagtttgccttgccaggtagaagaatcaggcgcccagacaccatgtcacaaccctccagaactgacgttggcaggaagtagagactttgttgcctgtgtcccccatcctcaccatgtcttcgactcagggcaatggggaacactggaagtccctggagtcagtgggcatcagccgcaaagagctagcgatggccgaagccctgcagatggagtatgatgccctgtcccggctccggcatgacaaggaggagaacagagccaagcagaacgcagacccctctctcatcagctggg

SEQ ID NO: 22416 - DNA, 1659 bp, Homo sapiens
  source 1..1659: mol_type = unassigned DNA
atgcggccttggtcctccccggctcagcttgttgcaggggctcagcctgctgggaggggggaccccttgggccctcggcctataccaccgccccgctttcgtcgggcttccagccagagggaacctccttatcccaggccagcggagccagctctggaactggctggctccaaatgccagcctgatacccctgctgccagcctctgcccggcagactcccccagccagcatcgggtgatgccaccagggcctgccagctgggcaaacgtgggctcccggccccacactgttgccaatggccatgagttgtttgaggtctcagaagagagagatgaggaggttgctgcattttgccacatgctggatatccttcgatctggctctgacatccaagactacttcctcactggctatgtctggagtgctgtcacccctagcccagagcacctcggggatgaggtcaacctgaaggtgactgtgttgtgtgacaggcttcaagaggcactcactttcacctgcaactgttcctccactgtagacttgcttatctaccagaccctgtgctacacccatgatgacctgaggaatgtggacgtgggtgactttgtgctaaagccctgcgggctggaggagttcctgcagaacaagcatgccttgggcagtcatgagtacatccaatactgccgcaagtttgacattgacattcggctacagctgatggagcagaaggttgtgcgcagtgacctggcccggacggtgaatgatgaccagagcccctccaccttgaactacctcgtccatctccaagagaggcctgtcaagcagaccatcagcaggcaggccctgagtcttctgttcgacacttaccacaatgaggtggatgccttcctgctggctgatgtaggaaaccatcaggaggtagaaggtttcacatgtagggagggccagagccctccccacttggattcatgcggagtctcaagcctcaaaaccatgagagtcaacatttgtcttaaatgtcacaacgccaaagaaaatctgacagtgatcttcaaaaataatcccttgctgagtgtgatggcccacgcctgtaatcctaaccctttgggaaactgaggtgggagaattgcttgaaccccaaagttcaaggccagcctgggcaacacagcaagaccccatctctacaaaaaatacaaaagttagccagggagacttcccactgaaggctgacagggtggtccagtccgtcaaggccatctgcaacgccctggccgccgtggaaacccctgagatcaccagtgctctcaaccagctgcccccctgcccctcccgcatgcagcctaaaattcagaaggatcccagtgtcttggctgtgagggaaaaccgagagaaggtcgtggaagccctgaccgctgccatcttggacctggtggagctgtactgcaacacattcaacgcagacttccagacggcagtgcccgggagccgcaagcatgacctggtccaggaggcctgccatttcgccaggtccctggccttcactgtctatgccacccaccgcatccccatcatctgggctaccagctatgaagatttctacctctcctgctccctcagccatggcggcaaggagctgtgcagccccctgcagacccgaag

SEQ ID NO: 22417 - DNA, 4754 bp, Homo sapiens
  source 1..4754: mol_type = unassigned DNA
ggagcagagtcaaccctctcagttacataaaataaaaaatggcatattcttggcaaacggatccaaatcctaatgaatcacacgaaaagcagtatgaacaccaagaatttctctttgtaaatcaaccccattcttctagccaagtcagtctgggttttgatcagatagtagatgagatcagtggcaaaattccacactacgagagtgaaattgatgaaaacaccttttttgtgcccactgcaccaaaatgggactcaacagggcattcattaaatgaagcacaccaaatatccttgaatgaattcacttctaaaagccgtgaactctcctggcatcaagttagcaaagcaccagcaattggttttagtccttctgtgttaccaaaacctcaaaatacgaataaagaatgctcctggggaagccccataggaaaacatcatggtgctgatgattccagattcagtattttagctccatcattcacaagtttggataaaattaatctagagaaagaattagaaaatgaaaatcataactaccatataggatttgaaagtagcattcctccaacaaattcatccttctcaagtgacttcatgccgaaagaagagaataaaaggagtggacatgtgaacattgtggaaccatctttgatgcttttgaaaggctctcttcaacccggaatgtgggaaagtacatggcagaagaatatagagtcaataggttgttccattcagctagtggaagtacctcaaagcagcaatacgagtctggcctctttttgcaacaaagtaaaaaaaatcagagaaagatatcatgcagctgatgttaatttcaattctgggaagatctggagcactactacagcatttccgtatcagctcttttctaagaccaagtttaatatacatatttttattgataactcaacacaacctcttcattttatgccatgtgctaattatcttgtcaaagatctaattgcagaaattctgcatttttgcacaaatgaccagctactccccaaagatcatattctaagtgtatgtggctctgaagaatttttacaaaacgaccactgtttggggagccacaaaatgtttcaaaaagataaatctgttattcagctccacctgcagaaaagtagggaagctccaggaaagctatctcgaaagcatgaagaggaccacagtcagttttatctgaatcaacttctagaatttatgcatatttggaaagtatccagacaatgtctcttaacactcatcagaaaatatgacttccacctgaaatacctattgaaaacccaggaaaacgtgtataatattattgaagaagttaaaaaaatatgcagtgttctagggtgtgtggaaaccaaacaaattacagatgcagtaaatgaactaagtctaattcttcagagaaaaggagagaatttttatcaaagttcagagacttcagcaaaaggcttgatagagaaggtaacaactgaactatccacatccatctaccagctaatcaatgtctactgtaacagcttttatgcagattttcagcctgtaaatgtacctagatgcacttcctatctaaatcccgggcttccttcccacctcagcttcacagtgtatgcagcacacaacattccagaaacctgggtgcacaggatcaattttccccttgaaataaagtcacttccaagggaatccatgctcactgtaaaactgtttgggattgcctgtgcaaccaacaatgcaaatttactggcgtggacttgtcttccactgtttccaaaagaaaaatccattctcgggtctatgctgttcagcatgacattacagagtgagcctcccgtagaaatgataactccaggagtgtgggatgtaagtcagccatccccggtgaccctgcagattgattttccagctactgggtgggagtatatgaaacctgattctgaagagaatagaagtaatcttgaagagccactaaaggagtgtataaaacatattgccagactttcacagaaacagactcccctactactctctgaagaaaagaaaagatatttatggttttatcgcttctactgcaataatgaaaactgctcccttcctttagtcctgggtagtgcccctggatgggatgaaaggactgtttcagaaatgcataccattttgagaagatggacattttctcaacctttagaggctcttgggcttttgacttccagttttccagatcaagaaattcgtaaagtggcagttcaacaattagacaacctcttgaatgatgaactactggaatatctcccacagctagttcaggctgtcaagtttgaatggaaccttgagagtcctttagtgcaacttctactccaccgctccttgcagagcatccaggttgcccatcgtctttactggctgctaaaaaatgcagaaaatgaagcttattttaaaagctggtatcagaagctactagctgctctccaattctgtgcaggtaaagccttgaatgatgagttttccaaggagcagaaacttatcaaaattctgggagatattggggaaagagtcaagtctgccagtgaccatcaaagacaggaggtactgaagaaagaaattggcagactagaagagttctttcaagatgtaaatacttgtcatcttcctctgaaccctgccctatgtataaaagggattgatcacgatgcatgttcatattttacatctaatgctttgccattgaagattactttcatcaatgctaatccgatgggcaaaaacatcagcattatttttaaggctggagatgatcttcgtcaggatatgcttgttctgcagcttattcaagtgatggacaatatttggctgcaggaaggcttggatatgcaaatgatcatttatagatgtctatccacaggaaaagaccaaggattggtgcagatggtacctgatgctgtgaccctagcaaagattcatcgccattctggactgataggaccattgaaagaaaatacaattaaaaagtggttcagtcagcacaaccacttaaaggcagattatgaaaaggccttgaggaactttttctactcctgtgctggctggtgtgtggtaacattcatcctgggagtatgtgaccgtcacaatgataatatcatgctgacaaagtcgggccacatgtttcatattgactttggaaaattcttaggtcatgcacaaacatttggagggataaaaagggaccgagctcctttcatttttacttcagagatggaatactttattacagagggtgggaaaaacccacagcattttcaagattttgtggaactttgctgtcgtgcttataatattatcagaaagcacagccaactgctcttgaacctgctggaaatgatgctgtatgcaggactgcctgagctaagtggaattcaagacctgaaatatgtgtataataatcttcgtccacaagacacagacctggaagcaacaagtcattttaccaagaaaataaaggaaagtctggagtgtttccctgttaaattgaataacttgatccacacacttgcacaaatgtcagccataagccctgccaaatctacttcacagacttttcctcaggaatcctgtttgctgagtacaactaggtcgattgaaagagcaacaattttagggttcagcaagaaatccagtaatctgtatctgatccaggtgacacacagcaacaacgaaacaagcctgacagaaaaatcatttgagcagttttcaaaacttcacagccaacttcagaagcagtttgcatcactgactctcccagagtttcctcattggtggcacctaccttttacaaattcagatcacagaagattcagagatctaaatcattacatggaacagatattaaatgtatcacatgaagttacaaacagtgattgtgtacttagctttttcctctctgaggctgtgcaacaaacagttgaagaatcatcacctgtgtacctaggtgagaagtttccagacaagaagcctaaggtgcagttagtcatatcctacgaggatgtgaagctgaccatactagtgaaacacatgaaaaacattcatctcccagatggctctgcgcccagtgcacatgttgaattttatcttttaccatatcccagtgaagttcgtaggaggaaaacaaaatctgttccaaaatgtacggaccccacttacaatgaaattgtagtatatgatgaagtcacagagctccaaggacatgtcttaatgcttattgtgaagagtaaaactgtatttgtgggagcaattaacatccgactctgtagtgtcccactcgataaagaaaaatggtatccattaggaaacagtataatttgaccattgctatgaacatatgcattattcattaactacttgtatttttttcacttctgggcctctgaatcacataagtaaggcatctttgttgtcaaagacagcacagggtattaaggacacagaaaaaaaatcagaattagtcttttgtgttgtttattttctacctgtgctttcattgttttttcataatcttttctccttcagtggagtactgattgcatgaaatttgatgtgtaaaataataaaagacctttattaaatcattttaatatattttaaattaaacataggtttacatttgttttaattgtgtgcctacagttaaaagcagtatttttaatgtattttataagaaagacaatcaaataaacctcatca

SEQ ID NO: 22418 - DNA, 4840 bp, Homo sapiens
  source 1..4840: mol_type = unassigned DNA
tgagatcgtgtttcatttcaggaagatatatgcgtcaggaaaatttctatcttcttttgtattatcaaggagatatttggagcagagtcaaccctctcagttacataaaataaaaaatggcatattcttggcaaacggatccaaatcctaatgaatcacacgaaaagcagtatgaacaccaagaatttctctttgtaaatcaaccccattcttctagccaagtcagtctgggttttgatcagatagtagatgagatcagtggcaaaattccacactacgagagtgaaattgatgaaaacaccttttttgtgcccactgcaccaaaatgggactcaacagggcattcattaaatgaagcacaccaaatatccttgaatgaattcacttctaaaagccgtgaactctcctggcatcaagttagcaaagcaccagcaattggttttagtccttctgtgttaccaaaacctcaaaatacgaataaagaatgctcctggggaagccccataggaaaacatcatggtgctgatgattccagattcagtattttagctccatcattcacaagtttggataaaattaatctagagaaagaattagaaaatgaaaatcataactaccatataggatttgaaagtagcattcctccaacaaattcatccttctcaagtgacttcatgccgaaagaagagaataaaaggagtggacatgtgaacattgtggaaccatctttgatgcttttgaaaggctctcttcaacccggaatgtgggaaagtacatggcagaagaatatagagtcaataggttgttccattcagctagtggaagtacctcaaagcagcaatacgagtctggcctctttttgcaacaaagtaaaaaaaatcagagaaagatatcatgcagctgatgttaatttcaattctgggaagatctggagcactactacagcatttccgtatcagctcttttctaagaccaagtttaatatacatatttttattgataactcaacacaacctcttcattttatgccatgtgctaattatcttgtcaaagatctaattgcagaaattctgcatttttgcacaaatgaccagctactccccaaagatcatattctaagtgtatgtggctctgaagaatttttacaaaacgaccactgtttggggagccacaaaatgtttcaaaaagataaatctgttattcagctccacctgcagaaaagtagggaagctccaggaaagctatctcgaaagcatgaagaggaccacagtcagttttatctgaatcaacttctagaatttatgcatatttggaaagtatccagacaatgtctcttaacactcatcagaaaatatgacttccacctgaaatacctattgaaaacccaggaaaacgtgtataatattattgaagaagttaaaaaaatatgcagtgttctagggtgtgtggaaaccaaacaaattacagatgcagtaaatgaactaagtctaattcttcagagaaaaggagagaatttttatcaaagttcagagacttcagcaaaaggcttgatagagaaggtaacaactgaactatccacatccatctaccagctaatcaatgtctactgtaacagcttttatgcagattttcagcctgtaaatgtacctagatgcacttcctatctaaatcccgggcttccttcccacctcagcttcacagtgtatgcagcacacaacattccagaaacctgggtgcacaggatcaattttccccttgaaataaagtcacttccaagggaatccatgctcactgtaaaactgtttgggattgcctgtgcaaccaacaatgcaaatttactggcgtggacttgtcttccactgtttccaaaagaaaaatccattctcgggtctatgctgttcagcatgacattacagagtgagcctcccgtagaaatgataactccaggagtgtgggatgtaagtcagccatccccggtgaccctgcagattgattttccagctactgggtgggagtatatgaaacctgattctgaagagaatagaagtaatcttgaagagccactaaaggagtgtataaaacatattgccagactttcacagaaacagactcccctactactctctgaagaaaagaaaagatatttatggttttatcgcttctactgcaataatgaaaactgctcccttcctttagtcctgggtagtgcccctggatgggatgaaaggactgtttcagaaatgcataccattttgagaagatggacattttctcaacctttagaggctcttgggcttttgacttccagttttccagatcaagaaattcgtaaagtggcagttcaacaattagacaacctcttgaatgatgaactactggaatatctcccacagctagttcaggctgtcaagtttgaatggaaccttgagagtcctttagtgcaacttctactccaccgctccttgcagagcatccaggttgcccatcgtctttactggctgctaaaaaatgcagaaaatgaagcttattttaaaagctggtatcagaagctactagctgctctccaattctgtgcaggtaaagccttgaatgatgagttttccaaggagcagaaacttatcaaaattctgggagatattggggaaagagtcaagtctgccagtgaccatcaaagacaggaggtactgaagaaagaaattggcagactagaagagttctttcaagatgtaaatacttgtcatcttcctctgaaccctgccctatgtataaaagggattgatcacgatgcatgttcatattttacatctaatgctttgccattgaagattactttcatcaatgctaatccgatgggcaaaaacatcagcattatttttaaggctggagatgatcttcgtcaggatatgcttgttctgcagcttattcaagtgatggacaatatttggctgcaggaaggcttggatatgcaaatgatcatttatagatgtctatccacaggaaaagaccaaggattggtgcagatggtacctgatgctgtgaccctagcaaagattcatcgccattctggactgataggaccattgaaagaaaatacaattaaaaagtggttcagtcagcacaaccacttaaaggcagattatgaaaaggccttgaggaactttttctactcctgtgctggctggtgtgtggtaacattcatcctgggagtatgtgaccgtcacaatgataatatcatgctgacaaagtcgggccacatgtttcatattgactttggaaaattcttaggtcatgcacaaacatttggagggataaaaagggaccgagctcctttcatttttacttcagagatggaatactttattacagagggtgggaaaaacccacagcattttcaagattttgtggaactttgctgtcgtgcttataatattatcagaaagcacagccaactgctcttgaacctgctggaaatgatgctgtatgcaggactgcctgagctaagtggaattcaagacctgaaatatgtgtataataatcttcgtccacaagacacagacctggaagcaacaagtcattttaccaagaaaataaaggaaagtctggagtgtttccctgttaaattgaataacttgatccacacacttgcacaaatgtcagccataagccctgccaaatctacttcacagacttttcctcaggaatcctgtttgctgagtacaactaggtcgattgaaagagcaacaattttagggttcagcaagaaatccagtaatctgtatctgatccaggtgacacacagcaacaacgaaacaagcctgacagaaaaatcatttgagcagttttcaaaacttcacagccaacttcagaagcagtttgcatcactgactctcccagagtttcctcattggtggcacctaccttttacaaattcagatcacagaagattcagagatctaaatcattacatggaacagatattaaatgtatcacatgaagttacaaacagtgattgtgtacttagctttttcctctctgaggctgtgcaacaaacagttgaagaatcatcacctgtgtacctaggtgagaagtttccagacaagaagcctaaggtgcagttagtcatatcctacgaggatgtgaagctgaccatactagtgaaacacatgaaaaacattcatctcccagatggctctgcgcccagtgcacatgttgaattttatcttttaccatatcccagtgaagttcgtaggaggaaaacaaaatctgttccaaaatgtacggaccccacttacaatgaaattgtagtatatgatgaagtcacagagctccaaggacatgtcttaatgcttattgtgaagagtaaaactgtatttgtgggagcaattaacatccgactctgtagtgtcccactcgataaagaaaaatggtatccattaggaaacagtataatttgaccattgctatgaacatatgcattattcattaactacttgtatttttttcacttctgggcctctgaatcacataagtaaggcatctttgttgtcaaagacagcacagggtattaaggacacagaaaaaaaatcagaattagtcttttgtgttgtttattttctacctgtgctttcattgttttttcataatcttttctccttcagtggagtactgattgcatgaaatttgatgtgtaaaataataaaagacctttattaaatcattttaatatattttaaattaaacataggtttacatttgttttaattgtgtgcctacagttaaaagcagtatttttaatgtattttataagaaagacaatcaaataaacctcatcaattaattc

SEQ ID NO: 22419 - DNA, 4566 bp, Homo sapiens
  source 1..4566: mol_type = unassigned DNA
ggagcagagtcaaccctctcagttacataaaataaaaaatggcatattcttggcaaacggatccaaatcctaatgaatcacacgaaaagcagtatgaacaccaagaatttctctttgtaaatcaaccccattcttctagccaagtcagtctgggttttgatcagatagtagatgagatcagtggcaaaattccacactacgagagtgaaattgatgaaaacaccttttttgtgcccactgcaccaaaatgggactcaacagggcattcattaaatgaagcacaccaaatatccttgaatgaattcacttctaaaagccgtgaactctcctggcatcaagttagcaaagcaccagcaattggttttagtccttctgtgttaccaaaacctcaaaatacgaataaagaatgctcctggggaagccccataggaaaacatcatggtgctgatgattccagattcagtattttagctccatcattcacaagtttggataaaattaatctagagaaagaattagaaaatgaaaatcataactaccatataggatttgaaagtagcattcctccaacaaattcatccttctcaagtgacttcatgccgaaagaagagaataaaaggagtggacatgtgaacattgtggaaccatctttgatgcttttgaaaggctctcttcaacccggaatgtgggaaagtacatggcagaagaatatagagtcaataggttgttccattcagctagtggaagtacctcaaagcagcaatacgagtctggcctctttttgcaacaaagtaaaaaaaatcagagaaagatatcatgcagctgatgttaatttcaattctgggaagatctggagcactactacagcatttccgtatcagctcttttctaagaccaagtttaatatacatatttttattgataactcaacacaacctcttcattttatgccatgtgctaattatcttgtcaaagatctaattgcagaaattctgcatttttgcacaaatgaccagctactccccaaagatcatattctaagtgtatgtggctctgaagaatttttacaaaacgaccactgtttggggagccacaaaatgtttcaaaaagataaatctgttattcagctccacctgcagaaaagtagggaagctccaggaaagctatctcgaaagcatgaagaggaccacagtcagttttatctgaatcaacttctagaatttatgcatatttggaaagtatccagacaatgtctcttaacactcatcagaaaatatgacttccacctgaaatacctattgaaaacccaggaaaacgtgtataatattattgaagaagttaaaaaaatatgcagtgttctagggtgtgtggaaaccaaacaaattacagatgcagtaaatgaactaagtctaattcttcagagaaaaggagagaatttttatcaaagttcagagacttcagcaaaaggcttgatagagaaggtaacaactgaactatccacatccatctaccagctaatcaatgtctactgtaacagcttttatgcagattttcagcctgtaaatgtacctagatgcacttcctatctaaatcccgggcttccttcccacctcagcttcacagtgtatgcagcacacaacattccagaaacctgggtgcacagctacaaagcgttttcttttacctgttggcttacatatgctggaaagaagctgtgccaagtgagaaactacagaaatattccagacaagaaattattttttttcttggtcaactggaatgaaacgatcaattttccccttgaaataaagtcacttccaagggaatccatgctcactgtaaaactgtttgggattgcctgtgcaaccaacaatgcaaatttactggcgtggacttgtcttccactgtttccaaaagaaaaatccattctcgggtctatgctgttcagcatgacattacagagtgagcctcccgtagaaatgataactccaggagtgtgggatgtaagtcagccatccccggtgaccctgcagattgattttccagctactgggtgggagtatatgaaacctgattctgaagagaatagaagtaatcttgaagagccactaaaggagtgtataaaacatattgccagactttcacagaaacagactcccctactactctctgaagaaaagaaaagatatttatggttttatcgcttctactgcaataatgaaaactgctcccttcctttagtcctgggtagtgcccctggatgggatgaaaggactgtttcagaaatgcataccattttgagaagatggacattttctcaacctttagaggctcttgggcttttgacttccagttttccagatcaagaaattcgtaaagtggcagttcaacaattagacaacctcttgaatgatgaactactggaatatctcccacagctagttcaggctgtcaagtttgaatggaaccttgagagtcctttagtgcaacttctactccaccgctccttgcagagcatccaggttgcccatcgtctttactggctgctaaaaaatgcagaaaatgaagcttattttaaaagctggtatcagaagctactagctgctctccaattctgtgcaggtaaagccttgaatgatgagttttccaaggagcagaaacttatcaaaattctgggagatattggggaaagagtcaagtctgccagtgaccatcaaagacaggaggtactgaagaaagaaattggcagactagaagagttctttcaagatgtaaatacttgtcatcttcctctgaaccctgccctatgtataaaagggattgatcacgatgcatgttcatattttacatctaatgctttgccattgaagattactttcatcaatgctaatccgatgggcaaaaacatcagcattatttttaaggctggagatgatcttcgtcaggatatgcttgttctgcagcttattcaagtgatggacaatatttggctgcaggaaggcttggatatgcaaatgatcatttatagatgtctatccacaggaaaagaccaaggattggtgcagatggtacctgatgctgtgaccctagcaaagattcatcgccattctggactgataggaccattgaaagaaaatacaattaaaaagtggttcagtcagcacaaccacttaaaggcagattatgaaaaggccttgaggaactttttctactcctgtgctggctggtgtgtggtaacattcatcctgggagtatgtgaccgtcacaatgataatatcatgctgacaaagtcgggccacatgtttcatattgactttggaaaattcttaggtcatgcacaaacatttggagggataaaaagggaccgagctcctttcatttttacttcagagatggaatactttattacagagggtgggaaaaacccacagcattttcaagattttgtggaactttgctgtcgtgcttataatattatcagaaagcacagccaactgctcttgaacctgctggaaatgatgctgtatgcaggactgcctgagctaagtggaattcaagacctgaaatatgtgtataataatcttcgtccacaagacacagacctggaagcaacaagtcattttaccaagaaaataaaggaaagtctggagtgtttccctgttaaattgaataacttgatccacacacttgcacaaatgtcagccataagccctgccaaatctacttcacagacttttcctcaggaatcctgtttgctgagtacaactaggtcgattgaaagagcaacaattttagggttcagcaagaaatccagtaatctgtatctgatccaggtgacacacagcaacaacgaaacaagcctgacagaaaaatcatttgagcagttttcaaaacttcacagccaacttcagaagcagtttgcatcactgactctcccagagtttcctcattggtggcacctaccttttacaaattcagatcacagaagattcagagatctaaatcattacatggaacagatattaaatgtatcacatgaagttacaaacagtgattgtgtacttagctttttcctctctgaggctgtgcaacaaacagttgaagaatcatcacctgtgtacctaggtgagaagtttccagacaagaagcctaaggtgcagttagtcatatcctacgaggatgtgaagctgaccatactagtgaaacacatgaaaaacattcatctcccagatggctctgcgcccagtgcacatgttgaattttatcttttaccatatcccagtgaagttcgtaggaggaaaacaaaatctgttccaaaatgtacggaccccacttacaatgaaattgtagtatatgatgaagtcacagagctccaaggacatgtcttaatgcttattgtgaagagtaaaactgtatttgtgggagcaattaacatccgactctgtagtgtcccactcgataaagaaaaatggtatccattaggaaacagtataatttgaccattgctatgaacatatgcattattcattaactacttgtatttttttcacttctgggcctctgaat

SEQ ID NO: 22420 - DNA, 3466 bp, Homo sapiens
  source 1..3466: mol_type = unassigned DNA
agttgctgggattcacaacacactgacttctggacgtggtcagggtggctttctctggctggcatggacttgagcagaaactcattgccggcttcctccttgcacgagcaccaagtgattcccaggtcccccatcctcccctgggacatcgaggacacacaaaaaccttgttcaccctccactgagagcggggctagagatggatgctgagtacaggaagggtgtgtgaggattcctttggctccactcttgtttccaactattgctggtcctaggcgcccagtcctgagcaaccatgacgatggagactctccccaaggttctagaggtcgatgagaagtctccagaagccaaggacctgctgcccagccagaccgccagctccctgtgcatcagctccaggagcgagtctgtctggaccaccacccccaggagtaactgggaaatctaccgcaagcccatcgttatcatgtcagtgggcggtgccatcctgcttttcggcgtggtcatcacctgcttggcctacaccttgaagctgagtgacaagagtctctccatcctcaaaatggtagggcctggcttcctgtccctgggactcatgatgctggtgtgcgggctggtgtgggtgcccatcatcaaaaagaaacagaagcacagacagaagtcgaatttcttacgcagcctcaagtccttcttcctgactcgctgatggtggtttccgcatctccctgccaccttgactgggagaagatctgatgaccaacatccgacatccctgtctcctctgtggggtgccataaaactgatccaggaaaatgctcttcctgaccctgtggggaagatagagcttggggctccaccctccatgcagccgggaatgttgccagatgtatccacttgatctctattctgactgatgcttccttggatcccggctgtggccttccctttggtcactctaaccccctgcccctgcatccaggcatcattcatccaactctctctgccaagtgcaatgcatgctgggaaattcttcgaaggtgggctatgcccaagggagaacctcatgtttacatatctgagtgccagagctggattcttcatttgcatacttctggaaccaaaactgacccacggaggtcctttacagaggagggagggatggctgagctctgacccattgggtttgacagccctagctcccttagcagactttcaagatcacaagtatcaaacattccaaagactgaacaatgaagggaggcctgggaaaaatactctccaagatggcacgtgcccctggacatgacaacatgactctaggggttagtcagctgaagaagtttagttcctaattatataatatttacatcagaggcagtggggtaggctaggggatgtcactgtttccgcttgaccttatctttctcattgaccactgtcttctctgaacttgatcattagccaaggacaaaatgcatgttgccctaatttctttcctacccctgcctctatctctgcatctagaacagctaaatggaaagatacagagggatcctgtaaggttgttttccctttcacgtccatcaagatcaaaattgagagaatcaagttccatatctgaatgatctgtaggtttctagagatggaattcacgtcagaaaattccaacttctgttatccctgcccccacccaccaaaaaagccaacatttattaagtgtcgcattctgggataagccctggctgggggcaagacacggtccctgatgtcttcttgcttcccgaggtgagagaggcagccaagccaactggcgaaatgtgggtgggtgtgggaacacaggcggtgtctaccctagacttgatagaggacggagaaattcctggaggccatgtcctccaacccaaaaacaaaaggaaagataagagttaccaaagaggggaaagaatggcattggaagcagcaggagctgctatgcgtgtgcaggagtagcttggggaaggagaagcatgatggaattaggaaactgcacggccatttgtctgacctcccagatgtttttacttcatccctctctttcccggcttcccacctcttcaccaagtgcctagcgcagcttctcctggaggcacattgagggcctcctggtgtctatggtagagacgggaagtgggtttccagagggcctggcaagcaaagagtccctgagaagtgcttctgtaactccctgtggcaaccaagaggcccgtaggtgaaagaacagaagcagtacctgtgagggagccagccacgctgccctaggccaaagacccctggagagcatttggtaatgaggtgtgagaggagagcatcctgcaccagaatcacccttgtcttgagctaattctcttcactcctcagccttgtggccttcccagtcaccatggccctccagatatccccatcctgcatggcagttccatatgcagagccagaatccatccttgttccttctgcattgtgagaaaatccatggaggaaagcacttgtgtcatggggaccacccctacctgacccacccacggagtcagagtttggggaactcatggccgttgaggctcacccaggatggccatagccttcatggagacccatgccagtgtggccatgtctctagctcacctctagccctgcacacaggtggtcaggaccaatcttgggagtgttgcaagtgctatgtcgttaattgtagttttagtgcctcagtgacaaaccttgcagatcatttcccttcttctgagatgaatgcagatttgatggccctataatattactcttgcattcctcgatgcattcttaaatgggagcaaatgggatgggccccagatcactcactggaaacccacactccaggtgcctcatttcctctgcccaggagattgtagcctgggcacagctatatgaggagggcccatttggatactgctatcatggatgtcttagtggaaggaagtttagggataaccacaactctagaagtccaggttctggactcactttgcagactctagcagtacctgcctccattccctgcccactcaagctagtttctcagcaaagagaatatgaggaaatatccccaaacatcgtcatccccactgggatcctccacatgagtgtgggctggaaaggttccagggtcacactgaggcaggacattttttgccaatgcctgttaccccatggaaggctgaggtacggatgcacctgatctggaaatgcagcccaggtcagactccacatttctgcaacaaagcatcacctgcaatgactcttttcacgtcagtgggtcaaaggacagaaccagcttccgtgttttaggctcactagattgtctcatgctccccatggctattctgtttgggagaatttgatctaacccgaagcctaaaggaatcaatgtaatgttgaattgtattctatgtaa

SEQ ID NO: 22421 - DNA, 1794 bp, Homo sapiens
  source 1..1794: mol_type = unassigned DNA
agtgtagcctgagtcagccggagggtctgatccactctttggcaactcatccccaccaccatggccactacacacctccaccaacccagaaactccaggtcctctgatttctgagcctgggtcaggagaagctgccctgcccaggcaccaacggaacgcacgcctccatgaaacttgaagacagactgcagagaagcatcatgaatttttcacaagattcatctaattgtggctgagcagagctgagaaagccacagtccgaggacccatgccagcagctcacaaagagttaacccattaggccattgcctggtgagctcatccatccctgctggagcctgctcagttgctgggattcacaacacactgacttctggacgtggtcagggtggctttctctggctggcatggacttgagcagaaactcattgccggcttcctccttgcacgagcaccaagtgattcccaggtcccccatcctcccctgggacatcgaggacacacaaaaaccttgttcaccctccactgagagcggggctagagatggatgctgagtacaggaagggtgtgtgaggattcctttggctccactcttgtttccaactattgctggtcctaggcgcccagtcctgagcaaccatgacgatggagactctccccaaggttctagaggtcgatgagaagtctccagaagccaaggacctgctgcccagccagaccgccagctccctgtgcatcagctccaggagcgagtctgtctggaccaccacccccaggagtaactgggaaatctaccgcaagcccatcgttatcatgtcagtgggcggtgccatcctgcttttcggcgtggtcatcacctgcttggcctacaccttgaagctgagtgacaagagtctctccatcctcaaaatggtagggcctggcttcctgtccctgggactcatgatgctggtgtgcgggctggtgtgggtgcccatcatcaaaaagaaacagaagcacagacagaagtcgaatttcttacgcagcctcaagtccttcttcctgactcgctgatggtggtttccgcatctccctgccaccttgactgggagaagatctgatgaccaacatccgacatccctgtctcctctgtggggtgccataaaactgatccaggaaaatgctcttcctgaccctgtggggaagatagagcttggggctccaccctccatgcagccgggaatgttgccagatgtatccacttgatctctattctgactgatgcttccttggatcccggctgtggccttccctttggtcactctaaccccctgcccctgcatccaggcatcattcatccaactctctctgccaagtgcaatgcatgctgggaaattcttcgaaggtgggctatgcccaagggagaacctcatgtttacatatctgagtgccagagctggattcttcatttgcatacttctggaaccaaaactgacccacggaggtcctttacagaggagggagggatggctgagctctgacccattgggtttgacagccctagctcccttagcagactttcaagatcacaagtatcaaacattccaaagactgaacaatgaagggaggcctgggaaaaatactctccaagatggcacgtgcccctggacatgacaacatgactctaggggttagtcagctgaagaagtttagttcctaattatataatatttacatcagaggcagtggggtaggctaggggatgtcactgtttccgcttgaccttatctttctcattgaccactgtcttctctg

SEQ ID NO: 22422 - DNA, 2001 bp, Homo sapiens
  source 1..2001: mol_type = unassigned DNA
aaactgggtgacagagtcagaaaactccccagctaaacacccgtaagacttcatacaacacaatactctatactgtgatgatcacagctgccaaggctacctaaaagaagacagttatctcatatttggctgccagctttttatctttctctcgaccacttaaaacttcagacttcctgtcctgctggtatcatggagaaagtccaatacctcactcgctcagctataagaagagcctcaaccattgaaatgcctcaacaagcacgtcaaaagctacagaatctatttatcaatttctgtctcatcttaatatgtctcttgctgatctgtatcatcgtgatgcttctctgaagttctgctacaacctctagatctgcagcttgccacatcagcttaaaatctgtcatcccatgcagacaggaaaacaatattgtataacagaccacttcctgagtagaagagtttctttgtgaaaaggtcaagattaagactaaaacttattgttaccatatgtattcatctgttggatcttgtaaacatgaaaagggctttattttcaaaaattaacttcaaaataagtgtataaaatgcaactgttgatttcctcaacatggctcacaaatttctatcccaaatcttttctgaagatgaagagtttagttttaaaactgcactgccaacaagttcacttcatatataaagcattatttttactcttttgaggtgaatataatttatattacaatgtaaaagcttctttaatactaagtatttttcaggtcttcaccaagtatcaaagtaataacacaaatgaagtgtcattattcaaaatagtccactgactcctcacatctgttatcttattataaagaactatttgtagtaactatcagaatctacattctaaaacagaaattgtattttttctatgccacattaacatcttttaaagttgatgagaatcaagtatggaaaagtaaggccatactcttacataataaaattccttttaagtaattttttcaaagaatcacagaattctagtacatgtaggtaaatcataaatctgttctaagacatatgatcaacagatgagaactggtggttaatatgtgacagtgagattagtcatatcactaatatactaacaacagaatctaatcttcatttaaggcactgtagtgaattatctgagctagagttacctagcttaccatactatatctttggaatcatgaaaccttaagacttcagaatgattttgcaggttgtcttccattccagcctaacatccaatgcaggcaaggaaaataaaagatttccagtgacagaaaaatatattatctcaagtattttttaaaaatatatgaattctctctccaaatattaactaattattagattatattttgaaatgaacttgttggcccatctattacatctacagctgacccttgaacatgggggttaggggagctgacaattcgtgggtccgcaaaatcttaactacctaatagcctactattgaccataaaccttactgataacataaacagtaaattaacacatattttgcgtgttatatgtattatacactatattcctacaataaagtaagctagagaaaatgttatttagaaaatcataagaaagagaaaatatatttactattcattaaatggaagtgggtcaacataaaagtcttcattctcattgtcttcacattgagtaggcagaggaggagaaagatggggaggaagagaaggcgttggtcttgcagtcttgtcttaggggtgtggggagtgggggaaagaatattcatgtataagtggacccttgcaattcaagcccttgttgttcaagggtcaactgtaataggatatagctatttttcttcctctatcaaccaaatggtaagcatctattttgcagtccactctactgagctaaattatagatccagctatgctatttataattattttcttgatgaataaattt

SEQ ID NO: 22423 - DNA, 1786 bp, Homo sapiens
  source 1..1786: mol_type = unassigned DNA
gaggctgggttatatgatctctttggctttagggaattactccataccagctctgagatttccagctcagcgatgcccccaggtccctgggagagctgcttctgggtggggggcctcattttgtggctcagcgttggaagttcaggggatgcacctcctaccccacagccaaagtgcgctgacttccagagcgccaacctttttgaaggcaccgatctcaaagtccagtttctcctctttgtcccttcgaatcctagctgtgggcagctagtagaaggaagcagtgacctccaaaactctgggttcaatgccactctgggaaccaaactaattatccatggattcagggttttaggaacaaagccttcctggattgacacatttattagaacccttctgcgtgcaacgaatgctaatgtgattgccgtggactggatttatgggtctacaggagtctacttctcagctgtgaaaaatgtgattaagttgagcctcgagatctcccttttcctcaataaactcctggtgctgggtgtgtcggaatcctcaatccacatcattggtgttagcctgggggcccacgttgggggcatggtgggacagctcttcggaggccagctgggacagatcacaggcctggaccccgctggacctgagtacaccagggccagtgtggaagagcgcttggatgctggagatgccctcttcgtggaagccatccacacagacaccgacaatttgggtattcggattcccgttggacatgtggactacttcgtcaacggaggccaagaccaacctggctgccccaccttcttttacgcaggttatagttatctgatctgtgatcacatgagggctgtgcacctctacatcagcgccctggagaattcctgtccactgatggcctttccctgtgccagctacaaggccttccttgctggacgctgtctggattgctttaacccttttctgctttcctgcccaaggataggactggtggaacaaggtggtgtcaagatagagccgctccccaaggaagtgaaagtctacctcctgactacttccagtgctccgtactgcatgcatcacagcctcgtggagtttcacttgaaggaactgagaaacaaggacaccaacatcgaggttaccttccttagcagtaacatcacctcttcatctaagatcaccatacctaagcagcaacgctatgggaaaggaatcatagcccatgccaccccacaatgccagataaaccaagtgaaattcaagtttcagtcttccaaccgagtttggaaaaaagaccggactaccattattgggaagttctgcactgcccttttgcctgtcaatgacagagaaaagatggtctgcttacctgaaccagtgaacttacaagcaagtgtgactgtttcctgtgacctgaagatagcctgtgtgtagtttaacctgggcaggacacatctccctgcattttttttttttttttgagagagaggtgtgatgagggatgtgtgtgtgcagcttattgtagaccattactactaaggagaaaagcaaagctctttcttattttcctcataatcagctaccctggaggggagggagaactcattttacagaacttggtttcctttgccgatcttatgtacatacccattttagctttcccatgcatacttaactgcacttgctttatctccttgggcattcgtacttaggattcaatagaaacatgtacagggtaaacaattttttaaaaataaaacttcatggagtatctgaa

SEQ ID NO: 22424 - DNA, 1695 bp, Homo sapiens
  source 1..1695: mol_type = unassigned DNA
ataccagctctgagatttccagctcagcgatgcccccaggtccctgggagagctgcttctgggtggggggcctcattttgtggctcagcgttggaagttcaggggatgcacctcctaccccacagccaaagtgcgctgacttccagagcgccaacctttttgaaggcaccgatctcaaagtccagtttctcctctttgtcccttcgaatcctagctgtgggcagctagtagaaggaagcagtgacctccaaaactctgggttcaatgccactctgggaaccaaactaattatccatggattcagggttttaggaacaaagccttcctggattgacacatttattagaacccttctgcgtgcaacgaatgctaatgtgattgccgtggactggatttatgggtctacaggagtctacttctcagctgtgaaaaatgtgctgggtgtgtcggaatcctcaatccacatcattggtgttagcctgggggcccacgttgggggcatggtgggacagctcttcggaggccagctgggacagatcacaggcctggaccccgctggacctgagtacaccagggccagtgtggaagagcgcttggatgctggagatgccctcttcgtggaagccatccacacagacaccgacaatttgggtattcggattcccgttggacatgtggactacttcgtcaacggaggccaagaccaacctggctgccccaccttcttttacgcaggttatagttatctgatctgtgatcacatgagggctgtgcacctctacatcagcgccctggagaattcctgtccactgatggcctttccctgtgccagctacaaggccttccttgctggacgctgtctggattgctttaacccttttctgctttcctgcccaaggataggactggtggaacaaggtggtgtcaagatagagccgctccccaaggaagtgaaagtctacctcctgactacttccagtgctccgtactgcatgcatcacagcctcgtggagtttcacttgaaggaactgagaaacaaggacaccaacatcgaggttaccttccttagcagtaacatcacctcttcatctaagatcaccatacctaagcagcaacgctatgggaaaggaatcatagcccatgccaccccacaatgccagataaaccaagtgaaattcaagtttcagtcttccaaccgagtttggaaaaaagaccggactaccattattgggaagttctgcactgcccttttgcctgtcaatgacagagaaaagatggtctgcttacctgaaccagtgaacttacaagcaagtgtgactgtttcctgtgacctgaagatagcctgtgtgtagtttaacctgggcaggacacatctccctgcattttttttttttttttgagagagaggtgtgatgagggatgtgtgtgtgcagcttattgtagaccattactactaaggagaaaagcaaagctctttcttattttcctcataatcagctaccctggaggggagggagaactcattttacagaacttggtttcctttgccgatcttatgtacatacccattttagctttcccatgcatacttaactgcacttgctttatctccttgggcattcgtacttaggattcaatagaaacatgtacagggtaaacaattttttaaaaataaaacttcatggagtatctgaa

SEQ ID NO: 22425 - DNA, 1456 bp, Homo sapiens
  source 1..1456: mol_type = unassigned DNA
gaattactccataccagctctgagatttccagctcagcgatgcccccaggtccctgggagagctgcttctgggtggggggcctcattttgtggctcagcgttggaagttcagggttttaggaacaaagccttcctggattgacacatttattagaacccttctgcgtgcaacgaatgctaatgtgattgccgtggactggatttatgggtctacaggagtctacttctcagctgtgaaaaatgtgattaagttgagcctcgagatctcccttttcctcaataaactcctggtgctgggtgtgtcggaatcctcaatccacatcattggtgttagcctgggggcccacgttgggggcatggtgggacagctcttcggaggccagctgggacagatcacaggcctggaccccgctggacctgagtacaccagggccagtgtggaagagcgcttggatgctggagatgccctcttcgtggaagccatccacacagacaccgacaatttgggtattcggattcccgttggacatgtggactacttcgtcaacggaggccaagaccaacctggctgccccaccttcttttacgcaggttatagttatctgatctgtgatcacatgagggctgtgcacctctacatcagcgccctggagaattcctgtccactgatggcctttccctgtgccagctacaaggccttccttgctggacgctgtctggattgctttaacccttttctgctttcctgcccaaggataggactggtggaacaaggtggtgtcaagatagagccgctccccaaggaagtgaaagtctacctcctgactacttccagtgctccgtactgcatgcatcacagcctcgtggagtttcacttgaaggaactgagaaacaaggacaccaacatcgaggttaccttccttagcagtaacatcacctcttcatctaagatcaccatacctaagcagcaacgctatgggaaaggaatcatagcccatgccaccccacaatgccagataaaccaagtgaaattcaagtttcagtcttccaaccgagtttggaaaaaagaccggactaccattattgggaagttctgcactgcccttttgcctgtcaatgacagagaaaagatggtctgcttacctgaaccagtgaacttacaagcaagtgtgactgtttcctgtgacctgaagatagcctgtgtgtagtttaacctgggcaggacacatctccctgcattttttttttttttttgagagagaggtgtgatgagggatgtgtgtgtgcagcttattgtagaccattactactaaggagaaaagcaaagctctttcttattttcctcataatcagctaccctggaggggagggagaactcattttacagaacttggtttcctttgccgatcttatgtacatacccattttagctttcccatgcatacttaactgcact

SEQ ID NO: 22426 - DNA, 2458 bp, Homo sapiens
  source 1..2458: mol_type = unassigned DNA
agctgaaaaagctggagcaaccaagcagggcctacaagccgaggagggctgtttaaaggcgcaggggccattttacctccaggttggccctgctcaggaccaggaggaaacacctccagcccgcgacctcctcccacagggggaaaaggaaagcaggaggaccacagaagctttggcaccgaggatccccgcagtcttcacccgcggagattccggctgaaggagctgtccagcgactacaccgctaagcgcagggagcccaagcctccgcaccggattccggagcacaagctccaccgcgcatgcgcacacgccccagacccaggctcaggaggactgagaattttctgaccgcagtgcaccatgggaagaaagaagaaaaggcggccgtggagagacgaagacttcatgtgctgaaagctctgaagaagctaaggattgaggctgatgaggccccagttgttgctgtgctgggctcaggcggaggactgcgggctcacattgcctgccttggggtcctgagtgagatgaaagaacagggcctgttggatgccgtcacgtacctcgcaggggtctctggatccacttgggcaatatcttctctctacaccaatgatggtgacatggaagctctcgaggctgacctgaaacatcgatttacccgacaggagtgggacttggctaagagcctacagaaaaccatccaagcagcgaggtctgagaattactctctgaccgacttctgggcctacatggttatctctaagcaaaccagagaactgccggagtctcatttgtccaatatgaagaagcccgtggaagaagggacactaccctacccaatatttgcagccattgacaatgacctgcaaccttcctggcaggaggcaagagcaccagagacctggttcgagttcacccctcaccacgctggcttctctgcactgggggcctttgtttccataacccacttcggaagcaaattcaagaagggaagactggtcagaactcaccctgagagagacctgactttcctgagaggtttatggggaagtgctcttggtaacactgaagtcattagggaatacatttttgaccagttaaggaatctgaccctgaaaggtttatggagaagggctgttgctaatgctaaaagcattggacaccttatttttgcccgattactgaggctgcaagaaagttcacaaggggaacatcctcccccagaagatgaaggcggtgagcctgaacacacctggctgactgagatgctcgagaattggaccaggacctccctggaaaagcaggagcagccccatgaggaccccgaaaggaaaggctcactcagtaacttgatggattttgtgaagaaaacaggcatttgcgcttcaaagtgggaatgggggaccactcacaacttcctgtacaaacacggtggcatccgggacaagataatgagcagccggaagcacctccacctggtggatgctggtttagccatcaacactcccttcccactcgtgctgcccccgacgcgggaggttcacctcatcctctccttcgacttcagtgccggagatcctttcgagaccatccgggctaccactgactactgccgccgccacaagatcccctttccccaagtagaagaggctgagctggatttgtggtccaaggcccccgccagctgctacatcctgaaaggagaaactggaccagtggtgatgcattttcccctgttcaacatagatgcctgtggaggtgatattgaggcatggagtgacacatacgacacattcaagcttgctgacacctacactctagatgtggtggtgctactcttggcattagccaagaagaatgtcagggaaaacaagaagaagatccttagagagttgatgaacgtggccgggctctactacccgaaggatagtgcccgaagttgctgcttggcatagatgagcctcagcttccagggcactgtgggcctgttggtctactagggccctgatgtccacctggccttcctgttcttcactcccttcagccacacgcttcatggccttgagttcaccttggctgtcctaacagggccaatcaccagtgaccagctagactgtgattttgatagcgtcattcagaagaaggcgtccaaggagctgaaggtggtgaaatttgtcctgcaggtccctcgggagatcctggagctggagcatgagtgtctgacaatcagaagcatcatgtccaatgtccagatggccagaatgaatgtgatagttcagaccaatgccttccactgctcctttatgactgcacttctagccagtagctctgcacaagttagctctgtagaagtaagaacttgggcttaaatcatgggctatctctccacagccaagtggagctctgagaatacaacaagtgctcaataaatgcttgctgattgactgatggatta

SEQ ID NO: 22427 - DNA, 8526 bp, Homo sapiens
  source 1..8526: mol_type = unassigned DNA
cccgagtgtcggttcactgtggagacagcggtggcggagtgggtctccagggctctgggctggcaaggcccccggagggggtggggcgcggaggaggctacggatccgcttccgcgcggcggggccgggtgcttgggacgcggctctgggctcccgggataaggggctcccgggacaaggggctcccggagagcccagtggttagcgatgctgctgtcgccgtcgctgctgctgctgctgctgctgggggcgccgcggggctgcgccgagggtgtggcggcggcgcttacccccgagcggctcctggagtggcaggataaaggaatatttgttatccaaagtgagagtctcaagaaatgcattcaagcaggtaaatcggttctgaccctggagaactgcaagcaagcaaacaagcacatgctgtggaaatgggtttcaaaccatggcctctttaacataggaggcagtggttgcctgggcctgaatttctccgccccagagcagccattaagcttatatgaatgtgactccaccctcgtttccttacggtggcgctgtaacaggaagatgatcacaggcccgctgcagtactctgtccaggtggcgcatgacaacacagtggtggcctcacggaagtatattcataagtggatttcttatgggtcaggtggtggagacatttgtgaatatctacacaaagatttgcatacaatcaaagggaacacccacgggatgccgtgtatgtttcccttccagtataaccatcagtggcatcatgaatgtacccgtgaaggtcgggaagatgacttactgtggtgtgccacgacaagccgttatgaaagagatgaaaagtggggattttgccctgatcccacctctgcagaagtaggttgtgatactatttgggagaaggacctcaattcacacatttgctaccagttcaacctgctttcatctctctcttggagtgaggcacattcttcatgccagatgcaaggaggtacgctgttaagtattacagatgaaactgaagaaaatttcataagggagcacatgagcagtaaaacagtggaggtgtggatgggcctcaatcagctggatgaacacgctggctggcagtggtctgatggaacgccgctcaactatctgaattggagcccagaggtaaattttgagccatttgttgaagatcactgtggaacatttagttcatttatgccaagtgcctggaggagtcgggattgtgagtccaccttgccatatatatgtaaaaaatatctaaaccacattgatcatgaaatagttgaaaaagatgcgtggaaatattatgctacccactgtgagcctggctggaatccctacaatcgtaattgctacaaacttcagaaagaagaaaagacctggcatgaggctctgcgttcttgtcaggctgataacagtgcattaatagacataacctcattagcagaggtggagtttcttgtaaccctccttggagatgaaaatgcatcagaaacatggattggtttgagcagcaataaaattccagtttcctttgaatggtctaatgactcttcagtcatctttactaattggcacacacttgagccccacatttttccaaatagaagccagctgtgtgtctcagcagagcagtctgagggacactggaaagtcaaaaattgtgaagaaagacttttttacatttgtaaaaaagcaggccatgtcctctctgatgctgaatcaggatgtcaagagggatgggagagacatggtggattctgttacaaaattgacacagtccttcgaagctttgaccaagcttccagcggttattactgtcctcctgcacttgtaaccattacaaacaggtttgaacaggcttttattaccagtttgatcagtagtgtggtaaaaatgaaggacagttatttttggatagctcttcaggaccaaaatgatacgggagaatacacttggaagccagtagggcagaaacccgagccggtgcagtacacacactggaacacacaccagccgcgctacagtggtggctgtgttgccatgcgaggaaggcatccacttggtcgctgggaagtgaagcactgtcggcactttaaggcaatgtccttgtgcaagcagccagttgaaaatcaggaaaaagcagagtatgaagagagatggccctttcacccctgctatttggactgggagtcagagcctggtctggccagttgcttcaaggtatttcatagtgaaaaagttctgatgaaaagaacatggagagaagctgaagcattttgcgaagaatttggagctcatcttgcaagctttgcccatattgaggaagagaattttgtgaatgagctcttacattcaaaatttaattggacagaagaaaggcagttctggattggatttaataaaagaaacccactgaatgccggctcatgggagtggtctgatagaactcctgttgtctcttcgtttttagacaacacttattttggagaagatgcaagaaactgtgctgtttataaggcaaacaaaacattgctgcccttacactgtggttccaaacgtgaatggatatgcaaaatcccaagagatgtgaaacccaagattccgttctggtaccagtacgatgtaccctggctcttttatcaggatgcagaatacctttttcatacctttgcctcagaatggttgaactttgagtttgtctgtagctggctgcacagtgatcttctcacaattcattctgcacatgagcaagaattcatccacagcaaaataaaagcgctatcaaagtatggtgcaagttggtggattggacttcaagaagaaagagccaatgatgaatttcgctggagagatggaacaccagtgatataccagaactgggacacaggaagagaaagaactgtgaataatcagagccagagatgtggctttatttcttctataacaggactctggggtagtgaagagtgttcagtttctatgcctagtatctgtaagcgaaaaaaggtttggctcatagagaaaaagaaagatacaccaaaacaacatggaacgtgtcccaaaggatggctatattttaactataagtgccttctgctgaatatccccaaagacccaagcagttggaagaactggacgcatgctcaacatttctgtgctgaagaaggggggaccctggtcgccattgaaagtgaggtggagcaagctttcattactatgaatctttttggccagaccaccagtgtgtggataggtttacaaaatgatgattatgaaacatggctaaatggaaagcctgtggtatattctaactggtctccatttgatataataaatattccaagtcacaataccactgaagttcagaaacacattcctctctgtgccttactctcaagtaatcctaattttcatttcactggaaaatggtattttgaagactgtggaaaggaaggctatgggtttgtttgtgaaaaaatgcaagatacttctggacacggtgtaaatacatctgatatgtatccaatgcccaataccttagaatatggaaacagaacttacaaaataattaatgcaaatatgacttggtatgcagcaataaaaacctgcctgatgcacaaagcacaactggtcagcatcacagaccagtatcaccagtccttcctcactgttgtcctcaaccggctaggatatgcccactggattggactgttcaccacagataatggtcttaattttgactggtctgatggcaccaaatcttctttcactttttggaaagatgaggagtcctccctccttggtgactgcgtttttgccgacagcaacggacgctggcatagcacagcctgcgagtcatttctgcaaggtgccatttgtcatgtgccacctgaaacaagacaatctgaacacccagagttgtgctcagaaacatctattccctggataaaatttaaaagtaattgctacagtttttctacagtcctagacagtatgagttttgaggctgctcatgaattttgcaaaaaggaaggttctaatcttttaacaatcaaggatgaggctgaaaatgcatttctcctagaagagctgtttgcttttggttcttctgtccagatggtttggttgaatgctcaatttgatggtaacaatgaaaccataaagtggtttgatggaactcccacagaccagtcaaactggggcattcggaagccagacacagactacttcaagccccatcattgtgttgccttgaggatccctgaaggattatggcagctatccccgtgtcaagaaaaaaaaggctttatatgtaaaatggaggcagatattcacactgcagaggcgctgccagaaaaaggaccaagtcacagcatcattcctcttgcggttgtactgacactgatagtcattgtggccatttgcacactttccttctgcatatacaagcataacggtggcttcttcaggagacttgcagggtttcggaatccttactatcctgcaaccaactttagtacagtatatttagaagaaaatattctcatttctgatcttgagaagagtgaccaataataatgaggtcagagaatgccacagacaccagggtaagtaaagaagactaaacaggagtctcatctgtctttccctttacagcacagatgccattagaatgtgaattgggtcactattttaattattcttgaagtgattactggttttgaatcttaaccaaatcagatgggttttgatttattcatttccctaaactgtgatccattcttaaaaggggtaaattatgcattggttatttttcagaaagacaagaactattaaaagaaactccctattgaaaactctgaaatcaatgcgaataatagtttttgcattaatgtatctctactaaaatttgggggaattttaaaactaatctggtatctattcagacatttacctgcactcgtaccattaagaaagacagaaagaagcaaaaaaaaattaatcttgtatatgagaggaaaaggaaagggcttctgagaggattcttagttgtttcttttgaattcacttttaatagcaggatttggaaaatactaatttctgtgcttaagggtcacaggttctgggctctcaactgatatttaaggtgacattcatttttattaggtctaacatctcaagctaaaggagaaagaaaaataccttcttttaaatggcaaagaccttcattagcagcacacttttataaacaaccatatagttaaaatgtggccttaaactttcaattactaaatgatgattaagttggatattttaaaatgtcttatacataagcttaaagtaatatattgaaactttaacagttgtactgttaaaactcatggactttctgaaaaactaaatatataaaataatatgtaacactcttaataactggaagatataaaatgtaacttggatttaaaggagaagagctaaagatctgaattatagtctcattagaaccagacagatgttgttgagaagtactaaataaattagtaatctagatatctttattatgtaaatgagtttaggtgttctatttaataaactattttctgggaacgatctccttttatattagtctagttagtgtagatggtaaataatgattatgatactgtctgtaaataaaaaattacagattttattttcctttattagttccttataaagaaaacagcttcataatcaatatctaaaaatttactcattacataactgtttattgaattttatcaagaaaaaagtgtactgagcatggtggcacgcacctgtagtcccagctacttaggaggctgagggaagaggatcaactgagcccagaagttgaaggctgcagtgagctatggttgcaccactgcactcctgcctgggcaactgaatgagaccccacctcaaaaaagtgctgttctagaaacagaggtactaaggtgagcaacttggggtaagggctatcttttcatgccacttattttctaatgagggaaaattgacagtaactcagtaaagaaatgcatatgcataaaatagcaagtggttatgaaaatgaagtaaggttccatgatagagagaaactgggggactctcagggcctccctgagagtgtgcattttaattattacaaccaactgcctcaaaaccagtggccactaatcacaagggggagctctgagagaaagtatgaatgaatttctaagaggcaaaccatcatcattagaaatacaatttgaagagcataccactaagaatggaatccttgtggcctgcaacagttaatccagcttccaaaagcagctctttgctactgttataataatttacacactgggacagtctacctccataatttttttaagtattgggacttcattttttaaaagatattatattatgtggcagttgcatatttatgactcaaaaaataattggcttgaactcaccagatggtataaaagcccaatttaaccatcttttgagtggaattaaagttctgttcttttcaatggacttggtaaaaactgctaatcaaccagccttccagtcaaggtatatagtcacacataataatttgacaaaatacaccattaggaaagtgattttgcagaaagaagctgtattgcttctcagtgctccatactttgatgtttagtattgaacaacatctccagataatctggacccatggacagatcacacacttcttgccattactgaatttgcagaaatagtactgaagtattctgctacatttttatatttgcattttttttgaaactttttttcattttttttttttttttttggagatggagtcttgctctgttgccaggcaggagtacagtggcatgatctcagctcactgcaaccttcaactgcctggttcgagcaagtttcctgcctcagcctcccgagtagctgtgattacaggcacatgccaccatgcccagctaatttttgtatttttagtagagacagggtttcaccatgttgtccaggatggtctcgatctcctgatctcgtgatccacccgccccagcctcccaaagtgctaagattacaggcatgagccaccgcacctggcctcatctgtatttttaatgtgaactagattttatagctataattcgaaaagaaaaaaaagtagcaggtaatgggtatattatacactatttgcgtgatggttacaccagactttaccactacatactgtatttatgtaacaaaattacacttgtactccttacatttatgccaaaaaagcggcaggatcacaaattcacacatagttaatgtgcccctccaacagtcaattatgttctatgactaacctgaggatctttatagaatctgagtaatggaaatgcctgggtttttccatttaacaatatattgggctcttacagttacaacagtcttctttcgggttaaatatttcttctcttgaagggtccactccttattaaagataagattgaactgaatgtttacttaaacgttcagtcttttggagtttctttactcttctcaaaatggtggttggatatataagaacttgctgtgtcctggtagtgttgaggggagaaggtgacaacttactgtggatgtatgttagctggtgtccactgagaatagctgtctggcctcactcctgggaattctgctggcatctgctgtgaagtctgcagttgctttaatctgtagtctgttctctttgatttggcctcattctggctgtccctggtgctgtcttatctcttgagaactggctgtgtctcctgttgaattccctatccgaacactgcagttcttggctacaaggcagtcacttcacccctgcagtggtgagatcccattagctaccattagctactcttttcgtccagaaaggcgaaatgccatagcaaacaatcccacagtcttggtggattaacacagcaaaggtttatttctcacccacacctgcatgggctggcaagaggactttgctctgttcagtcattcatgggtccatgcttctcctatatagccagccctctgtctcctaaggcctggagtcctccatgggcctccaatctgtggctgacagaggatgttgacttgagacccatctttgattcattatggagcttccacaggctgttgaaatcctctaagtcaaaagtcctcaaactggggacacatgcctaaggaatacaggagcatgggtatttaagaaacttaatttccagaatcttcatgtatattttttcttaaaactgatttacctgagagcacccctggttcttctttcccacctctctttacacaaatgcctttctctacctttaaaaagaaaaagaaaaagaaatggctttcatttcagatcttactatgggaaaatcctccatggctccaaagaaaaatattcgaagtattgatgtcagtgaagcttcttttaataaagaaattgtaaactca

SEQ ID NO: 22428 - DNA, 5160 bp, Homo sapiens
  source 1..5160: mol_type = unassigned DNA
cccgagtgtcggttcactgtggagacagcggtggcggagtgggtctccagggctctgggctggcaaggcccccggagggggtggggcgcggaggaggctacggatccgcttccgcgcggcggggccgggtgcttgggacgcggctctgggctcccgggataaggggctcccgggacaaggggctcccggagagcccagtggttagcgatgctgctgtcgccgtcgctgctgctgctgctgctgctgggggcgccgcggggctgcgccgagggtgtggcggcggcgcttacccccgagcggctcctggagtggcaggataaaggaatatttgttatccaaagtgagagtctcaagaaatgcattcaagcaggtaaatcggttctgaccctggagaactgcaagcaagcaaacaagcacatgctgtggaaatgggtttcaaaccatggcctctttaacataggaggcagtggttgcctgggcctgaatttctccgccccagagcagccattaagcttatatgaatgtgactccaccctcgtttccttacggtggcgctgtaacaggaagatgatcacaggcccgctgcagtactctgtccaggtggcgcatgacaacacagtggtggcctcacggaagtatattcataagtggatttcttatgggtcaggtggtggagacatttgtgaatatctacacaaagatttgcatacaatcaaagggaacacccacgggatgccgtgtatgtttcccttccagtataaccatcagtggcatcatgaatgtacccgtgaaggtcgggaagatgacttactgtggtgtgccacgacaagccgttatgaaagagatgaaaagtggggattttgccctgatcccacctctgcagaagtaggttgtgatactatttgggagaaggacctcaattcacacatttgctaccagttcaacctgctttcatctctctcttggagtgaggcacattcttcatgccagatgcaaggaggtacgctgttaagtattacagatgaaactgaagaaaatttcataagggagcacatgagcagtaaaacagtggaggtgtggatgggcctcaatcagctggatgaacacgctggctggcagtggtctgatggaacgccgctcaactatctgaattggagcccagaggtaaattttgagccatttgttgaagatcactgtggaacatttagttcatttatgccaagtgcctggaggagtcgggattgtgagtccaccttgccatatatatgtaaaaaatatctaaaccacattgatcatgaaatagttgaaaaagatgcgtggaaatattatgctacccactgtgagcctggctggaatccctacaatcgtaattgctacaaacttcagaaagaagaaaagacctggcatgaggctctgcgttcttgtcaggctgataacagtgcattaatagacataacctcattagcagaggtggagtttcttgtaaccctccttggagatgaaaatgcatcagaaacatggattggtttgagcagcaataaaattccagtttcctttgaatggtctaatgactcttcagtcatctttactaattggcacacacttgagccccacatttttccaaatagaagccagctgtgtgtctcagcagagcagtctgagggacactggaaagtcaaaaattgtgaagaaagacttttttacatttgtaaaaaagcaggccatgtcctctctgatgctgaatcaggatgtcaagagggatgggagagacatggtggattctgttacaaaattgacacagtccttcgaagctttgaccaagcttccagcggttattactgtcctcctgcacttgtaaccattacaaacaggtttgaacaggcttttattaccagtttgatcagtagtgtggtaaaaatgaaggacagttatttttggatagctcttcaggaccaaaatgatacgggagaatacacttggaagccagtagggcagaaacccgagccggtgcagtacacacactggaacacacaccagccgcgctacagtggtggctgtgttgccatgcgaggaaggcatccacttggtcgctgggaagtgaagcactgtcggcactttaaggcaatgtccttgtgcaagcagccagttgaaaatcaggaaaaagcagagtatgaagagagatggccctttcacccctgctatttggactgggagtcagagcctggtctggccagttgcttcaaggtatttcatagtgaaaaagttctgatgaaaagaacatggagagaagctgaagcattttgcgaagaatttggagctcatcttgcaagctttgcccatattgaggaagagaattttgtgaatgagctcttacattcaaaatttaattggacagaagaaaggcagttctggattggatttaataaaagaaacccactgaatgccggctcatgggagtggtctgatagaactcctgttgtctcttcgtttttagacaacacttattttggagaagatgcaagaaactgtgctgtttataaggcaaacaaaacattgctgcccttacactgtggttccaaacgtgaatggatatgcaaaatcccaagagatgtgaaacccaagattccgttctggtaccagtacgatgtaccctggctcttttatcaggatgcagaatacctttttcatacctttgcctcagaatggttgaactttgagtttgtctgtagctggctgcacagtgatcttctcacaattcattctgcacatgagcaagaattcatccacagcaaaataaaagcgctatcaaagtatggtgcaagttggtggattggacttcaagaagaaagagccaatgatgaatttcgctggagagatggaacaccagtgatataccagaactgggacacaggaagagaaagaactgtgaataatcagagccagagatgtggctttatttcttctataacaggactctggggtagtgaagagtgttcagtttctatgcctagtatctgtaagcgaaaaaaggtttggctcatagagaaaaagaaagatacaccaaaacaacatggaacgtgtcccaaaggatggctatattttaactataagtgccttctgctgaatatccccaaagacccaagcagttggaagaactggacgcatgctcaacatttctgtgctgaagaaggggggaccctggtcgccattgaaagtgaggtggagcaagctttcattactatgaatctttttggccagaccaccagtgtgtggataggtttacaaaatgatgattatgaaacatggctaaatggaaagcctgtggtatattctaactggtctccatttgatataataaatattccaagtcacaataccactgaagttcagaaacacattcctctctgtgccttactctcaagtaatcctaattttcatttcactggaaaatggtattttgaagactgtggaaaggaaggctatgggtttgtttgtgaaaaaatgcaagatacttctggacacggtgtaaatacatctgatatgtatccaatgcccaataccttagaatatggaaacagaacttacaaaataattaatgcaaatatgacttggtatgcagcaataaaaacctgcctgatgcacaaagcacaactggtcagcatcacagaccagtatcaccagtccttcctcactgttgtcctcaaccggctaggatatgcccactggattggactgttcaccacagataatggtcttaattttgactggtctgatggcaccaaatcttctttcactttttggaaagatgaggagtcctccctccttggtgactgcgtttttgccgacagcaacggacgctggcatagcacagcctgcgagtcatttctgcaaggtgccatttgtcatgtgccacctgaaacaagacaatctgaacacccagagttgtgctcagaaacatctattccctggataaaatttaaaagtaattgctacagtttttctacagtcctagacagtatgagttttgaggctgctcatgaattttgcaaaaaggaaggttctaatcttttaacaatcaaggatgaggctgaaaatgcatttctcctagaagagctgtttgcttttggttcttctgtccagatggtttggttgaatgctcaatttgatggtaacagtaagtgatttgggtagaggagaggacataaataaatacatggttgttaaagctgatgataatggcatctgtgagccagaaaactctccttggatacgttttctgagaaaaaatagcatgaagcctaaagccatttcttccaaaaacaacattgcaacccttttctttacccttttgtcttttaaaataatcccagaacaccaaaaataaaaacaaacaataacatgtttatctttacccttagcaggaagatgcttggctggaactttgtgttcacagacttagtcattgcataccaaaaccatatttactggaaaatatcccaggtttctaaatgttataaaagcacaatagagttatggaaatgtttccatgatgaactgtgctgttaggattcttatttgctactcataaaaaccagagtttgtaataaaatggaagcatggtattcttttctttatgtaattgatggttattgaaaggtacttgtgaagaaaattattttaattggtatggagagcttgttacagtggtgtaccaaggttgggggtgagcctaccctttcgaggaggagtattttaatcaccaacattgtttagaatttcaagcagatggtgataataaaaagcagaccaacttttagttagctgtattgttagttttaaattattttcagacaatacactattgcccacacatgggatggactctcctaccgcccctacccccttggtacatggctggcttggtattaaagaaattcactgtaaaatctttttagaaagtgagccattttgtaatgatgaagatgttaggacttcaaaggatttttctttactcgattagttttgtttatcaaatgatttctttaaatcgattatatatatatatggaatatttcaaaattcaaactgtcacattaagaaacatgataacctaaatgacctaaataagaacactgtacctaaaataaagaggcaacttta

SEQ ID NO: 22429 - DNA, 2567 bp, Homo sapiens
  source 1..2567: mol_type = unassigned DNA
cacggatgaaaatagctccgggtgagctctggaacagctgaaaaagctggagcaaccaagcagggcctacaagccgaggagggctgtttaaaggcgcaggggccattttacctccaggttggccctgctcaggaccaggaggaaacacctccagcccgcgacctcctcccacagggggaaaaggaaagcaggaggaccacagaagctttggcaccgaggatccccgcagtcttcacccgcggagattccggctgaaggagctgtccagcgactacaccgctaagcgcagggagcccaagcctccgcaccggattccggagcacaagctccaccgcgcatgcgcacacgccccagacccaggctcaggaggactgagaattttctgaccgcagtgcaccatgggaagctctgaagtttccataattcctgggctccagaaagaagaaaaggcggccgtggagagacgaagacttcatgtgctgaaagctctgaagaagctaaggattgaggctgatgaggccccagttgttgctgtgctgggctcaggcggaggactgcgggctcacattgcctgccttggggtcctgagtgagatgaaagaacagggcctgttggatgccgtcacgtacctcgcaggggtctctggatccacttgggcaatatcttctctctacaccaatgatggtgacatggaagctctcgaggctgacctgaaacatcgatttacccgacaggagtgggacttggctaagagcctacagaaaaccatccaagcagcgaggtctgagaattactctctgaccgacttctgggcctacatggttatctctaagcaaaccagagaactgccggagtctcatttgtccaatatgaagaagcccgtggaagaagggacactaccctacccaatatttgcagccattgacaatgacctgcaaccttcctggcaggaggcaagagcaccagagacctggttcgagttcacccctcaccacgctggcttctctgcactgggggcctttgtttccataacccacttcggaagcaaattcaagaagggaagactggtcagaactcaccctgagagagacctgactttcctgagaggtttatggggaagtgctcttggtaacactgaagtcattagggaatacatttttgaccagttaaggaatctgaccctgaaaggtttatggagaagggctgttgctaatgctaaaagcattggacaccttatttttgcccgattactgaggctgcaagaaagttcacaaggggaacatcctcccccagaagatgaaggcggtgagcctgaacacacctggctgactgagatgctcgagaattggaccaggacctccctggaaaagcaggagcagccccatgaggaccccgaaaggaaaggctcactcagtaacttgatggattttgtgaagaaaacaggcatttgcgcttcaaagtgggaatgggggaccactcacaacttcctgtacaaacacggtggcatccgggacaagataatgagcagccggaagcacctccacctggtggatgctggtttagccatcaacactcccttcccactcgtgctgcccccgacgcgggaggttcacctcatcctctccttcgacttcagtgccggagatcctttcgagaccatccgggctaccactgactactgccgccgccacaagatcccctttccccaagtagaagaggctgagctggatttgtggtccaaggcccccgccagctgctacatcctgaaaggagaaactggaccagtggtgatgcattttcccctgttcaacatagatgcctgtggaggtgatattgaggcatggagtgacacatacgacacattcaagcttgctgacacctacactctagatgtggtggtgctactcttggcattagccaagaagaatgtcagggaaaacaagaagaagatccttagagagttgatgaacgtggccgggtaggtgggagaccatagtcgctctgatgcctatgctcgttcagctctactacccgaaggatagtgcccgaagttgctgcttggcatagatgagcctcagcttccagggcactgtgggcctgttggtctactagggccctgatgtccacctggccttcctgttcttcactcccttcagccacacgcttcatggccttgagttcaccttggctgtcctaacagggccaatcaccagtgaccagctagactgtgattttgatagcgtcattcagaagaaggcgtccaaggagctgaaggtggtgaaatttgtcctgcaggtccctcgggagatcctggagctggagcatgagtgtctgacaatcagaagcatcatgtccaatgtccagatggccagaatgaatgtgatagttcagaccaatgccttccactgctcctttatgactgcacttctagccagtagctctgcacaagttagctctgtagaagtaagaacttgggcttaaatcatgggctatctctccacagccaagtggagctctgagaatacaacaagtgctcaataaatgcttgctgattgactgatggatta

SEQ ID NO: 22430 - DNA, 1626 bp, Homo sapiens
  source 1..1626: mol_type = unassigned DNA
atgggaagctctgaagtttccataattcctgggctccagaaagaagaaaaggcggccgtggagagacgaagacttcatgtgctgaaagctctgaagaagctaaggattgaggctgatgaggccccagttgttgctgtgctgggctcaggcggaggactgcgggctcacattgcctgccttggggtcctgagtgagatgaaagaacagggcctgttggatgccgtcacgtacctcgcaggggtctctggatccacttgggcaatatcttctctctacaccaatgatggtgacatggaagctctcgaggctgacctgaaacatcgatttacccgacaggagtgggacttggctaagagcctacagaaaaccatccaagcagcgaggtctgagaattactctctgaccgacttctgggcctacatggttatctctaagcaaaccagagaactgccggagtctcatttgtccaatatgaagaagcccgtggaagaagggacactaccctacccaatatttgcagccattgacaatgacctgcaaccttcctggcaggaggcaagagcaccagagacctggttcgagttcacccctcaccacgctggcttctctgcactgggggcctttgtttccataacccacttcggaagcaaattcaagaagggaagactggtcagaactcaccctgagagagacctgactttcctgagaggtttatggggaagtgctcttggtaacactgaagtcattagggaatacatttttgaccagttaaggaatctgaccctgaaaggtttatggagaagggctgttgctaatgctaaaagcattggacaccttatttttgcccgattactgaggctgcaagaaagttcacaaggggaacatcctcccccagaagatgaaggcggtgagcctgaacacacctggctgactgagatgctcgagaattggaccaggacctccctggaaaagcaggagcagccccatgaggaccccgaaaggaaaggctcactcagtaacttgatggattttgtgaagaaaacaggcatttgcgcttcaaagtgggaatgggggaccactcacaacttcctgtacaaacacggtggcatccgggacaagataatgagcagccggaagcacctccacctggtggatgctggtttagccatcaacactcccttcccactcgtgctgcccccgacgcgggaggttcacctcatcctctccttcgacttcagtgccggagatcctttcgagaccatccgggctaccactgactactgccgccgccacaagatcccctttccccaagtagaagaggctgagctggatttgtggtccaaggcccccgccagctgctacatcctgaaaggagaaactggaccagtggtgatgcattttcccctgttcaacatagatgcctgtggaggtgatattgaggcatggagtgacacatacgacacattcaagcttgctgacacctacactctagatgtggtggtgctactcttggcattagccaagaagaatgtcagggaaaacaagaagaagatccttagagagttgatgaacgtggccgggctctactacccgaaggatagtgcccgaagttgctgcttggcatag

SEQ ID NO: 22431 - DNA, 3584 bp, Homo sapiens
  source 1..3584: mol_type = unassigned DNA
gctggtcctatcccactgggaccgtcgctgccactcagccagagagccagcatcttggcaagggctgggcctggagtgaagctggaagggctagcatggagagcctgtcacctgggggaccacctggccacccttaccagggggaggcctctacctgctggcagctcacagtgagggtcctggaggcgcggaacctgcgctgggctgacctgttgagtgaggccgacccttacgtgatcctacagctgtcgaccgcacctggaatgaagtttaagaccaagacgctcaccgacaccagtcatcctgtgtggaatgaggccttccgtttccttatccaaagtcaggtcaagaatgttctggagcttagcatctatgatgaggactcagtcacggaggatgacatctgcttcaaggttctctatgacatctcagaagtcctccctggcaagctgctccggaaaaccttctcccagagtccccagggagaggaggagctggatgtggagttcctgatggaagaaacgtcagatcgcccagaaaacctcatcaccaacaaagtcattgtggcccgagagctgtcatgcctggatgtgcatctggacagcacagggagcaccgctgtggttgcagatcaggacaagctggagctggagctggtgctgaaggggtcctatgaggacacacagacatccttcctgggcacagcctctgccttccgcttccactacatggcagccctagagacagagctgagcgggcgcctgaggagctccagaagcaatggctggaatggggacaactcagctgggtacctcactgtgcccctgaggcccttgaccattgggaaggaggtgactatggatgttcctgctccaaatgccccaggagtgaggctgcagctcaaggcagagggctgccctgaggagctggccgtgcacctgggcttcaatctctgtgcagaggagcaggccttcctgagcaggaggaagcaggtggtggccaaggccctgaagcaggccctgcagctggacagagacctgcaggaggatgaggtacccgttgtgggcatcatggccacaggaggaggtgcccgggccatgacctcactctacggccacctattggccttgcagaagctgggcctcctagactgtgtgacctacttcagtggcatctctggctctacgtggacaatggcccacctgtacggggaccctgagtggtcgcagagggacctggagggacctatcagatacgcccgggagcacctggccaagagcaagctggaggtcttttccccagagcgcctggcgagctaccgccgggagctggagctgcgggctgagcagggccaccccacgacctttgtggacctgtgggcgctagtgctggagtccatgctgcacggccaggtgatggatcagaagctgtcaggacagagagccgccctggaacggggtcagaaccctctgcccctctacttgagcctcaatgtcaaagagaacaatctggagacactggacttcaaggagtgggttgagttctccccctatgaggtcggtttcctgaagtacggggccttcgtccctcctgagctcttcggctccgagttcttcatgggacggctgatgaggaggatcccggagccccggatctgctttctggaagccatctggagcaacattttctccctgaacctgctggatgcctggtatgacctcaccagttctggggagtcctggaaacagcacatcaaggacaagaccaggagcttagagaaggagcccctgaccacctcggggacctcctcgcggctggaggcctcgtggctgcagccaggcacggcgctggcccaggcatttaaaggcttcctgacaggcaggcccctccaccagcgcagccccaacttcctccagggcctccagctgcaccaggactactgtagccacaaagacttctccacctgggcagactaccagcttgactccatgcccagccagctgacccccaaggagccccggctctgcctggtggacgccgcctacttcatcaacaccagctctccctccatgttccggccaggccgcaggctggacctcatcctctccttcgactactccctatctgcgcccttcgaggcactgcagcagacggagctgtactgccgggcccgggggctgcccttcccccgggtggaacccagccctcaggaccagcaccagccaagggaatgccacctcttctcagaccccgcctgccccgaggccccgatcctgctgcacttcccgctggtcaatgcctccttcaaggaccactcagcccccggtgtccagcgcagccccgcagagctccagggtggccaagtggatctcaccggggccacctgcccctacaccctgtccaacatgacctacaaggaggaagacttcgagcgcctgctgcggctcagtgactacaacgtgcagaccagccagggtgccatcctgcaggccctgaggaccgcgctgaagcaccggactctagaggcgaggcctccaagggcacagacctgaggttgctcagaggctgcaggaccctccagggcctgcgggcataacctgatctgtagctgggctcagccacaggccttcctggttggagttctgggctctcccaggcctgggtggcctctgtagctggtctcactgcccagagggaactgcacacacagacttctctcttacgttcatggctggcttgagatgagttgaaaataacttcgccaggccagtgtgtagaacagctggtccaaccagacagactttcacaccacaattacttccatgcctgagcaggatagatttgaagtgcaagccggaggcagcagatcaggagtagggacaggaaggacaggggatgcctgacctgacaggtggcttcaggcctcgggaatcacaagacatcctgaacacattgcctcctcatcttcttcctgctcctccacctcctcctctccttgtccttctcctctttgtcctcctgctttccgtatccaagtcttgtacttgtttaaatttattcctaaatattttattctttttgataagtggagttactttcttaatttcatttagattattcattgctattttatagaaatacaatggatttttaaatgttgatcttgtattccgcaatcttgctgaagttgtttaccggctctaatacttttgcggatttcttagaattttctgtagacagatcatgccatctccaaatagagatggttttacttcttcctgtctgatctgaatgccttttatttatttttcccaattgccctgagcagtacaatgatgaacacacgtttcaagagcagacatcttgtcttgttcctgactctgacaagaaagcataagtctctcaccatttagtgtgattttagctgtgggtttttcttggacatccttatcaggttgagaaagttctcttttatttctagtttattgagtgttttatgatgaaacggtgttaggttttgtcaagtgatttttctgtgtctatgggcatgatcatgtggttttgtcgtgtattttattaatgta

SEQ ID NO: 22432 - DNA, 1882 bp, Homo sapiens
  source 1..1882: mol_type = unassigned DNA
gccagagctgctcggcccgcagccagggggacagcggctggtcggaggctcgcagtgctgtcggcgagaagcagtcgggtttggagcgcttgggtcgcgttggtgcgcggtggaacgcgcccagggaccccagttcccgcgagcagctccgcgccgcgcctgagagactaagctgaaactgctgctcagctcccaagatggtgccacccaaattgcatgtgcttttctgcctctgcggctgcctggctgtggtttatccttttgactggcaatacataaatcctgttgcccatatgaaatcatcagcatgggtcaacaaaatacaagtactgatggctgctgcaagctttggccaaactaaaatcccccggggaaatgggccttattccgttggttgtacagacttaatgtttgatcacactaataagggcaccttcttgcgtttatattatccatcccaagataatgatcgccttgacaccctttggatcccaaataaagaatatttttggggtcttagcaaatttcttggaacacactggcttatgggcaacattttgaggttactctttggttcaatgacaactcctgcaaactggaattcccctctgaggcctggtgaaaaatatccacttgttgttttttctcatggtcttggggcattcaggacactttattctgctattggcattgacctggcatctcatgggtttatagttgctgctgtagaacacagagatagatctgcatctgcaacttactatttcaaggaccaatctgctgcagaaataggggacaagtcttggctctaccttagaaccctgaaacaagaggaggagacacatatacgaaatgagcaggtacggcaaagagcaaaagaatgttcccaagctctcagtctgattcttgacattgatcatggaaagccagtgaagaatgcattagatttaaagtttgatatggaacaactgaaggactctattgatagggaaaaaatagcagtaattggacattcttttggtggagcaacggttattcagactcttagtgaagatcagagattcagatgtggtattgccctggatgcatggatgtttccactgggtgatgaagtatattccagaattcctcagcccctcttttttatcaactctgaatatttccaatatcctgctaatatcataaaaatgaaaaaatgctactcacctgataaagaaagaaagatgattacaatcaggggttcagtccaccagaattttgctgacttcacttttgcaactggcaaaataattggacacatgctcaaattaaagggagacatagattcaaatgtagctattgatcttagcaacaaagcttcattagcattcttacaaaagcatttaggacttcataaagattttgatcagtgggactgcttgattgaaggagatgatgagaatcttattccagggaccaacattaacacaaccaatcaacacatcatgttacagaactcttcaggaatagagaaatacaattaggattaaaataggttttttaaaagtcttgtttcaaaactgtctaaaattatgtgtgtgtgtgtgtgtgtgtgtgtgtgtgtgagagagagagagagagagagagagagagagagagagaattttaatgtattttcccaaaggactcatattttaaaatgtaggctatactgtaatcgtgattgaagcttggactaagaattttttccctttagatgtaaagaaagaatacagtatacaatattcatatcagcctaaattttaattttaaagatgattccttttcagtgtcgaagttaaaaactgtttttacattactttgacagacaagtagattaaaacaggcaaaatcccagtgaaaa

SEQ ID NO: 22433 - DNA, 1747 bp, Homo sapiens
  source 1..1747: mol_type = unassigned DNA
ggaaaaccggcctgactggggggtgaattcagcagggagtaaatctgatcggcatcaggtctgcggaaaggagctggtgagcacgacaccacccaggcattgcctggctctctccgcggcgggctaagttaaccgcgggtccaggagactaagctgaaactgctgctcagctcccaagatggtgccacccaaattgcatgtgcttttctgcctctgcggctgcctggctgtggtttatccttttgactggcaatacataaatcctgttgcccatatgaaatcatcagcatgggtcaacaaaatacaagtactgatggctgctgcaagctttggccaaactaaaatcccccggggaaatgggccttattccgttggttgtacagacttaatgtttgatcacactaataagggcaccttcttgcgtttatattatccatcccaagataatgatcgccttgacaccctttggatcccaaataaagaatatttttggggtcttagcaaatttcttggaacacactggcttatgggcaacattttgaggttactctttggttcaatgacaactcctgcaaactggaattcccctctgaggcctggtgaaaaatatccacttgttgttttttctcatggtcttggggcattcaggacactttattctgctattggcattgacctggcatctcatgggtttatagttgctgctgtagaacacagagatagatctgcatctgcaacttactatttcaaggaccaatctgctgcagaaataggggacaagtcttggctctaccttagaaccctgaaacaagaggaggagacacatatacgaaatgagcaggtacggcaaagagcaaaagaatgttcccaagctctcagtctgattcttgacattgatcatggaaagccagtgaagaatgcattagatttaaagtttgatatggaacaactgaaggactctattgatagggaaaaaatagcagtaattggacattcttttggtggagcaacggttattcagactcttagtgaagatcagagattcagatgtggtattgccctggatgcatggatgtttccactgggtgatgaagtatattccagaattcctcagcccctcttttttatcaactctgaatatttccaatatcctgctaatatcataaaaatgaaaaaatgctactcacctgataaagaaagaaagatgattacaatcaggggttcagtccaccagaattttgctgacttcacttttgcaactggcaaaataattggacacatgctcaaattaaagggagacatagattcaaatgtagctattgatcttagcaacaaagcttcattagcattcttacaaaagcatttaggacttcataaagattttgatcagtgggactgcttgattgaaggagatgatgagaatcttattccagggaccaacattaacacaaccaatcaacacatcatgttacagaactcttcaggaatagagaaatacaattaggattaaaataggttttttaaaagtcttgtttcaaaactgtctaaaattatgtgtgtgtgtgtgtgtgtgtgtgtgtgtgtgagagagagagagagagagagagagagagagagagagaattttaatgtattttcccaaaggactcatattttaaaatgtaggctatactgtaatcgtgattgaagcttggactaagaattttttccctttagatgtaaagaaagaatacagtatacaatattc

SEQ ID NO: 22434 - DNA, 1709 bp, Homo sapiens
  source 1..1709: mol_type = unassigned DNA
agagctgctcggcccgcagccagggggacagcggctggtcggaggctcgcagtgctgtcggcgagaagcagtcgggtttggagcgcttgggtcgcgttggtgcgcggtggaacgcgcccagggaccccagttcccgcgagcagctccgcgccgcgcctgacatgggtcaacaaaatacaagtactgatggctgctgcaagctttggccaaactaaaatcccccggggaaatgggccttattccgttggttgtacagacttaatgtttgatcacactaataagggcaccttcttgcgtttatattatccatcccaagataatgatcgccttgacaccctttggatcccaaataaagaatatttttggggtcttagcaaatttcttggaacacactggcttatgggcaacattttgaggttactctttggttcaatgacaactcctgcaaactggaattcccctctgaggcctggtgaaaaatatccacttgttgttttttctcatggtcttggggcattcaggacactttattctgctattggcattgacctggcatctcatgggtttatagttgctgctgtagaacacagagatagatctgcatctgcaacttactatttcaaggaccaatctgctgcagaaataggggacaagtcttggctctaccttagaaccctgaaacaagaggaggagacacatatacgaaatgagcaggtacggcaaagagcaaaagaatgttcccaagctctcagtctgattcttgacattgatcatggaaagccagtgaagaatgcattagatttaaagtttgatatggaacaactgaaggtaagctataaaaagtaatttttctcttgtcctacagttctttattgttttttgtcatttaattttctgctatattgcaaggtacaatatgataaagggctgcaaccagccccctccccaatgcgcacacacagacacacaaagcagtacaggtaaagtattgcagcaatgaagaatgcattatcttggactagatatgaaattgccaaaagttagtcagttttgatctacaaaaacagcaatgtcatatggttcaactcaactcctgtggaagtattattatttcatggacagctcctgcatgtttttaagcttgatcttgaaaacttgacacaagtttgggagcgggtggaaaaatatcagacagagtgggcagcatgaacaaagactcaaaagtgtgtgtggcatgtgaagtgcagggattagggggaactagagaataagatgatggtctgttctccagatacaatgaagaaatttgttatccctcaagcagccactctcttctgtatccttgcctttgtacatgttgtccccttggcctgacacacccttccccttgcctaactcctacctaatttcaagactccagttgagcatcacctcctctaagaagctttcttggaccccaatacccacttctggactgggctcgctgtctgtcatgtgtgctcctttgtaccactgtactgtattgcatcatgcctctgtataactttcttccctgatggactgcaaactcactgaaatgagactgcagtacctggcacagagtaggtactcaataaatactcatggaatgaacaaacaaataaacatggggtgaggagaggcagaagtcagaactgatgttgaagtttccagtgtgggtgactacaaag

SEQ ID NO: 22435 - DNA, 1210 bp, Homo sapiens
  source 1..1210: mol_type = unassigned DNA
aggccgcgctaggcggacccaggacacagcccgcgcgcagcccacccgcccgccgcctgccagagctgctcggcccgcagccagggggacagcggctggtcggaggctcgcagtgctgtcggcgagaagcagtcgggtttggagcgcttgggtcgcgttggtgcgcggtggaacgcgcccagggaccccagttcccgcgagcagctccgcgccgcgcctgagttcaatgacaactcctgcaaactggaattcccctctgaggcctggtgaaaaatatccacttgttgttttttctcatggtcttggggcattcaggacactttattctgctattggcattgacctggcatctcatgggtttatagttgctgctgtagaacacagagatagatctgcatctgcaacttactatttcaaggaccaatctgctgcagaaataggggacaagtcttggctctaccttagaaccctgaaacaagaggaggagacacatatacgaaatgagcaggtacggcaaagagcaaaagaatgttcccaagctctcagtctgattcttgacattgatcatggaaagccagtgaagaatgcattagatttaaagtttgatatggaacaactgaaggtaagctataaaaagtaatttttctcttgtcctacagttctttattgttttttgtcatttaattttctgctatattgcaaggtacaatatgataaagggctgcaaccagccccctccccaatgcgcacacacagacacacaaagcagtacaggtaaagtattgcagcaatgaagaatgcattatcttggactagatatgaaattgccaaaagttagtcagttttgatctacaaaaacagcaatgtcatatggttcaactcaactcctgtggaagtattattatttcatggacagctcctgcatgtttttaagcttgatcttgaaaacttgacacaagtttgggagcgggtggaaaaatatcagacagagtgggcagcatgaacaaagactcaaaagtgtgtgtggcatgtgaagtgcagggattagggggaactagagaataagatgatggtctgttctccagatacaatgaagaaatttgttatccctcaagcagccactctcttctgtatccttgcctttgtacatgttgtccccttggcctgacacacccttccccttgcctaactcctacctaatttcaagact

SEQ ID NO: 22436 - DNA, 2594 bp, Homo sapiens
  source 1..2594: mol_type = unassigned DNA
cttcctggaagggtgcgataaggccgggcgaggtgcctgggatgcttctccccttccgcgaggaagagatctaattgggtagggcgggtgtagactagcctgccgagccgcccgctggcacctgcagcctcctgggcgcccgccgggccccggcgagaaagttgttaaagggagcgaggtggttgttcctggggtccgaggcgcgcctctcacgccctgcccaacagaagccgcagtcccgtggggtctggagacgcagtttcctgttaatgacaataaatccctgctccccctgcctcagacatctacgcagcgaaatcgagcctggccttgagggtccacaccgcgagggaagatgcgtgcgcccattccagagcctaagcctggagacctgattgagatttttcgccctttctacagacactgggccatctatgttggcgatggatatgtggttcatctggcccctccaagtgaggtcgcaggagctggtgcagccagtgtcatgtccgccctgactgacaaggccatcgtgaagaaggaattgctgtatgatgtggccgggagtgacaagtaccaggtcaacaacaaacatgatgacaagtactcgccgctgccctgcagcaaaatcatccagcgggcggaggagctggtggggcaggaggtgctctacaagctgaccagtgagaactgcgagcactttgtgaatgagctgcgctatggagtcgcccgcagtgaccaggtcagagatgtcatcatcgctgcaagcgttgcaggaatgggcttggcagccatgagccttattggagtcatgttctcaagaaacaagcgacaaaagcaataactgaaaaagactgtcctgtcagcgatgactttatacatcaagggggtcttgttttgctagagagtttggggtttggtttgtggatttcattgtgatttataataaggcttattttcacagaataaaataaagcaaaacgagggaggattttattgggggaagtgcagcaagaactgcctggtgtgaagtctgttcagggaacagccgggctgtcttcctggtcagggattgtctttcactttctttttgcgtgctgtgttctttgcattgcaggaggcagagtccagctccagttatctcaagtagagggcgtttctggtcgtcaggatacatgcggggcggaagggagacagaaagacataatacacaagaacagaaagcagcagacagccaggacccttggcccggaactagatctaggatggcctctgagactcagcagctggagtctgtagatgttcagctgagttgaaaaaaaaaaagtcctcggctataaggaaatttagtatagatgcttgccaatcttactaaaatttcccttattttcctttgctctacacgtctttcctttgccttgttgcttccatctccttggcactcctgcttcctcactgcttctgcttgccatgatccccaagtctctgacccaccttcctgcctgctcctctcctcccacattggctcagattctttccccgctgtctgtgggtccacactcccagtggcacctccaggagagaatctgattggctcagttcgccagataactcaactttcccattggctacctttgggtcaggtgatctccactagacctatcgcctatgcctgatggtgggtcacatggtgcaaatgttgcctgagagcttagtggattagggatgtggctgggctcatggttgacgtccctgctgctgagcccttacgggtcaggctgggagaaggtaccatgttgtgtgactggtcatttgaggtcttgcagctgttgcttgctgggcttggcaggtgttcaaagtgaccatttttctgaagggtttttttctgagtattcctcagatgtactcccctggggccgacggtctttccttccacagggcgatgcttccctacttgcttgtgaatgtttccttcatctccaggttgtctggggacaattctgtcttttggaggcctgggcaggatttacagagggctccatgccagctccttcctgccgggtccacttctggtgtagggtaaacacctgcccattcatgtcctagtgttgatagaataatcattttctttcagtacagtttcctttttttttttttttgccccggctttttagatgtagcacttaatgccagttctcgagctccccaaacttaagggacacaggtcaacaagcagtaggtctttggaagctcgctctctcacatggtataaggtgagggggacacatggaatgtaaacctccaaactaattatgggggaaaaaggaatgagaaaaacaaacacaagaaggcaaaacaaaaacacctggttcaattaaaaacaacaacaaagcaaaacaaaaaaaacccaaaaccaaaccacacaataaatgagaaaaaaattacataaaacagatgacatgtatagaaataaaaaaatagaatggaggaactaattccaaatatataagtaatcctaagtggactaaatttgcaaagtaaaaggcaaacattacactggattaaaaaacaaatccagggaatacagtttacag

SEQ ID NO: 22437 - DNA, 1099 bp, Homo sapiens
  source 1..1099: mol_type = unassigned DNA
gggtgacctcacgccggcccggccaccgcggccattagacccggtccaattgctggggctgcagcgctgcctccgagaccgcgagacatctacgcagcgaaatcgagcctggccttgagggtccacaccgcgagggaagatgcgtgcgcccattccagagcctaagcctggagacctgattgagatttttcgccctttctacagacactgggccatctatgttggcgatggatatgtggttcatctggcccctccaagtgaggtcgcaggagctggtgcagccagtgtcatgtccgccctgactgacaaggccatcgtgaagaaggaattgctgtatgatgtggccgggagtgacaagtaccaggtcaacaacaaacatgatgacaagtactcgccgctgccctgcagcaaaatcatccagcgggcggaggagctggtggggcaggaggtgctctacaagctgaccagtgagaactgcgagcactttgtgaatgagctgcgctatggagtcgcccgcagtgaccaggtcagagatgtcatcatcgctgcaagcgttgcaggaatgggcttggcagccatgagccttattggagtcatgttctcaagaaacaagcgacaaaagcaataactgaaaaagactgtcctgtcagcgatgactttatacatcaagggggtcttgttttgctagagagtttggggtttggtttgtggatttcattgtgatttataataaggcttattttcacagaataaaataaagcaaaacgagggaggattttattgggggaagtgcagcaagaactgcctggtgtgaagtctgttcagggaacagccgggctgtcttcctggtcagggattgtctttcactttctttttgcgtgctgtgttctttgcattgcaggaggcagagtccagctccagttatctcaagtagagggcgtttctggtcgtcaggatacatgcggggcggaagggagacagaaagacataatacacaagaacagaaagcagcagacagccaggacccttggcccggaactagatctaggatggcctctgagactcagcagctggagtctgtagatgttcagctgagttg

SEQ ID NO: 22438 - DNA, 5107 bp, Homo sapiens
  source 1..5107: mol_type = unassigned DNA
ggagcagctcttccagaggcccgagtcacctggagcattctggcatggggctgcggccaggcattttcctcctggagctgctgctgcttctggggcaagggacccctcagatccatacctctcctagaaagagtacattggaagggcagctatggccagagaccctgaagaattctccattcccatgcaacccaaataaattaggagtgaatatgccttctaaatcagttcactctctgaagccttctgatattaaatttgtggcagccattggcaatctggaaattcctccagacccagggacgggcgatctggagaagcaagactggactgaaaggccacagcaggtgtgcatgggagtgatgacagtcctttcagacatcatcagatatttcagtccttctgttccaatgcctgtgtgccacactggaaagagagtcataccccacgatggtgctgaagacttgtggattcaggctcaagaactggtgagaaacatgaaagagaacctgcaacttgactttcaatttgactggaagctcatcaatgtgttcttcagtaatgcaagccagtgttacctgtgcccctctgctcaacagaatgggcttgcggcgggcggcgtggatgagctgatgggggtgctggactacctgcagcaggaggtccccagagcatttgtaaacctggtggacctctctgaggttgcagaggtctctcgtcagtatcacggcacttggctcagccctgcaccagagccctgtaattgctcagaggagaccacccggctggccaaggtggtgatgcagtggtcttatcaggaagcctggaacagcctcctggcctccagcaggtacagtgagcaggagtccttcaccgtggttttccagcctttcttctatgagaccaccccatctctacactcggaggacccccgactccaggattctaccacgctggcctggcatctctggaataggatgatggagccagcaggagagaaagatgagccattgagtgtaaaacacgggaggccaatgaagtgtccctctcaggagagcccctatctgttcagctacagaaacagcaactacctgaccagactgcagaaaccccaagacaagcttgaggtaagagaaggagcggaaatcagatgtcctgacaaagacccctccgatacggttcccacctcagttcataggctgaagccggctgacatcaacgtaattggagccctgggtgactctctcacggcaggcaatggggccgggtccacacctgggaacgtcttggacgtcttgactcagtaccgaggcctgtcctggagcgtcggcggagatgagaacatcggcaccgttaccaccctggcgaacatcctccgggaattcaacccttccctgaagggcttctctgttggcactgggaaagaaaccagtcctaatgccttcttaaaccaggctgtggcaggaggccgagctgaggatctacctgtccaggccaggaggctggtggacctgatgaagaatgacacgaggatacactttcaggaagactggaagataataaccctgtttataggcggcaatgacctctgtgatttctgcaatgatctggtccactattctccccagaacttcacagacaacattggaaaggccctggacatcctccatgctgaggttcctcgggcatttgtgaacctggtgacggtgcttgagatcgtcaacctgagggagctgtaccaggagaaaaaagtctactgcccaaggatgatcctcaggtctctgtgtccctgtgtcctgaagtttgatgataactcaacagaacttgctaccctcatcgaattcaacaagaagtttcaggagaagacccaccaactgattgagagtgggcgatatgacacaagggaagattttactgtggttgtgcagccgttctttgaaaacgtggacatgccaaagacctcggaaggattgcctgacaactctttcttcgctcctgactgtttccacttcagcagcaagtctcactcccgagcagccagtgctctctggaacaatatgctggagcctgttggccagaagacgactcgtcataagtttgaaaacaagatcaatatcacatgtccgaaccaggtccagccgtttctgaggacctacaagaacagcatgcagggtcatgggacctggctgccatgcagggacagagccccttctgccttgcaccctacctcagtgcatgccctgagacctgcagacatccaagttgtggctgctctgggggattctctgaccgctggcaatggaattggctccaaaccagacgacctccccgatgtcaccacacagtatcggggactgtcatacagtgcaggaggggacggctccctggagaatgtgaccaccttacctaatatccttcgggagtttaacagaaacctcacaggctacgccgtgggcacgggtgatgccaatgacacgaatgcattcctcaatcaagctgttcccggagcaaaggctgaggatcttatgagccaagtccaaactctgatgcagaagatgaaagatgatcatagagtaaatttccatgaagactggaaggtcatcacagtgctgatcggaggcagcgatttatgtgactactgcacagattcgaatctgtattctgcagccaactttgttcaccatctccgcaatgccttggacgtcctgcatagagaggtgcccagagtcctggtcaacctcgtggacttcctgaaccccactatcatgcggcaggtgttcctgggaaacccagacaagtgcccagtgcagcaggccagcgttttgtgtaactgcgttctgaccctgcgggagaactcccaagagctagccaggctggaggccttcagccgagcctaccggagcagcatgcgcgagctggtggggtcaggccgctatgacacgcaggaggacttctctgtggtgctgcagcccttcttccagaacatccagctccctgtcctggcggatgggctcccagatacgtccttctttgccccagactgcatccacccaaatcagaaattccactcccagctggccagagccctttggaccaatatgcttgaaccacttggaagcaaaacagagaccctggacctgagagcagagatgcccatcacctgtcccactcagaatgagcccttcctgagaacccctcggaatagtaactacacgtaccccatcaagccagccattgagaactggggcagtgacttcctgtgtacagagtggaaggcttccaatagtgttccaacctctgtccaccagctccgaccagcagacatcaaagtggtggccgccctgggtgactctctgactacagcagtgggagctcgaccaaacaactccagtgacctacccacatcttggaggggactctcttggagcattggaggggatgggaacttggagactcacaccacactgcccaacattctgaagaagttcaacccttacctccttggcttctctaccagcacctgggaggggacagcaggactaaatgtggcagcggaaggggccagagctagggacatgccagcccaggcctgggacctggtagagcgaatgaaaaacagccccgacatcaacctggagaaagactggaagctggtcacactcttcattggggtcaacgacttgtgtcattactgtgagaatccggaggcccacttggccacggaatatgttcagcacatccaacaggccctggacatcctctctgaggagctcccaagggctttcgtcaacgtggtggaggtcatggagctggctagcctgtaccagggccaaggcgggaaatgtgccatgctggcagctcagaacaactgcacttgcctcagacactcgcaaagctccctggagaagcaagaactgaagaaagtgaactggaacctccagcatggcatctccagtttctcctactggcaccaatacacacagcgtgaggactttgcggttgtggtgcagcctttcttccaaaacacactcaccccactgaacgagagaggggacactgacctcaccttcttctccgaggactgttttcacttctcagaccgcgggcatgccgagatggccatcgcactctggaacaacatgctggaaccagtgggccgcaagactacctccaacaacttcacccacagccgagccaaactcaagtgcccctctcctgagagcccttacctctacaccctgcggaacagccgattgctcccagaccaggctgaagaagcccccgaggtgctctactgggctgtcccagtggcagcgggagtcggccttgtggtgggcatcatcgggacagtggtctggaggtgcaggagaggtggccggagggaagatcctccaatgagcctgcgcactgtggccctctaggcccgggggtgggtcctcaccctaaactccctatagccactctcttcaccgccctctgccccagccactcccggccaccaggacatgcttcaatgcctggtgccataggaagcccaggggacagtcacaacttcttggggcctgggcttcttccaggcctatgctcctggaatggatacatttaaataaagtccaaagctattttattcctgggtttgcctgcgtgaagcactcaccttccatctcttgtgcagcccaggtgtgggagctgccactttttgtggcctgcctccagcagggctgcccaagccacgaccaaccagagcccaaactgcctgccaccacgagcatatcctcaagtcaccaaacccactatttcaaaggcagaaaaaatgctggtcaccaggtggtggctggaattttggagctggctggttgccattcagtccaatccaacacatacctattaagcaactgttttgtatccaggacaatgcgaagcactgaggtgcctcctaggctgtgcatgtcgcagcctggcagagaggtcaaactccttcaataaccaagaagccacgtgatgatgtgtaactactagggcatcagtaggtaaatgtgtctgattgttttaaagaatagaaagggttcttcggggaaagtttcttgggggagagcaaccttcacat

SEQ ID NO: 22439 - DNA, 3537 bp, Homo sapiens
  source 1..3537: mol_type = unassigned DNA
cagctctgtcctggctggctgggccccacctcaacctctgctgtgcagcttttccttctaggagagatggagccagcaggagagaaagatgagccattgagtgtaaaacacgggaggccaatgaagtgtccctctcaggagagcccctatctgttcagctacagaaacagcaactacctgaccagactgcagaaaccccaagacaagcttgaggtaagagaaggagcggaaatcagatgtcctgacaaagacccctccgatacggttcccacctcagttcataggctgaagccggctgacatcaacgtaattggagccctgggtgactctctcacggcaggcaatggggccgggtccacacctgggaacgtcttggacgtcttgactcagtaccgaggcctgtcctggagcgtcggcggagatgagaacatcggcaccgttaccaccctggcgaacatcctccgggaattcaacccttccctgaagggcttctctgttggcactgggaaagaaaccagtcctaatgccttcttaaaccaggctgtggcaggaggccgagctgaggatctacctgtccaggccaggaggctggtggacctgatgaagaatgacacgaggatacactttcaggaagactggaagataataaccctgtttataggcggcaatgacctctgtgatttctgcaatgatctggtccactattctccccagaacttcacagacaacattggaaaggccctggacatcctccatgctgaggttcctcgggcatttgtgaacctggtgacggtgcttgagatcgtcaacctgagggagctgtaccaggagaaaaaagtctactgcccaaggatgatcctcaggtctctgtgtccctgtgtcctgaagtttgatgataactcaacagaacttgctaccctcatcgaattcaacaagaagtttcaggagaagacccaccaactgattgagagtgggcgatatgacacaagggaagattttactgtggttgtgcagccgttctttgaaaacgtggacatgccaaagacctcggaaggattgcctgacaactctttcttcgctcctgactgtttccacttcagcagcaagtctcactcccgagcagccagtgctctctggaacaatatgctggagcctgttggccagaagacgactcgtcataagtttgaaaacaagatcaatatcacatgtccgaaccaggtccagccgtttctgaggacctacaagaacagcatgcagggtcatgggacctggctgccatgcagggacagagccccttctgccttgcaccctacctcagtgcatgccctgagacctgcagacatccaagttgtggctgctctgggggattctctgaccgctggcaatggaattggctccaaaccagacgacctccccgatgtcaccacacagtatcggggactgtcatacagagaaagtaaaccagggttcttatcagactcctgggtcagcaaatccaacaggaaatgcaccagaaaagcaccaaatccctgaatcttcacctccccgcttgcatgtatacgtgtacacgtggtgttcctacgtctctgtttactgtctttatgtgtttattcatgttgtcttgtagtcacacagctgcctttacatatatgtacacatctgcacagaaaacctctgaaacccatcgcacacttcgagaggccataaccaagacacaatcacaatcagccatgtcttgaaagattagcaattcgacaagaggaaagggtgagaaagggcatcccgaacacggaagtggagaagctcagggtgtgtcaggcgagcggttgcgtgtagatattctcaagtttctttctctcctaataaagttctcattcctgtaggcttcaaagtaagtggcgagtagctcagaatttacctgggaaaacaactagaacgaagctggccacaagggggcagcgtgctaatgagtggcggagccaggacagcacctttgctgccgcctcccttttcttctgagtcagtttgcttcctggggaagtgacagggagcagggagggggtgatcaagactgtgaaggttctctggccagacctgagcagagtcccagagaggatgggtttccagggcgagagggaggcgccatcactcggcctgtaccacccacaacgaggacctaggttgtccttagcatgaggacatcaacctctcaagaacagaggtcagtgccttcctgcgccaaggtccctgcgtttccacaagtccttggtcaggtacctggtcctaacaggctgccatggaacaaatcagagcctcactgactcaccattctgctcctaatgaggctacaagaaaaaaaaccagaggagagaaagcagagcttattacaatcaggaaagagcatgaggttctggcagctgcacttggtctcagctaaagaaggcaatgacctcatacgatagcatgggaaacaaaaatcaagcagacgaaccacattgcaggtgatagatacgcgacgtgcacctggtggggcagcctggggaagtgaggtgatgtgccctactttaaaacagatcgaccagctgggctcctgggattcagatatgaaccagcagtcctctactaaaagtttctttctgcagcgatgggaaaattcagccattgctctgtttcttccaacaagtgaagtccattacagcctaatgtctcaatcttttagttctagctctaaggcctcaggttcaatggctgctgtccctttaaacccttcatttgtcctaaatgtttcaaatagctgcccccaaatgcacgtgtgttaaagatggaagctctaggtcggggtctgagagacagcttgacacttggtagaatacatagactactgtgtctcaaagtgtgttccatggaacattaactccagacctgttcctggagaagagaaaatcctttgtatctgagggggaaacattaccataaccttcctttggggaattcatgtgtgtattagcatattaaaggctctcataaggcctgcaatgcagaaatctatttaagttttatctgtttaacccaatgtttcccttaattccagaacattttctttgttcataacacctgttaacacctcctgaaagtgttcacgtagtagacttatctgagaaaagcaatttttgagccgttaaagcttctagattggacaaactaggcaattaatgatactagatcaattcagaatgcaatttgagcctcttccccctgggaaacaaagtgaaaagagtggatctcatggaattaggggagaagtagacccagaattcatggggggtgggtggctgtgaacaggacctgcagaagaggctcggctgtgaatatttccaaggccccttgacctgtgagattctgtagtgaacggttccagctttggccagcttaacaatgtgctgggccccaaggtcttgagagcattgccttttcttccattgaaataagttcgcttgtttgggaccattcaaaggatcaaaataaaatttacttacc

SEQ ID NO: 22440 - DNA, 5115 bp, Homo sapiens
  source 1..5115: mol_type = unassigned DNA
ggagcagctcttccagaggcccgagtcacctggagcattctggcatggggctgcggccaggcattttcctcctggagctgctgctgcttctggggcaagggacccctcagatccatacctctcctagaaagagtacattggaagggcagctatggccagagaccctgaagaattctccattcccatgcaacccaaataaattaggagtgaatatgccttctaaatcagttcactctctgaagccttctgatattaaatttgtggcagccattggcaatctggaaattcctccagacccagggacgggcgatctggagaagcaagactggactgaaaggccacagcaggtgtgcatgggagtgatgacagtcctttcagacatcatcagatatttcagtccttctgttccaatgcctgtgtgccacactggaaagagagtcataccccacgatggtgctgaagacttgtggattcaggctcaagaactggtgagaaacatgaaagagaacctgcaacttgactttcaatttgactggaagctcatcaatgtgttcttcagtaatgcaagccagtgttacctgtgcccctctgctcaacaggcaccctcacttagcacggttctcctctcacagaatgggcttgcggcgggcggcgtggatgagctgatgggggtgctggactacctgcagcaggaggtccccagagcatttgtaaacctggtggacctctctgaggttgcagaggtctctcgtcagtatcacggcacttggctcagccctgcaccagagccctgtaattgctcagaggagaccacccggctggccaaggtggtgatgcagtggtcttatcaggaagcctggaacagcctcctggcctccagcaggtacagtgagcaggagtccttcaccgtggttttccagcctttcttctatgagaccaccccatctctacactcggaggacccccgactccaggattctaccacgctggcctggcatctctggaataggatgatggagccagcaggagagaaagatgagccattgagtgtaaaacacgggaggccaatgaagtgtccctctcaggagagcccctatctgttcagctacagaaacagcaactacctgaccagactgcagaaaccccaagacaagcttgaggtaagagaaggagcggaaatcagatgtcctgacaaagacccctccgatacggttcccacctcagttcataggctgaagccggctgacatcaacgtaattggagccctgggtgactctctcacggcaggcaatggggccgggtccacacctgggaacgtcttggacgtcttgactcagtaccgaggcctgtcctggagcgtcggcggagatgagaacatcggcaccgttaccaccctggcgaacatcctccgggaattcaacccttccctgaagggcttctctgttggcactgggaaagaaaccagtcctaatgccttcttaaaccaggctgtggcaggaggccgagctgaggatctacctgtccaggccaggaggctggtggacctgatgaagaatgacacgaggatacactttcaggaagactggaagataataaccctgtttataggcggcaatgacctctgtgatttctgcaatgatctggttcctcgggcatttgtgaacctggtgacggtgcttgagatcgtcaacctgagggagctgtaccaggagaaaaaagtctactgcccaaggatgatcctcaggtctctgtgtccctgtgtcctgaagtttgatgataactcaacagaacttgctaccctcatcgaattcaacaagaagtttcaggagaagacccaccaactgattgagagtgggcgatatgacacaagggaagattttactgtggttgtgcagccgttctttgaaaacgtggacatgccaaagacctcggaaggattgcctgacaactctttcttcgctcctgactgtttccacttcagcagcaagtctcactcccgagcagccagtgctctctggaacaatatgctggagcctgttggccagaagacgactcgtcataagtttgaaaacaagatcaatatcacatgtccgaaccaggtccagccgtttctgaggacctacaagaacagcatgcagggtcatgggacctggctgccatgcagggacagagccccttctgccttgcaccctacctcagtgcatgccctgagacctgcagacatccaagttgtggctgctctgggggattctctgaccgctggcaatggaattggctccaaaccagacgacctccccgatgtcaccacacagtatcggggactgtcatacagtgcaggaggggacggctccctggagaatgtgaccaccttacctaatatccttcgggagtttaacagaaacctcacaggctacgccgtgggcacgggtgatgccaatgacacgaatgcattcctcaatcaagctgttcccggagcaaaggctgaggatcttatgagccaagtccaaactctgatgcagaagatgaaagatgatcatagagtaaatttccatgaagactggaaggtcatcacagtgctgatcggaggcagcgatttatgtgactactgcacagattcgaatctgtattctgcagccaactttgttcaccatctccgcaatgccttggacgtcctgcatagagaggtgcccagagtcctggtcaacctcgtggacttcctgaaccccactatcatgcggcaggtgttcctgggaaacccagacaagtgcccagtgcagcaggccagcgttttgtgtaactgcgttctgaccctgcgggagaactcccaagagctagccaggctggaggccttcagccgagcctaccggagcagcatgcgcgagctggtggggtcaggccgctatgacacgcaggaggacttctctgtggtgctgcagcccttcttccagaacatccagctccctgtcctggcggatgggctcccagatacgtccttctttgccccagactgcatccacccaaatcagaaattccactcccagctggccagagccctttggaccaatatgcttgaaccacttggaagcaaaacagagaccctggacctgagagcagagatgcccatcacctgtcccactcagaatgagcccttcctgagaacccctcggaatagtaactacacgtaccccatcaagccagccattgagaactggggcagtgacttcctgtgtacagagtggaaggcttccaatagtgttccaacctctgtccaccagctccgaccagcagacatcaaagtggtggccgccctgggtgactctctgactacagcagtgggagctcgaccaaacaactccagtgacctacccacatcttggaggggactctcttggagcattggaggggatgggaacttggagactcacaccacactgcccaacattctgaagaagttcaacccttacctccttggcttctctaccagcacctgggaggggacagcaggactaaatgtggcagcggaaggggccagagctagggacatgccagcccaggcctgggacctggtagagcgaatgaaaaacagccccgacatcaacctggagaaagactggaagctggtcacactcttcattggggtcaacgacttgtgtcattactgtgagaatccggaggcccacttggccacggaatatgttcagcacatccaacaggccctggacatcctctctgaggagctcccaagggctttcgtcaacgtggtggaggtcatggagctggctagcctgtaccagggccaaggcgggaaatgtgccatgctggcagctcagaacaactgcacttgcctcagacactcgcaaagctccctggagaagcaagaactgaagaaagtgaactggaacctccagcatggcatctccagtttctcctactggcaccaatacacacagcgtgaggactttgcggttgtggtgcagcctttcttccaaaacacactcaccccactgaacgagagaggggacactgacctcaccttcttctccgaggactgttttcacttctcagaccgcgggcatgccgagatggccatcgcactctggaacaacatgctggaaccagtgggccgcaagactacctccaacaacttcacccacagccgagccaaactcaagtgcccctctcctgagagcccttacctctacaccctgcggaacagccgattgctcccagaccaggctgaagaagcccccgaggtgctctactgggctgtcccagtggcagcgggagtcggccttgtggtgggcatcatcgggacagtggtctggaggtgcaggagaggtggccggagggaagatcctccaatgagcctgcgcactgtggccctctaggcccgggggtgggtcctcaccctaaactccctatagccactctcttcaccgccctctgccccagccactcccggccaccaggacatgcttcaatgcctggtgccataggaagcccaggggacagtcacaacttcttggggcctgggcttcttccaggcctatgctcctggaatggatacatttaaataaagtccaaagctattttattcctgggtttgcctgcgtgaagcactcaccttccatctcttgtgcagcccaggtgtgggagctgccactttttgtggcctgcctccagcagggctgcccaagccacgaccaaccagagcccaaactgcctgccaccacgagcatatcctcaagtcaccaaacccactatttcaaaggcagaaaaaatgctggtcaccaggtggtggctggaattttggagctggctggttgccattcagtccaatccaacacatacctattaagcaactgttttgtatccaggacaatgcgaagcactgaggtgcctcctaggctgtgcatgtcgcagcctggcagagaggtcaaactccttcaataaccaagaagccacgtgatgatgtgtaactactagggcatcagtaggtaaatgtgtctgattgttttaaagaatagaaagggttcttcggggaaagtttcttgggggagagcaaccttcacatgtcattttgggaaaaggaataaaaaatgattgggacacaaa

SEQ ID NO: 22441 - DNA, 1672 bp, Homo sapiens
  source 1..1672: mol_type = unassigned DNA
ctttgttcaccatctccgcaatgccttggacgtcctgcatagagaggtgcccagagtcctggtcaacctcgtggacttcctgaaccccactatcatgcggcaggtgttcctgggaaacccagacaagtgcccagtgcagcaggccagcttgaaccacttggaagcaaaacagagaccctggacctgagagcagagatgcccatcacctgtcccactcagaatgagcccttcctgagaacccctcggaatagtaactacacgtaccccatcaagccagccattgagaactggggcagtgacttcctgtgtacagagtggaaggcttccaatagtgttccaacctctgtccaccagctccgaccagcagacatcaaagtggtggccgccctgggtgactctctgactacagcagtgggagctcgaccaaacaactccagtgacctacccacatcttggaggggactctcttggagcattggaggggatgggaacttggagactcacaccacactgcccaacattctgaagaagttcaacccttacctccttggcttctctaccagcacctgggaggggacagcaggactaaatgtggcagcggaaggggccagagctagggacatgccagcccaggcctgggacctggtagagcgaatgaaaaacagccccgacatcaacctggagaaagactggaagctggtcacactcttcattggggtcaacgacttgtgtcattactgtgagaatccggaggcccacttggccacggaatatgttcagcacatccaacaggccctggacatcctctctgaggagctcccaagggctttcgtcaacgtggtggaggtcatggagctggctagcctgtaccagggccaaggcgggaaatgtgccatgctggcagctcagaacaactgcacttgcctcagacactcgcaaagctccctggagaagcaagaactgaagaaagtgaactggaacctccagcatggcatctccagtttctcctactggcaccaatacacacagcgtgaggactttgcggttgtggtgcagcctttcttccaaaacacactcaccccactgaacgagagaggggacactgacctcaccttcttctccgaggactgttttcacttctcagaccgcgggcatgccgagatggccatcgcactctggaacaacatgctggaaccagtgggccgcaagactacctccaacaacttcacccacagccgagccaaactcaagtgcccctctcctgagagcccttacctctacaccctgcggaacagccgattgctcccagaccaggctgaagaagcccccgaggtgctctactgggctgtcccagtggcagcgggagtcggccttgtggtgggcatcatcgggacagtggtctggaggtgcaggagaggtggccggagggaagatcctccaatgagcctgcgcactgtggccctctaggcccgggggtgggtcctcaccctaaactccctatagccactctcttcaccgccctctgccccagccactcccggccaccaggacatgcttcaatgcctggtgccataggaagcccaggggacagtcacaacttcttggggcctgggcttcttccaggcctatgctcctggaatggatacatttaaataaagtccaaagctatttt

SEQ ID NO: 22442 - DNA, 3946 bp, Homo sapiens
  source 1..3946: mol_type = unassigned DNA
ccgcgcggtgggagcagcggcgccgtcggtccccgtcagggctccgtgggtccccgacccgcccctggccgggccatggcgggcgcccagcccggcgtccacgcgctgcagttggagccgcccaccgtggtggagaccctgcggcgcgggagtaagttcatcaaatgggacgaggagaagctgatgacggtggtgtctgggccagacccagtgaacacagtgttcttgaacttcatggccgtgcaggatgacacagccaaggtctggtctgaggagctattcaagctggctatgaacatcctggctcagaacgcctcccggaacaccttcctgcgcaaagcatacacgaagctgaagctgcaggtgaaccaggatggtcggatccccgtcaagaacatcctgaagatgttctcagcagacaagaagcgggtggagactgcgctggaatcctgtggcctcaaattcaaccggagtgagtccatccggcctgatgagttttccttggaaatctttgagcggttcctgaacaagctgtgtctgcggccggacattgacaagatcctgctggagataggcgccaagggcaagccatacctgacgctggagcagctcatggacttcatcaaccagaagcaacgcgacccgagactcaacgaagtgctgtacccgcccctgcggccctcccaggcccggctgctcatcgaaaagtatgagcccaaccagcagtttctggagcgagaccagatgtccatggagggctttagccgctacctgggaggcgaggagaatggcatcctgcccctggaagccctggatctgagcacggacatgacccagccactgagtgcctacttcatcaactcctcgcataacacctatctcactgcggggcagctggctgggacctcgtcggtggagatgtaccgccaggcactactatggggctgccgctgcgtggagctggacgtgtggaagggacggccgcctgaggaggaacccttcattacccacggcttcaccatgaccacagaggtgcctctgcgcgacgtgctggaggccattgccgagactgccttcaagacctcgccctaccccgtcatcctctccttcgagaaccatgtggactcggcaaagcaacaggcaaagatggctgagtactgccgctccatctttggagacgcgctactcatcgagcctctggacaagtacccgctggccccaggcgttcccctgcccagcccccaggacctgatgggccgtatcctggtgaagaacaagaagcggcaccgacccagcgcaggtggcccagacagcgccgggcgcaagcggcccctggagcagagcaattctgccctgagcgagagctccgcggccaccgagccctcctccccgcagctggggtctcccagctctgacagctgcccaggcctgagcaatggggaggaggtagggcttgagaagcccagcctggagcctcagaagtctctgggtgacgagggcctgaaccgaggcccctatgttcttggacctgctgaccgtgaggatgaggaggaagatgaggaagaggaggaacagacagaccccaaaaagccaactacagatgagggcacagccagcagcgaggtgaatgccactgaggagatgtccacgcttgtcaactacatcgaacctgtcaagttcaagtcctttgaggctgctcgaaagaggaacaaatgcttcgagatgtcgtcctttgtggagaccaaggccatggagcaactgaccaagagccccatggagtttgtggaatacaacaagcagcagctcagccgcatctaccccaagggcacccgcgtggactcctccaactacatgccccagctcttctggaacgtagggtgccagcttgttgcgctcaacttccagaccctcgatgtggcgatgcagctcaacgcgggcgtttttgagtacaacgggcgcagcgggtacctgctcaagccggagttcatgcggcggccggacaagtccttcgaccccttcactgaggtcatcgtggatggcatcgtggccaatgccttgcgggtcaaggtgatctcagggcagttcctgtccgacaggaaggtgggcatctacgtggaggtggacatgtttggcctccctgttgatacgcggcgcaagtaccgcacccggacctctcaggggaactcgttcaaccccgtgtgggacgaagagcccttcgacttccccaaggtggtgctgcccacgctggcttcacttcgcattgcagcctttgaggaggggggtaaattcgtagggcaccggatcctgcctgtctctgccatccgctccggataccactacgtctgcctgcggaacgaggccaaccaaccgctgtgcctgccggccctgctcatctacaccgaagcctcggactacattcctgacgaccaccaggactatgcggaggccctgatcaaccccattaagcacgtcagcctgatggaccagagggcccggcagctggccgccctcattggggagagtgaggctcaggctggccaagagacgtgccaggacacccagtctcagcagctggggtctcagccgtcctcaaaccccacccccagcccactggatgcctccccccgccggccccctggccccaccacctcccctgccagcacctccctcagcagcccagggcagcgtgatgatctcatcgccagcatcctctcagaggtggcccccaccccgctggatgagctccgaggtcacaaggctctggtcaagctccggagccggcaagagcgagacctgcgggagctgcgcaagaagcatcagcggaaggcagtcaccctcacccgccgcctgctggatggcctggctcaggcacaggctgagggcaggtgccggctgcggccaggtgccctaggtggggccgctgatgtggaggacacgaaggagggggaggacgaggcaaagcggtatcaggagttccagaacagacaggtgcagagcctgctggagctgcgggaggcccaggtggacgcagaggcccagcggaggctggaacacctgagacaggctctgcagcggctcagggaggtcgtccttgatgcaaacacaactcagttcaagaggctgaaagagatgaacgagagggagaagaaggagctgcagaagatcctggacagaaagcgccataacagcatctcggaggccaagatgagggacaagcataagaaggaggcggaactgacggagattaaccgtcggcacatcactgagtcagtcaactccatccgtcggctggaggaggcccagaagcagcggcatgaccgtcttgtggctgggcagcagcaggtcctgcaacagctggcagaagaggagcccaagctgctggcccagctggcccaggagtgtcaggagcagcgggcgaggctcccccaggagatccgccggagcctgctgggcgagatgccggaggggctgggggacgggcctctggtggcctgtgccagcaacggtcacgcacccgggagcagcgggcacctgtcgggcgctgactcggagagccaggaggagaacacgcagctctgaactggctgagcgaggtggccacagggccagggcgggcgctgggtggagggcaggaggcaatgacactaatgctttttttttttttttttaactttttatctagaaattttatttttttaaacccggggcaagtacctcagctaactcccttcatcctcctggggcccctccttcctgccctcagtcttaggttagggccttggtcagggctttgctccctgtgacacccacaccctcgagctagcagcgtctcctcccttccccgggagagctggctggagacttggagctccgggaagtaggagtcacatttttttctctattctttggggattttttttacatgaataaaagtggatttcaggga

SEQ ID NO: 22443 - DNA, 6729 bp, Homo sapiens
  source 1..6729: mol_type = unassigned DNA
ggccgcccggagcccagatgagcccagatggccggggctcaacccggagtgcacgccttgcaactcaagcccgtgtgcgtgtccgacagcctcaagaagggcaccaaattcgtcaagtgggatgatgactcaactattgttactccaattattttgaggactgaccctcagggatttttcttttactggacagatcaaaacaaggagacagagctactggatctcagccttgtcaaagatgccagatgtgggagacacgccaaagctcccaaggaccccaaattacgtgaacttttggatgtggggaacatcgggcgcctggagcagcgcatgatcacagtggtgtatgggcctgacctcgtgaacatctcccatttgaatctcgtggctttccaagaagaagtggccaaggaatggacaaatgaggttttcagtttggcaacaaacctgctggcccaaaacatgtccagggatgcatttctggaaaaagcctatactaaacttaagctgcaagtcactccagaagggcgtattcctctcaaaaacatatatcgcttgttttcagcagatcggaagcgagttgaaactgctttagaggcttgtagtcttccatcttcaaggaatgattcaatacctcaagaagatttcactccagaagtgtacagagttttcctcaacaacctttgccctcgacctgaaattgataacatcttttcagaatttggtgcaaaaagcaaaccatatcttaccgttgatcagatgatggattttatcaaccttaagcagcgagatcctcggcttaatgaaatactttatccacctctaaaacaagagcaagtccaagtattgattgagaagtatgaacccaacaacagcctcgccagaaaaggacaaatatcagtggatgggttcatgcgctatctgagtggagaagaaaacggagtcgtttcacctgagaaactggatttgaatgaagacatgtctcagcccctttctcactatttcattaattcctcgcacaacacctacctcacagctggccaactggctggaaactcctctgttgagatgtatcgccaagtgctcctgtctggttgtcgctgtgtggagctggactgctggaagggacggactgcagaagaggaacctgtcatcacccatggcttcaccatgacaactgaaatatctttcaaggaagtgatagaagcaattgcggagtgtgcatttaagacttcaccttttccaattctcctttcgtttgagaaccatgtggattccccaaagcagcaagccaagatggcggagtactgccgactgatctttggggatgcccttctcatggagcccctggaaaaatatccactggaatctggagttcctcttccaagccctatggatttaatgtataaaattttggtgaaaaataagaagaaatcacacaagtcatcagaaggaagcggcaaaaagaagctctcagaacaagcctccaacacctacagtgactcctccagcatgttcgagccctcatccccaggagccggagaagctgatacggaaagtgacgacgacgatgatgatgatgactgtaaaaaatcttcaatggatgaggggactgctggaagtgaggctatggccacagaagaaatgtctaatctggtgaactatattcagccagtcaagtttgagtcatttgaaatttcaaaaaaaagaaataaaagttttgaaatgtcttccttcgtggaaaccaaaggacttgaacaactcaccaagtctccagtggaatttgtagaatataacaaaatgcagcttagcaggatatatccaaaaggaacacgtgtggattcatccaactatatgcctcagctcttctggaatgcaggttgtcagatggtggcacttaatttccagacaatggacctggctatgcaaataaatatggggatgtatgaatacaacgggaagagtggctacagattgaagccagagttcatgaggaggcctgacaagcattttgatccatttactgaaggcatcgtagatgggatagtggcaaacactttgtctgttaagattatttcaggtcagtttctttctgataagaaagttgggacttacgtggaagtagatatgtttggtttgcctgtggatacaaggaggaaggcatttaagaccaaaacatcccaaggaaatgctgtgaatcctgtctgggaagaagaacctattgtgttcaaaaaggtggttcttcctactctggcctgtttgagaatagcagtttatgaagaaggaggtaaattcattggccaccgtatcttgccagtgcaagccattcggccaggctatcactatatctgtctaaggaatgaaaggaaccagcctctgacgctgcctgctgtctttgtctacatagaagtgaaagactatgtgccagacacatatgcagatgtcatcgaagctttatcaaacccaatccgatatgtgaacctgatggaacagagagctaagcaattggctgctttgacactggaagatgaagaagaagtaaagaaagaggctgatcctggagaaacaccatcagaggctccaagtgaagcgagaacgactccagcagaaaatggggtgaatcacactacaaccctgacacccaagccaccctcccaggctctccacagccagccagctccaggttctgtaaaggcacctgccaaaacagaagatcttattcagagtgtcttaacagaagtggaagcacagaccatcgaagaactaaagcaacagaaatcgtttgtgaaacttcaaaagaaacactacaaagaaatgaaagacctggttaagagacaccacaagaaaaccactgaccttatcaaagaacacactaccaagtataatgaaattcagaatgactacttgagaaggagagccgctttggaaaagtccgccaaaaaggacagtaagaaaaaatcggaacccagcagccctgatcatggttcatcaacgattgagcaagacctcgctgctctggatgctgaaatgacccaaaagttaatagacttgaaggacaaacaacagcagcagctgcttaatcttcggcaagaacagtattatagtgaaaaataccagaagcgagaacatattaaactgcttattcaaaagttgacggatgtcgcagaagagtgtcagaacaatcagttaaagaagctcaaagaaatctgtgagaaagaaaagaaagaattaaagaagaaaatggataaaaagaggcaggagaagataacagaagctaaatccaaagacaaaagtcagatggaagaggagaagacagagatgatccggtcatatatccaggaagtggtgcagtatatcaagaggctagaagaagcgcaaagtaaacggcaagaaaaactcgtagagaaacacaaggaaatacgtcagcagatcctggatgaaaagcccaagctgcaggtggagctggagcaagaataccaagacaaattcaaaagactgcccctcgagattttggaattcgtgcaggaagccatgaaaggaaagatcagtgaagacagcaatcacggttctgcccctctctccctgtcctcagaccctggaaaagtgaaccacaagactccctccagtgaggagctgggaggagacatcccaggaaaagaatttgatactcctctgtgaatgctcctgccaggccttcagaaattgcatggccactccagcgtcatcggactctctcttattacaaagatcactgcccaggaccatcttcccgagaagcatcccttagcctaaaatccacaccaaagggagagttccagaggaatccatgaagaattcccatgcccaggctccatgtgtcatgtggaaacctccacaggtctgctagtgaagaatgcatgtatgtgagatttttgttttctttccaatagcaaattcaaagcaagcaacttgcaggctccatggaacttttaatgaaggacagtgtcttctttgaagaaaatcaagctcgtgtttttattcgaagctctggtgtaaaatatttcaaagtcatagaaatagtttgagaaatgcatagcattatttaacactattgaacagccgactttgagcattgtttcttctaactgcccctcaactaccattatcttcaagtcaacatgcatattacattttcatcctttgctttgcaagcactggtggcttgcagtttgctaatttatttatcatagagtcatcaatgtatttgttgctgacatggttttattagatactgtagtgattcaaataagttttctatttgaaaaaaaaaatcacttgattgtatccttgcccagtgaagccatcctaagacttagcaatatggattgtacatttggctgcatgagcaagtcggccgcacacttccagacagtgtgctgtttgaattgactatttgcactcaaagtctgggtattcattggttattggcctgaaatgatcaaataactacaaatgatctgttgaataaaaatagttgagctgatatatgttaagcagatattcaatcagaatgaacaggttccggtggttattttgccgtttgacattttttatggttcatttatttttaatatagagaggaagattgaatatttatctagagaatacaaagacccacatgtaaatgataggtattatctccatgtatatatgtacccacttagtcatgtaagtgcatatacacatacacacacatgagtgtagacatgtgtttattaattgacaatgacccaaatctcttccacaagacttaaaaccaaattcagggacaaatggatagagaagaaaagggtcaaacatcgagattacatggatgttaaattatatggagacgctaagaaataattgatggagccattgatgcaaaccgaagtagatttagaacttatatgaatttgatttatattttgcaagatcaaaaattagatgttaagtatcagattttaagcttgttttaatggtcaaaaaattaggacagaaataatatggacatttattagtatcttccataatttttaagtctgacacatttctattttattctaacataaaaaaacttccattatatatttactaagtatatttaattcacttaactctgtctttataagttcctattttagatggaataagagaaacaaattatatcaaggtaaaactgatcaaaagcataattgaaagttctgaaaaaagaaaaataataatatgtagaaaaatgtaacttagagagtaacacatgaacattgaagttaaaacccagaagccagatgctcacagttttattttactttaaaataaacctgtctgactgtagctttgtgaaatatcttaaaacgcaaaaaccaattgtgtcctgaaaattgtttcaagaatttaatatttttatgaaaattattttatttaactttaagcaataactagagattacaattaaattttaatcaaaatgaaggcttagttcaaacataaggaaacagtgtttgattaaaaaaaacacatctagtaagacgtaaggggaaaatcacatcctctttggagatgattatattttgatctgaagggtttggggtgttcattagacacttaataaaacttaacttccaatgaaaaagaaatcttttgtaaatcattctacttttgcactttgaaagaaaggcgttaatcataaagaagcaagaatggtcaaaatcgaatgctgcatttttataaacaaaattacagactgtctgaaattgaagaagaatgaactaataatagcattcataaccaaacacaatgatgattattgcagaacattgtatcacattttagtccagagatagaataaagttgaataaccttgacttacacaaaactgttttggtagttggatttcattatcttagtgaatttagtcattttacaatatgtttgtatttggccatttactgtaatcacatttttatatctgtacaatgacactttttgcagttgtggggtagtgtgtaacactgtccatcttgcatcattgaaactactacaatgatactatcatttaataatattaatattacttgaaatagactaagataaagaaaaggggtctgtatgatgtgcagttttgtgcctttatgtatttgccttgttctttgtcgaatgtgtgaaattccgtactgtggtttttcctataatagaaagtagagctgtgtattaaattagactgtgtctctctgatacctttacactactgagaatagcatggttttggccatgtaaaccaattttcaaagttctaatgacatagccatgtgtttttggttttttatatttcattttaaaatttgagtatcaccatacattaattaatactcctgtagtagataagctgtcattaagtaattcccaaaaaaagggccatttgcttgcattactttgaatttaatgttgcgcttgtgcactgtgttaatattgtttgtgatggattggacgttgtgactcttgccttttaagaagaaaaaaaagataggacaaagtatttgaagctcttaaaatgtacatattttggttcttctatctcaaattatttaaaatgcataattcacatttttgtaataattctatgcaattttgtggcatgatgtttcttccacttgtaattttatgtgctttcatcacaaatccaaaggaaagaataaaaatttcttaacacaa

SEQ ID NO: 22444 - DNA, 1856 bp, Homo sapiens
  source 1..1856: mol_type = unassigned DNA
aaatactttatccacctctaaaacaagagcaagtccaagtattgattgagaagtatgaacccaacaacagcctcgccagaaaaggacaaatatcagtggatgggttcatgcgctatctgagtggagaagaaaacggagtcgtttcacctgagaaactggatttgaatgaagacatgtctcagcccctttctcactatttcattaattcctcgcacaacacctacctcacagctggccaactggctggaaactcctctgttgagatgtatcgccaagtgctcctgtctggttgtcgctgtgtggagctggactgctggaagggacggactgcagaagaggaacctgtcatcacccatggcttcaccatgacaactgaaatatctttcaaggaagtgatagaagcaattgcggagtgtgcatttaagacttcaccttttccaattctcctttcgtttgagaaccatgtggattccccaaagcagcaagccaagatggcggagtactgccgactgatctttggggatgcccttctcatggagcccctggaaaaatatccactggaatctggagttcctcttccaagccctatggatttaatgtataaaattttggtgaaaaataagaagaaatcacacaagtcatcagaaggaagcggcaaaaagaagctctcagaacaagcctccaacacctacagtgactcctccagcatgttcgagccctcatccccaggagccggagaagctgatacggaaagtgacgacgacgatgatgatgatgactgtaaaaaatcttcaatggatgaggggactgctggaagtgaggctatggccacagaagaaatgtctaatctggtgaactatattcagccagtcaagtttgagtcatttgaaatttcaaaaaaaagaaataaaagttttgaaatgtcttccttcgtggaaaccaaaggacttgaacaactcaccaagtctccagtggaatttgtagaatataacaaaatgcagcttagcaggatatatccaaaaggaacacgtgtggattcatccaactatatgcctcagctcttctggaatgcaggttgtcagatggtggcacttaatttccagacaatggacctggctatgcaaataaatatggggatgtatgaatacaacgggaagagtggctacagattgaagccagagttcatgaggaggcctgacaagcattttgatccatttactgaaggcatcgtagatgggatagtggcaaacactttgtctgttaagattatttcaggtcagtttctttctgataagaaagttgggacttacgtggaagtagatatgtttggtttgcctgtggatacaaggaggaaggcatttaagaccaaaacatcccaaggaaatgctgtgaatcctgtctgggaagaagaacctattgtgttcaaaaaggtggttcttcctactctggcctgtttgagaatagcagtttatgaagaaggaggtaaattcattggccaccgtatcttgccagtgcaagccattcggccaggctatcactatatctgtctaaggaatgaaaggaaccagcctctgacgctgcctgctgtctttgtctacatagaagtgaaagactatgtgccagacacatatgcagatgtcatcgaagctttatcaaacccaatccgatatgtgaacctgatggaacagagagctaagcaattggctgctttgacactggaagatgaagaagaagtaaagaaagagggtggatttctgcatgatgaaattatgagactcacccgtaatacgctggaaaaactgatggccttacctcttacccatgtggtgcccatccaaagcaagatgctgtcataa

SEQ ID NO: 22445 - DNA, 3854 bp, Homo sapiens
  source 1..3854: mol_type = unassigned DNA
cagatggccggggctcaacccggagtgcacgccttgcaactcaagcccgtgtgcgtgtccgacagcctcaagaagggcaccaaattcgtcaagtgggatgatgactcaactattgttactccaattattttgaggactgaccctcagggatttttcttttactggacagatcaaaacaaggagacagagctactggatctcagccttgtcaaagatgccagatgtgggagacacgccaaagctcccaaggaccccaaattacgtgaacttttggatgtggggaacatcgggcgcctggagcagcgcatgatcacagtggtgtatgggcctgacctcgtgaacatctcccatttgaatctcgtggctttccaagaagaagtggccaaggaatggacaaatgaggttttcagtttggcaacaaacctgctggcccaaaacatgtccagggatgcatttctggaaaaagcctatactaaacttaagctgcaagtcactccagaagggcgtattcctctcaaaaacatatatcgcttgttttcagcagatcggaagcgagttgaaactgctttagaggcttgtagtcttccatcttcaaggaatgattcaatacctcaagaagatttcactccagaagtgtacagagttttcctcaacaacctttgccctcgacctgaaattgataacatcttttcagaatttggtgcaaaaagcaaaccatatcttaccgttgatcagatgatggattttatcaaccttaagcagcgagatcctcggcttaatgaaatactttatccacctctaaaacaagagcaagtccaagtattgattgagaagtatgaacccaacaacagcctcgccagaaaaggacaaatatcagtggatgggttcatgcgctatctgagtggagaagaaaacggagtcgtttcacctgagaaactggatttgaatgaagacatgtctcagcccctttctcactatttcattaattcctcgcacaacacctacctcacagctggccaactggctggaaactcctctgttgagatgtatcgccaagtgctcctgtctggttgtcgctgtgtggagctggactgctggaagggacggactgcagaagaggaacctgtcatcacccatggcttcaccatgacaactgaaatatctttcaaggaagtgatagaagcaattgcggagtgtgcatttaagacttcaccttttccaattctcctttcgtttgagaaccatgtggattccccaaagcagcaagccaagatggcggagtactgccgactgatctttggggatgcccttctcatggagcccctggaaaaatatccactggaatctggagttcctcttccaagccctatggatttaatgtataaaattttggtgaaaaataagaagaaatcacacaagtcatcagaaggaagcggcaaaaagaagctctcagaacaagcctccaacacctacagtgactcctccagcatgttcgagccctcatccccaggagccggagaagctgatacggaaagtgacgacgacgatgatgatgatgactgtaaaaaatcttcaatggatgaggggactgctggaagtgaggctatggccacagaagaaatgtctaatctggtgaactatattcagccagtcaagtttgagtcatttgaaatttcaaaaaaaagaaataaaagttttgaaatgtcttccttcgtggaaaccaaaggacttgaacaactcaccaagtctccagtggaatttgtagaatataacaaaatgcagcttagcaggatatatccaaaaggaacacgtgtggattcatccaactatatgcctcagctcttctggaatgcaggttgtcagatggtggcacttaatttccagacaatggacctggctatgcaaataaatatggggatgtatgaatacaacgggaagagtggctacagattgaagccagagttcatgaggaggcctgacaagcattttgatccatttactgaaggcatcgtagatgggatagtggcaaacactttgtctgttaagattatttcaggtcagtttctttctgataagaaagttgggacttacgtggaagtagatatgtttggtttgcctgtggatacaaggaggaaggcatttaagaccaaaacatcccaaggaaatgctgtgaatcctgtctgggaagaagaacctattgtgttcaaaaaggtggttcttcctactctggcctgtttgagaatagcagtttatgaagaaggaggtaaattcattggccaccgtatcttgccagtgcaagccattcggccaggctatcactatatctgtctaaggaatgaaaggaaccagcctctgacgctgcctgctgtctttgtctacatagaagtgaaagactatgtgccagacacatatgcagatgtcatcgaagctttatcaaacccaatccgatatgtgaacctgatggaacagagagctaagcaattggctgctttgacactggaagatgaagaagaagtaaagaaagaggctgatcctggagaaacaccatcagaggctccaagtgaagcgagaacgactccagcagaaaatggggtgaatcacactacaaccctgacacccaagccaccctcccaggctctccacagccagccagctccaggttctgtaaaggcacctgccaaaacagaagatcttattcagagtgtcttaacagaagtggaagcacagaccatcgaagaactaaagcaacagaaatcgtttgtgaaacttcaaaagaaacactacaaagaaatgaaagacctggttaagagacaccacaagaaaaccactgaccttatcaaagaacacactaccaagtataatgaaattcagaatgactacttgagaaggagagccgctttggaaaagtccgccaaaaaggacagtaagaaaaaatcggaacccagcagccctgatcatggttcatcaacgattgagcaagacctcgctgctctggatgctgaaatgacccaaaagttaatagacttgaaggacaaacaacagcagcagctgcttaatcttcggcaagaacagtattatagtgaaaaataccagaagcgagaacatattaaactgcttattcaaaagttgacggatgtcgcagaagagtgtcagaacaatcagttaaagaagctcaaagaaatctgtgagaaagaaaagaaagaattaaagaagaaaatggataaaaagaggcaggagaagataacagaagctaaatccaaagacaaaagtcagatggaagaggagaagacagagatgatccggtcatatatccaggaagtggtgcagtatatcaagaggctagaagaagcgcaaagtaaacggcaagaaaaactcgtagagaaacacaaggaaatacgtcagcagatcctggatgaaaagcccaagggggaaggttcctcctcattcttgtcggaaacttgccatgaggatccctctgtttcccccaactttactccccccaaccctcaagctctcaagtggtgaccaccgtccttccggccaggtaggactggatgggaggggtcgcttttgagagaagggtggtgtgtagccatccagttttcaggcatcacggacttgctcgtttgtccttcatcctccctttctctacattcccatcttttttttctgctaaagttcccagccacacccatgatcatttcctcatcctttctgccttcctctggtattaatttctccatcattgtgctctctcttcctgacataaatctcattcttccatattgtcttcttcctctttctccattttgtttctctattggcaaatttggcttcctttttaatctggattt

SEQ ID NO: 22446 - DNA, 7295 bp, Homo sapiens
  source 1..7295: mol_type = unassigned DNA
cagcgagcgagggtggcggggaaggggggcgggggggaggaggagggaggagggaaaagagcggttagggggggcgccgggcgtgtgtcactcgctctctccctctgtgtatagaggatgtgctgaatggtgcgctttgaggcggcggcggcggaggagcagaatccgccgcgactggcagcctcggctgaccggctcggcttctcttcgccttccgaggctcctcatccaccgcgggctccagacctcgcgtcccgcccggggcatggccgggcgctgcgcccccgcgcgctctgcctgctgagcggcgccggagggaggtgcggaggccgggaggccggggaggccggcggggagcagagtcgagcgcctccggagcagagaaaggagcccgcgccccgcgccccgcgccccgcgcacggtccccagtccctgccgcgctcgcccgggccgcccggagcccagatgagcccagatggccggggctcaacccggagtgcacgccttgcaactcaagcccgtgtgcgtgtccgacagcctcaagaagggcaccaaattcgtcaagtgggatgatgactcaactattgttactccaattattttgaggactgaccctcagggatttttcttttactggacagatcaaaacaaggagacagagctactggatctcagccttgtcaaagatgccagatgtgggagacacgccaaagctcccaaggaccccaaattacgtgaacttttggatgtggggaacatcgggcgcctggagcagcgcatgatcacagtggtgtatgggcctgacctcgtgaacatctcccatttgaatctcgtggctttccaagaagaagtggccaaggaatggacaaatgaggttttcagtttggcaacaaacctgctggcccaaaacatgtccagggatgcatttctggaaaaagcctatactaaacttaagctgcaagtcactccagaagggcgtattcctctcaaaaacatatatcgcttgttttcagcagatcggaagcgagttgaaactgctttagaggcttgtagtcttccatcttcaaggaatgattcaatacctcaagaagatttcactccagaagtgtacagagttttcctcaacaacctttgccctcgacctgaaattgataacatcttttcagaatttggtgcaaaaagcaaaccatatcttaccgttgatcagatgatggattttatcaaccttaagcagcgagatcctcggcttaatgaaatactttatccacctctaaaacaagagcaagtccaagtattgattgagaagtatgaacccaacaacagcctcgccagaaaaggacaaatatcagtggatgggttcatgcgctatctgagtggagaagaaaacggagtcgtttcacctgagaaactggatttgaatgaagacatgtctcagcccctttctcactatttcattaattcctcgcacaacacctacctcacagctggccaactggctggaaactcctctgttgagatgtatcgccaagtgctcctgtctggttgtcgctgtgtggagctggactgctggaagggacggactgcagaagaggaacctgtcatcacccatggcttcaccatgacaactgaaatatctttcaaggaagtgatagaagcaattgcggagtgtgcatttaagacttcaccttttccaattctcctttcgtttgagaaccatgtggattccccaaagcagcaagccaagatggcggagtactgccgactgatctttggggatgcccttctcatggagcccctggaaaaatatccactggaatctggagttcctcttccaagccctatggatttaatgtataaaattttggtgaaaaataagaagaaatcacacaagtcatcagaaggaagcggcaaaaagaagctctcagaacaagcctccaacacctacagtgactcctccagcatgttcgagccctcatccccaggagccggagaagctgatacggaaagtgacgacgacgatgatgatgatgactgtaaaaaatcttcaatggatgaggggactgctggaagtgaggctatggccacagaagaaatgtctaatctggtgaactatattcagccagtcaagtttgagtcatttgaaatttcaaaaaaaagaaataaaagttttgaaatgtcttccttcgtggaaaccaaaggacttgaacaactcaccaagtctccagtggaatttgtagaatataacaaaatgcagcttagcaggatatatccaaaaggaacacgtgtggattcatccaactatatgcctcagctcttctggaatgcaggttgtcagatggtggcacttaatttccagacaatggacctggctatgcaaataaatatggggatgtatgaatacaacgggaagagtggctacagattgaagccagagttcatgaggaggcctgacaagcattttgatccatttactgaaggcatcgtagatgggatagtggcaaacactttgtctgttaagattatttcaggtcagtttctttctgataagaaagttgggacttacgtggaagtagatatgtttggtttgcctgtggatacaaggaggaaggcatttaagaccaaaacatcccaaggaaatgctgtgaatcctgtctgggaagaagaacctattgtgttcaaaaaggtggttcttcctactctggcctgtttgagaatagcagtttatgaagaaggaggtaaattcattggccaccgtatcttgccagtgcaagccattcggccaggctatcactatatctgtctaaggaatgaaaggaaccagcctctgacgctgcctgctgtctttgtctacatagaagtgaaagactatgtgccagacacatatgcagatgtcatcgaagctttatcaaacccaatccgatatgtgaacctgatggaacagagagctaagcaattggctgctttgacactggaagatgaagaagaagtaaagaaagaggctgatcctggagaaacaccatcagaggctccaagtgaagcgagaacgactccagcagaaaatggggtgaatcacactacaaccctgacacccaagccaccctcccaggctctccacagccagccagctccaggttctgtaaaggcacctgccaaaacagaagatcttattcagagtgtcttaacagaagtggaagcacagaccatcgaagaactaaagcaacagaaatcgtttgtgaaacttcaaaagaaacactacaaagaaatgaaagacctggttaagagacaccacaagaaaaccactgaccttatcaaagaacacactaccaagtataatgaaattcagaatgactacttgagaaggagagccgctttggaaaagtccgccaaaaaggacagtaagaaaaaatcggaacccagcagccctgatcatggttcatcaacgattgagcaagacctcgctgctctggatgctgaaatgacccaaaagttaatagacttgaaggacaaacaacagcagcagctgcttaatcttcggcaagaacagtattatagtgaaaaataccagaagcgagaacatattaaactgcttattcaaaagttgacggatgtcgcagaagagtgtcagaacaatcagttaaagaagctcaaagaaatctgtgagaaagaaaagaaagaattaaagaagaaaatggataaaaagaggcaggagaagataacagaagctaaatccaaagacaaaagtcagatggaagaggagaagacagagatgatccggtcatatatccaggaagtggtgcagtatatcaagaggctagaagaagcgcaaagtaaacggcaagaaaaactcgtagagaaacacaaggaaatacgtcagcagatcctggatgaaaagcccaagggggaaggttcctcctcattcttgtcggaaacttgccatgaggatccctctgtttcccccaactttactccccccaaccctcaagctctcaagtggtgaccaccgtccttccggccagctgcaggtggagctggagcaagaataccaagacaaattcaaaagactgcccctcgagattttggaattcgtgcaggaagccatgaaaggaaagatcagtgaagacagcaatcacggttctgcccctctctccctgtcctcagaccctggaaaagtgaaccacaagactccctccagtgaggagctgggaggagacatcccaggaaaagaatttgatactcctctgtgaatgctcctgccaggccttcagaaattgcatggccactccagcgtcatcggactctctcttattacaaagatcactgcccaggaccatcttcccgagaagcatcccttagcctaaaatccacaccaaagggagagttccagaggaatccatgaagaattcccatgcccaggctccatgtgtcatgtggaaacctccacaggtctgctagtgaagaatgcatgtatgtgagatttttgttttctttccaatagcaaattcaaagcaagcaacttgcaggctccatggaacttttaatgaaggacagtgtcttctttgaagaaaatcaagctcgtgtttttattcgaagctctggtgtaaaatatttcaaagtcatagaaatagtttgagaaatgcatagcattatttaacactattgaacagccgactttgagcattgtttcttctaactgcccctcaactaccattatcttcaagtcaacatgcatattacattttcatcctttgctttgcaagcactggtggcttgcagtttgctaatttatttatcatagagtcatcaatgtatttgttgctgacatggttttattagatactgtagtgattcaaataagttttctatttgaaaaaaaaaatcacttgattgtatccttgcccagtgaagccatcctaagacttagcaatatggattgtacatttggctgcatgagcaagtcggccgcacacttccagacagtgtgctgtttgaattgactatttgcactcaaagtctgggtattcattggttattggcctgaaatgatcaaataactacaaatgatctgttgaataaaaatagttgagctgatatatgttaagcagatattcaatcagaatgaacaggttccggtggttattttgccgtttgacattttttatggttcatttatttttaatatagagaggaagattgaatatttatctagagaatacaaagacccacatgtaaatgataggtattatctccatgtatatatgtacccacttagtcatgtaagtgcatatacacatacacacacatgagtgtagacatgtgtttattaattgacaatgacccaaatctcttccacaagacttaaaaccaaattcagggacaaatggatagagaagaaaagggtcaaacatcgagattacatggatgttaaattatatggagacgctaagaaataattgatggagccattgatgcaaaccgaagtagatttagaacttatatgaatttgatttatattttgcaagatcaaaaattagatgttaagtatcagattttaagcttgttttaatggtcaaaaaattaggacagaaataatatggacatttattagtatcttccataatttttaagtctgacacatttctattttattctaacataaaaaaacttccattatatatttactaagtatatttaattcacttaactctgtctttataagttcctattttagatggaataagagaaacaaattatatcaaggtaaaactgatcaaaagcataattgaaagttctgaaaaaagaaaaataataatatgtagaaaaatgtaacttagagagtaacacatgaacattgaagttaaaacccagaagccagatgctcacagttttattttactttaaaataaacctgtctgactgtagctttgtgaaatatcttaaaacgcaaaaaccaattgtgtcctgaaaattgtttcaagaatttaatatttttatgaaaattattttatttaactttaagcaataactagagattacaattaaattttaatcaaaatgaaggcttagttcaaacataaggaaacagtgtttgattaaaaaaaacacatctagtaagacgtaaggggaaaatcacatcctctttggagatgattatattttgatctgaagggtttggggtgttcattagacacttaataaaacttaacttccaatgaaaaagaaatcttttgtaaatcattctacttttgcactttgaaagaaaggcgttaatcataaagaagcaagaatggtcaaaatcgaatgctgcatttttataaacaaaattacagactgtctgaaattgaagaagaatgaactaataatagcattcataaccaaacacaatgatgattattgcagaacattgtatcacattttagtccagagatagaataaagttgaataaccttgacttacacaaaactgttttggtagttggatttcattatcttagtgaatttagtcattttacaatatgtttgtatttggccatttactgtaatcacatttttatatctgtacaatgacactttttgcagttgtggggtagtgtgtaacactgtccatcttgcatcattgaaactactacaatgatactatcatttaataatattaatattacttgaaatagactaagataaagaaaaggggtctgtatgatgtgcagttttgtgcctttatgtatttgccttgttctttgtcgaatgtgtgaaattccgtactgtggtttttcctataatagaaagtagagctgtgtattaaattagactgtgtctctctgatacctttacactactgagaatagcatggttttggccatgtaaaccaattttcaaagttctaatgacatagccatgtgtttttggttttttatatttcattttaaaatttgagtatcaccatacattaattaatactcctgtagtagataagctgtcattaagtaattcccaaaaaaagggccatttgcttgcattactttgaatttaatgttgcgcttgtgcactgtgttaatattgtttgtgatggattggacgttgtgactcttgccttttaagaagaaaaaaaagataggacaaagtatttgaagctcttaaaatgtacatattttggttcttctatctcaaattatttaaaatgcataattcacatttttgtaataattctatgcaattttgtggcatgatgtttcttccacttgtaattttatgtgctttcatcacaaatccaaaggaaagaataaaaatttcttaacacaa

SEQ ID NO: 22447 - DNA, 697 bp, Homo sapiens
  source 1..697: mol_type = unassigned DNA
gccggggctcaacccggagtgcacgccttgcaactcaagcccgtgtgcgtgtccgacagcctcaagaagggcaccaaattcgtcaagtgggatgatgactcaactattgttactccaattattttgaggactgaccctcagggatttttcttttactggacagatcaaaacaaggagacagagctactggatctcagccttgtcaaagatgccagatgtgggagacacgccaaagctcccaaggaccccaaattacgtgaacttttggatgtggggaacatcgggcgcctggagcagcgcatgatcacagtggtgtatgggcctgacctcgtgaacatctcccatttgaatctcgtggctttccaagaagaagtggccaaggaatggacaaatgaggttttcagtttggcaacaaacctgctggcccaaaacatgtccagggatgcatttctggaaaaagcctatactaaacttaagctgcaagtcactccagaagggcgtattcctctcaaaaacatatatcgcttgttttcagcagatcggaagcgagttgaaactgctttagaggcttgtagtcttccatcttcaagggtggaaaaagctaatgaggctgcgaaaagtgagcagagctgtggaaaggctcccccaaaacattttcaccttcattttataaagcaaaataaaatgcttgaacctg

SEQ ID NO: 22448 - DNA, 288 bp, Homo sapiens
  source 1..288: mol_type = unassigned DNA
gaagaagcgcaaagtaaacggcaagaaaaactcgtagagaaacacaaggaaatacgtcagcagatcctggatgaaaagcccaaggtaccatgatgaattcctctgtgcttttcttccatgaggttgctccatgaccatctttttgtgtctggatttgaaggttgcccatgaagattgttggttccatgtcaaactaaagcatttcttgagggtttttcttcatggcttaaaaacgttgtgccttaaagctgtgattttattaataaaataataaatcatgactgttaa

SEQ ID NO: 22449 - DNA, 707 bp, Homo sapiens
  source 1..707: mol_type = unassigned DNA
attatttcaggtcagtttctttctgataagaaagttgggacttacgtggaagtagatatgtttggtttgcctgtggatacaaggaggaaggcatttaagaccaaaacatcccaaggaaatgctgtgaatcctgtctgggaagaagaacctattgtgttcaaaaaggtggttcttcctactctggcctgtttgagaatagcagtttatgaagaaggaggtaaattcattggccaccgtatcttgccagtgcaagccattcggccaggctatcactatatctgtctaaggaatgaaaggaaccagcctctgacgctgcctgctgtctttgtctacatagaagtgaaagactatgtgccagacacatatgcagatgtcatcgaagctttatcaaacccaatccgatatgtgaacctgatggaacagagagctaagcaattggctgctttgacactggaagatgaagaagaagtaaagaaagagggtggatttctgcatgatgaaattatgagactcacccgtaatacgctggaaaaactgatggccttacctcttacccatgtggtgcccatccaaagcaagatgctgtcataagttttagtagagacgggatttcaccatgttagccaggatggtctcgatctcctgacctcgggatccacccgcctcggcctcccaaagtgctgggattacaggcatgagccaccgcg

SEQ ID NO: 22450 - DNA, 6462 bp, Homo sapiens
  source 1..6462: mol_type = unassigned DNA
acccaggaccccaaattacgtgaacttttggatgtggggaacatcgggcgcctggagcagcgcatgatcacagtggtgtatgggcctgacctcgtgaacatctcccatttgaatctcgtggctttccaagaagaagtggccaaggaatggacaaatgaggttttcagtttggcaacaaacctgctggcccaaaacatgtccagggatgcatttctggaaaaagcctatactaaacttaagctgcaagtcactccagaagggcgtattcctctcaaaaacatatatcgcttgttttcagcagatcggaagcgagttgaaactgctttagaggcttgtagtcttccatcttcaaggaatgattcaatacctcaagaagatttcactccagaagtgtacagagttttcctcaacaacctttgccctcgacctgaaattgataacatcttttcagaatttggtgcaaaaagcaaaccatatcttaccgttgatcagatgatggattttatcaaccttaagcagcgagatcctcggcttaatgaaatactttatccacctctaaaacaagagcaagtccaagtattgattgagaagtatgaacccaacaacagcctcgccagaaaaggacaaatatcagtggatgggttcatgcgctatctgagtggagaagaaaacggagtcgtttcacctgagaaactggatttgaatgaagacatgtctcagcccctttctcactatttcattaattcctcgcacaacacctacctcacagctggccaactggctggaaactcctctgttgagatgtatcgccaagtgctcctgtctggttgtcgctgtgtggagctggactgctggaagggacggactgcagaagaggaacctgtcatcacccatggcttcaccatgacaactgaaatatctttcaaggaagtgatagaagcaattgcggagtgtgcatttaagacttcaccttttccaattctcctttcgtttgagaaccatgtggattccccaaagcagcaagccaagatggcggagtactgccgactgatctttggggatgcccttctcatggagcccctggaaaaatatccactggaatctggagttcctcttccaagccctatggatttaatgtataaaattttggtgaaaaataagaagaaatcacacaagtcatcagaaggaagcggcaaaaagaagctctcagaacaagcctccaacacctacagtgactcctccagcatgttcgagccctcatccccaggagccggagaagctgatacggaaagtgacgacgacgatgatgatgatgactgtaaaaaatcttcaatggatgaggggactgctggaagtgaggctatggccacagaagaaatgtctaatctggtgaactatattcagccagtcaagtttgagtcatttgaaatttcaaaaaaaagaaataaaagttttgaaatgtcttccttcgtggaaaccaaaggacttgaacaactcaccaagtctccagtggaatttgtagaatataacaaaatgcagcttagcaggatatatccaaaaggaacacgtgtggattcatccaactatatgcctcagctcttctggaatgcaggttgtcagatggtggcacttaatttccagacaatggacctggctatgcaaataaatatggggatgtatgaatacaacgggaagagtggctacagattgaagccagagttcatgaggaggcctgacaagcattttgatccatttactgaaggcatcgtagatgggatagtggcaaacactttgtctgttaagattatttcaggtcagtttctttctgataagaaagttgggacttacgtggaagtagatatgtttggtttgcctgtggatacaaggaggaaggcatttaagaccaaaacatcccaaggaaatgctgtgaatcctgtctgggaagaagaacctattgtgttcaaaaaggtggttcttcctactctggcctgtttgagaatagcagtttatgaagaaggaggtaaattcattggccaccgtatcttgccagtgcaagccattcggccaggctatcactatatctgtctaaggaatgaaaggaaccagcctctgacgctgcctgctgtctttgtctacatagaagtgaaagactatgtgccagacacatatgcagatgtcatcgaagctttatcaaacccaatccgatatgtgaacctgatggaacagagagctaagcaattggctgctttgacactggaagatgaagaagaagtaaagaaagaggctgatcctggagaaacaccatcagaggctccaagtgaagcgagaacgactccagcagaaaatggggtgaatcacactacaaccctgacacccaagccaccctcccaggctctccacagccagccagctccaggttctgtaaaggcacctgccaaaacagaagatcttattcagagtgtcttaacagaagtggaagcacagaccatcgaagaactaaagcaacagaaatcgtttgtgaaacttcaaaagaaacactacaaagaaatgaaagacctggttaagagacaccacaagaaaaccactgaccttatcaaagaacacactaccaagtataatgaaattcagaatgactacttgagaaggagagccgctttggaaaagtccgccaaaaaggacagtaagaaaaaatcggaacccagcagccctgatcatggttcatcaacgattgagcaagacctcgctgctctggatgctgaaatgacccaaaagttaatagacttgaaggacaaacaacagcagcagctgcttaatcttcggcaagaacagtattatagtgaaaaataccagaagcgagaacatattaaactgcttattcaaaagttgacggatgtcgcagaagagtgtcagaacaatcagttaaagaagctcaaagaaatctgtgagaaagaaaagaaagaattaaagaagaaaatggataaaaagaggcaggagaagataacagaagctaaatccaaagacaaaagtcagatggaagaggagaagacagagatgatccggtcatatatccaggaagtggtgcagtatatcaagaggctagaagaagcgcaaagtaaacggcaagaaaaactcgtagagaaacacaaggaaatacgtcagcagatcctggatgaaaagcccaagctgcaggtggagctggagcaagaataccaagacaaattcaaaagactgcccctcgagattttggaattcgtgcaggaagccatgaaaggaaagatcagtgaagacagcaatcacggttctgcccctctctccctgtcctcagaccctggaaaagtgaaccacaagactccctccagtgaggagctgggaggagacatcccaggaaaagaatttgatactcctctgtgaatgctcctgccaggccttcagaaattgcatggccactccagcgtcatcggactctctcttattacaaagatcactgcccaggaccatcttcccgagaagcatcccttagcctaaaatccacaccaaagggagagttccagaggaatccatgaagaattcccatgcccaggctccatgtgtcatgtggaaacctccacaggtctgctagtgaagaatgcatgtatgtgagatttttgttttctttccaatagcaaattcaaagcaagcaacttgcaggctccatggaacttttaatgaaggacagtgtcttctttgaagaaaatcaagctcgtgtttttattcgaagctctggtgtaaaatatttcaaagtcatagaaatagtttgagaaatgcatagcattatttaacactattgaacagccgactttgagcattgtttcttctaactgcccctcaactaccattatcttcaagtcaacatgcatattacattttcatcctttgctttgcaagcactggtggcttgcagtttgctaatttatttatcatagagtcatcaatgtatttgttgctgacatggttttattagatactgtagtgattcaaataagttttctatttgaaaaaaaaaatcacttgattgtatccttgcccagtgaagccatcctaagacttagcaatatggattgtacatttggctgcatgagcaagtcggccgcacacttccagacagtgtgctgtttgaattgactatttgcactcaaagtctgggtattcattggttattggcctgaaatgatcaaataactacaaatgatctgttgaataaaaatagttgagctgatatatgttaagcagatattcaatcagaatgaacaggttccggtggttattttgccgtttgacattttttatggttcatttatttttaatatagagaggaagattgaatatttatctagagaatacaaagacccacatgtaaatgataggtattatctccatgtatatatgtacccacttagtcatgtaagtgcatatacacatacacacacatgagtgtagacatgtgtttattaattgacaatgacccaaatctcttccacaagacttaaaaccaaattcagggacaaatggatagagaagaaaagggtcaaacatcgagattacatggatgttaaattatatggagacgctaagaaataattgatggagccattgatgcaaaccgaagtagatttagaacttatatgaatttgatttatattttgcaagatcaaaaattagatgttaagtatcagattttaagcttgttttaatggtcaaaaaattaggacagaaataatatggacatttattagtatcttccataatttttaagtctgacacatttctattttattctaacataaaaaaacttccattatatatttactaagtatatttaattcacttaactctgtctttataagttcctattttagatggaataagagaaacaaattatatcaaggtaaaactgatcaaaagcataattgaaagttctgaaaaaagaaaaataataatatgtagaaaaatgtaacttagagagtaacacatgaacattgaagttaaaacccagaagccagatgctcacagttttattttactttaaaataaacctgtctgactgtagctttgtgaaatatcttaaaacgcaaaaaccaattgtgtcctgaaaattgtttcaagaatttaatatttttatgaaaattattttatttaactttaagcaataactagagattacaattaaattttaatcaaaatgaaggcttagttcaaacataaggaaacagtgtttgattaaaaaaaacacatctagtaagacgtaaggggaaaatcacatcctctttggagatgattatattttgatctgaagggtttggggtgttcattagacacttaataaaacttaacttccaatgaaaaagaaatcttttgtaaatcattctacttttgcactttgaaagaaaggcgttaatcataaagaagcaagaatggtcaaaatcgaatgctgcatttttataaacaaaattacagactgtctgaaattgaagaagaatgaactaataatagcattcataaccaaacacaatgatgattattgcagaacattgtatcacattttagtccagagatagaataaagttgaataaccttgacttacacaaaactgttttggtagttggatttcattatcttagtgaatttagtcattttacaatatgtttgtatttggccatttactgtaatcacatttttatatctgtacaatgacactttttgcagttgtggggtagtgtgtaacactgtccatcttgcatcattgaaactactacaatgatactatcatttaataatattaatattacttgaaatagactaagataaagaaaaggggtctgtatgatgtgcagttttgtgcctttatgtatttgccttgttctttgtcgaatgtgtgaaattccgtactgtggtttttcctataatagaaagtagagctgtgtattaaattagactgtgtctctctgatacctttacactactgagaatagcatggttttggccatgtaaaccaattttcaaagttctaatgacatagccatgtgtttttggttttttatatttcattttaaaatttgagtatcaccatacattaattaatactcctgtagtagataagctgtcattaagtaattcccaaaaaaagggccatttgcttgcattactttgaatttaatgttgcgcttgtgcactgtgttaatattgtttgtgatggattggacgttgtgactcttgccttttaagaagaaaaaaaagataggacaaagtatttgaagctcttaaaatgtacatattttggttcttctatctcaaattatttaaaatgcataattcacatttttgtaataattctatgcaattttgtggcatgatgtttcttccacttgtaattttatgtgctttcatcacaaatccaaaggaaagaataaaaatttcttaacacaa

SEQ ID NO: 22451 - DNA, 6580 bp, Homo sapiens
  source 1..6580: mol_type = unassigned DNA
acccaggaccccaaattacgtgaacttttggatgtggggaacatcgggcgcctggagcagcgcatgatcacagtggtgtatgggcctgacctcgtgaacatctcccatttgaatctcgtggctttccaagaagaagtggccaaggaatggacaaatgaggttttcagtttggcaacaaacctgctggcccaaaacatgtccagggatgcatttctggaaaaagcctatactaaacttaagctgcaagtcactccagaagggcgtattcctctcaaaaacatatatcgcttgttttcagcagatcggaagcgagttgaaactgctttagaggcttgtagtcttccatcttcaaggaatgattcaatacctcaagaagatttcactccagaagtgtacagagttttcctcaacaacctttgccctcgacctgaaattgataacatcttttcagaatttggtgcaaaaagcaaaccatatcttaccgttgatcagatgatggattttatcaaccttaagcagcgagatcctcggcttaatgaaatactttatccacctctaaaacaagagcaagtccaagtattgattgagaagtatgaacccaacaacagcctcgccagaaaaggacaaatatcagtggatgggttcatgcgctatctgagtggagaagaaaacggagtcgtttcacctgagaaactggatttgaatgaagacatgtctcagcccctttctcactatttcattaattcctcgcacaacacctacctcacagctggccaactggctggaaactcctctgttgagatgtatcgccaagtgctcctgtctggttgtcgctgtgtggagctggactgctggaagggacggactgcagaagaggaacctgtcatcacccatggcttcaccatgacaactgaaatatctttcaaggaagtgatagaagcaattgcggagtgtgcatttaagacttcaccttttccaattctcctttcgtttgagaaccatgtggattccccaaagcagcaagccaagatggcggagtactgccgactgatctttggggatgcccttctcatggagcccctggaaaaatatccactggaatctggagttcctcttccaagccctatggatttaatgtataaaattttggtgaaaaataagaagaaatcacacaagtcatcagaaggaagcggcaaaaagaagctctcagaacaagcctccaacacctacagtgactcctccagcatgttcgagccctcatccccaggagccggagaagctgatacggaaagtgacgacgacgatgatgatgatgactgtaaaaaatcttcaatggatgaggggactgctggaagtgaggctatggccacagaagaaatgtctaatctggtgaactatattcagccagtcaagtttgagtcatttgaaatttcaaaaaaaagaaataaaagttttgaaatgtcttccttcgtggaaaccaaaggacttgaacaactcaccaagtctccagtggaatttgtagaatataacaaaatgcagcttagcaggatatatccaaaaggaacacgtgtggattcatccaactatatgcctcagctcttctggaatgcaggttgtcagatggtggcacttaatttccagacaatggacctggctatgcaaataaatatggggatgtatgaatacaacgggaagagtggctacagattgaagccagagttcatgaggaggcctgacaagcattttgatccatttactgaaggcatcgtagatgggatagtggcaaacactttgtctgttaagattatttcaggtcagtttctttctgataagaaagttgggacttacgtggaagtagatatgtttggtttgcctgtggatacaaggaggaaggcatttaagaccaaaacatcccaaggaaatgctgtgaatcctgtctgggaagaagaacctattgtgttcaaaaaggtggttcttcctactctggcctgtttgagaatagcagtttatgaagaaggaggtaaattcattggccaccgtatcttgccagtgcaagccattcggccaggctatcactatatctgtctaaggaatgaaaggaaccagcctctgacgctgcctgctgtctttgtctacatagaagtgaaagactatgtgccagacacatatgcagatgtcatcgaagctttatcaaacccaatccgatatgtgaacctgatggaacagagagctaagcaattggctgctttgacactggaagatgaagaagaagtaaagaaagaggctgatcctggagaaacaccatcagaggctccaagtgaagcgagaacgactccagcagaaaatggggtgaatcacactacaaccctgacacccaagccaccctcccaggctctccacagccagccagctccaggttctgtaaaggcacctgccaaaacagaagatcttattcagagtgtcttaacagaagtggaagcacagaccatcgaagaactaaagcaacagaaatcgtttgtgaaacttcaaaagaaacactacaaagaaatgaaagacctggttaagagacaccacaagaaaaccactgaccttatcaaagaacacactaccaagtataatgaaattcagaatgactacttgagaaggagagccgctttggaaaagtccgccaaaaaggacagtaagaaaaaatcggaacccagcagccctgatcatggttcatcaacgattgagcaagacctcgctgctctggatgctgaaatgacccaaaagttaatagacttgaaggacaaacaacagcagcagctgcttaatcttcggcaagaacagtattatagtgaaaaataccagaagcgagaacatattaaactgcttattcaaaagttgacggatgtcgcagaagagtgtcagaacaatcagttaaagaagctcaaagaaatctgtgagaaagaaaagaaagaattaaagaagaaaatggataaaaagaggcaggagaagataacagaagctaaatccaaagacaaaagtcagatggaagaggagaagacagagatgatccggtcatatatccaggaagtggtgcagtatatcaagaggctagaagaagcgcaaagtaaacggcaagaaaaactcgtagagaaacacaaggaaatacgtcagcagatcctggatgaaaagcccaagggggaaggttcctcctcattcttgtcggaaacttgccatgaggatccctctgtttcccccaactttactccccccaaccctcaagctctcaagtggtgaccaccgtccttccggccagctgcaggtggagctggagcaagaataccaagacaaattcaaaagactgcccctcgagattttggaattcgtgcaggaagccatgaaaggaaagatcagtgaagacagcaatcacggttctgcccctctctccctgtcctcagaccctggaaaagtgaaccacaagactccctccagtgaggagctgggaggagacatcccaggaaaagaatttgatactcctctgtgaatgctcctgccaggccttcagaaattgcatggccactccagcgtcatcggactctctcttattacaaagatcactgcccaggaccatcttcccgagaagcatcccttagcctaaaatccacaccaaagggagagttccagaggaatccatgaagaattcccatgcccaggctccatgtgtcatgtggaaacctccacaggtctgctagtgaagaatgcatgtatgtgagatttttgttttctttccaatagcaaattcaaagcaagcaacttgcaggctccatggaacttttaatgaaggacagtgtcttctttgaagaaaatcaagctcgtgtttttattcgaagctctggtgtaaaatatttcaaagtcatagaaatagtttgagaaatgcatagcattatttaacactattgaacagccgactttgagcattgtttcttctaactgcccctcaactaccattatcttcaagtcaacatgcatattacattttcatcctttgctttgcaagcactggtggcttgcagtttgctaatttatttatcatagagtcatcaatgtatttgttgctgacatggttttattagatactgtagtgattcaaataagttttctatttgaaaaaaaaaatcacttgattgtatccttgcccagtgaagccatcctaagacttagcaatatggattgtacatttggctgcatgagcaagtcggccgcacacttccagacagtgtgctgtttgaattgactatttgcactcaaagtctgggtattcattggttattggcctgaaatgatcaaataactacaaatgatctgttgaataaaaatagttgagctgatatatgttaagcagatattcaatcagaatgaacaggttccggtggttattttgccgtttgacattttttatggttcatttatttttaatatagagaggaagattgaatatttatctagagaatacaaagacccacatgtaaatgataggtattatctccatgtatatatgtacccacttagtcatgtaagtgcatatacacatacacacacatgagtgtagacatgtgtttattaattgacaatgacccaaatctcttccacaagacttaaaaccaaattcagggacaaatggatagagaagaaaagggtcaaacatcgagattacatggatgttaaattatatggagacgctaagaaataattgatggagccattgatgcaaaccgaagtagatttagaacttatatgaatttgatttatattttgcaagatcaaaaattagatgttaagtatcagattttaagcttgttttaatggtcaaaaaattaggacagaaataatatggacatttattagtatcttccataatttttaagtctgacacatttctattttattctaacataaaaaaacttccattatatatttactaagtatatttaattcacttaactctgtctttataagttcctattttagatggaataagagaaacaaattatatcaaggtaaaactgatcaaaagcataattgaaagttctgaaaaaagaaaaataataatatgtagaaaaatgtaacttagagagtaacacatgaacattgaagttaaaacccagaagccagatgctcacagttttattttactttaaaataaacctgtctgactgtagctttgtgaaatatcttaaaacgcaaaaaccaattgtgtcctgaaaattgtttcaagaatttaatatttttatgaaaattattttatttaactttaagcaataactagagattacaattaaattttaatcaaaatgaaggcttagttcaaacataaggaaacagtgtttgattaaaaaaaacacatctagtaagacgtaaggggaaaatcacatcctctttggagatgattatattttgatctgaagggtttggggtgttcattagacacttaataaaacttaacttccaatgaaaaagaaatcttttgtaaatcattctacttttgcactttgaaagaaaggcgttaatcataaagaagcaagaatggtcaaaatcgaatgctgcatttttataaacaaaattacagactgtctgaaattgaagaagaatgaactaataatagcattcataaccaaacacaatgatgattattgcagaacattgtatcacattttagtccagagatagaataaagttgaataaccttgacttacacaaaactgttttggtagttggatttcattatcttagtgaatttagtcattttacaatatgtttgtatttggccatttactgtaatcacatttttatatctgtacaatgacactttttgcagttgtggggtagtgtgtaacactgtccatcttgcatcattgaaactactacaatgatactatcatttaataatattaatattacttgaaatagactaagataaagaaaaggggtctgtatgatgtgcagttttgtgcctttatgtatttgccttgttctttgtcgaatgtgtgaaattccgtactgtggtttttcctataatagaaagtagagctgtgtattaaattagactgtgtctctctgatacctttacactactgagaatagcatggttttggccatgtaaaccaattttcaaagttctaatgacatagccatgtgtttttggttttttatatttcattttaaaatttgagtatcaccatacattaattaatactcctgtagtagataagctgtcattaagtaattcccaaaaaaagggccatttgcttgcattactttgaatttaatgttgcgcttgtgcactgtgttaatattgtttgtgatggattggacgttgtgactcttgccttttaagaagaaaaaaaagataggacaaagtatttgaagctcttaaaatgtacatattttggttcttctatctcaaattatttaaaatgcataattcacatttttgtaataattctatgcaattttgtggcatgatgtttcttccacttgtaattttatgtgctttcatcacaaatccaaaggaaagaataaaaatttcttaacacaa

SEQ ID NO: 22452 - DNA, 4616 bp, Homo sapiens
  source 1..4616: mol_type = unassigned DNA
acaggcccccatggcaggcagggcgggtgggaggagggtgatttacaaggcagatgggcctctggctacagctcagtcctgcactcagccagggccaccccaggggctataagagcaactagatttctggagcagctcggggatgggtgccatttgagcccagcttggctccccctcctggctggcctccttcctgcccttctgcctgcctgtgtctgctgagattctgcaaagaggaacgcttggcaccatgtctctgctcaaccctgtcctgctgccccccaaggtgaaggcctatctgagccaaggggagcgcttcatcaaatgggatgatgaaactacagttgcctctccagttatcctccgtgtggatcctaagggctactacttatactggacgtatcaaagtaaggagatggagtttctggatatcaccagcatccgggatactcgctttgggaagtttgccaagatgcccaagagccagaagctccgggacgtcttcaacatggactttcctgataacagtttcctgctgaagacactcacggtggtgtccggcccggacatggtggacctcaccttccacaacttcgtctcctacaaggagaacgtgggcaaggcctgggctgaggacgtactggccctagtcaaacatccgctgacggccaacgcctcccgcagcaccttcctggacaagatccttgtgaagctcaagatgcagctcaactctgaagggaagattccggtgaagaactttttccagatgtttcctgctgaccgcaagcgggtggaagctgctctcagtgcctgccacctccccaaaggcaaaaatgacgccatcaatcctgaggacttcccagaacctgtctacaagagtttcctcatgagcctctgtcctcggccagaaatagatgagatcttcacttcttaccatgctaaggccaaaccctacatgacgaaggagcacctgaccaaattcatcaaccagaaacagcgggactcccggcttaactccctgctgttcccgccagcacggcctgaccaggtgcagggcctcatcgacaagtatgagcccagtggcatcaatgcacagaggggccagctgtcacctgaaggcatggtctggtttctctgtgggccagagaacagcgtgctggcccaggacaagctgctgctccaccacgacatgacgcagccactcaatcattacttcatcaactcgtcccacaacacctacctgacagccggccagttctcaggcctctcctcggctgagatgtaccgccaggtgctgctctctggctgccgttgcgtggagctagactgctggaaggggaaaccccctgacgaggagcccattatcacccatggcttcaccatgaccacagacatcttcttcaaagaagcaattgaggctattgcagaaagcgcctttaagacctccccctatcccatcatcctgtcgtttgagaaccatgtggactcaccccgccagcaggctaagatggctgagtattgccggacgatctttggggatatgctgctcacagagcccctggaaaagttcccactaaaaccaggtgtccccctgcccagccctgaggatctcaggggcaagatcctcatcaagaacaagaagaaccagttttctggccccacctcctccagtaaggatactggtggggaggctgagggcagcagcccacccagtgcccctgcaggtgagggcacagtgtgggctggcgaggaagggactgagctggaggaggaggaggtggaagaggaagaggaggaggagtcaggaaacctggatgaagaagagattaagaagatgcagtcggatgagggcacagcgggcctggaagtgacggcttatgaggagatgtccagcctagtcaattacatccagcccaccaagttcgtctcctttgagttctctgcccaaaagaaccgaagttatgtcatctcgtccttcacagagctcaaggcatatgacctgctctccaaggcctcggtgcagtttgtggactacaacaagcgccagatgagccgcatttaccccaagggaacccgcatggactcctccaactacatgccccagatgttctggaatgctggatgccagatggttgccctcaacttccagacgatggacttgcccatgcagcagaacatggcagtatttgagttcaacgggcagagcggctacctcctcaagcatgagttcatgcgccggccggacaagcagttcaaccccttctcagtggaccgcatcgacgtggtggtggccaccaccctttccattacggtgatctctgggcagttcctgtcagaacgcagcgtgcgcacctatgtagaagtggagctgtttggccttcctggggaccccaagaggcgctatcgaactaagctgtcacccagtactaactccatcaatcctgtctggaaggaggagccctttgtctttgagaagatcttgatgcctgagctggcctccctcagagtggctgtgatggaggaaggcaacaagtttcttggacaccgcatcatccccatcaatgccctaaattctgggtaccaccacctgtgcctgcacagtgagagcaacatgcccctcaccatgcctgcgctcttcatcttcctggagatgaaggactacatacctggtgcttgggcagatctcactgtggccctcgccaaccccattaagttcttcagtgcccatgacacgaagtctgtgaagctcaaggaggccatgggaggtctgcctgagaagcccttcccactggcgagtccagttgccagccaggtcaatggggcgttggccccaacgagcaatgggtcaccagcagccagggccggggccagggaagaggctatgaaagaagctgcggagccgcggaccgccagcctggaggagctccgggagctaaagggcgtggtgaagctgcagcggcggcacgagaaggagctgcgagagttggagcggcgcggagcgcggcgctgggaggagctgctgcagcggggcgcggcgcagctggcggagctcgggccaccgggcgtggggggcgtcggggcctgcaagctcggtcccggcaagggctctcgcaagaagaggagcctgccccgcgaggagagcgccggagccgcgccgggcgagggccctgagggcgtggacgggcgcgtgcgggagctgaaagacaggctggagctggagctgctgcggcagggcgaggagcagtacgagtgcgttctgaagcgcaaggagcagcacgtggccgagcaaatctccaaaatgatggagctggccagagagaaacaggcggcagagctgaaggccctgaaggagacgtcggagaacgacaccaaagagatgaagaaaaagctggagacaaagagactggagcggatccagggcatgaccaaagtcaccacagacaagatggcccaggagaggttgaagagagagattaacaactcccacatccaggaagtagtgcaggtgatcaagcagatgacggagaacttggagaggcaccaggagaagctggaggagaagcaggcggcttgcctggaacagatacgggagatggaaaagcagttccagaaggaggcgctggcagagtacgaggccaggatgaagggtctggaggcagaggtgaaggagtcggtgagggcctgcctcaggacctgctttccctccgaggccaaggacaagcctgagagggcctgcgagtgccccccagagctgtgtgagcaggacccactcatagcaaaggcagatgcccaggagagccgcctctgatgcccccatcccactgggacatttagcaaggaggttcagccccttctctgggatgtggttctattcccccaggaaaaaggagccccagccttctgaggctgtgggaacctgtggctgccttggacgctgcagccccctcctcaacggccaggccagagtctgagacaggacccaggcaccctcacggcagggcctctctggggcctagaagtcttctcaagctgacttcctacctccccctccatctctagataagtgtcatatatttgttgagggcaaaagactatggactggaaggcagaaagtgggatcctggccccactctgcctttcctattgagcaaccagctctgggctcagtttcctcacctggagggttggacccactcacctccactctagccccgaaccctcctgccccaggcttccaggccccatcaggcctgccctgagttggccttgtccactccttgaggcagatcctggcactacctcacagctccctggggacggccactccctggctgagggccctcccctcccctctgcctgtccggaacgggaggctgaaatggaaaagctgccttggccctgcttggctgagtcacaaggggcagtgggctcttgggtgctgttccaccctgaccctggctcacccctcttcctaggcctgggggcaggcagttcctaccatgtacccctctcaggctgcctgcctgacaaggtcagcatcatttgctctcctgaatttatgaggtttatttatttttctctttcctactcctattaaagaacctcgtcccagtgtt

SEQ ID NO: 22453 - DNA, 4517 bp, Homo sapiens
  source 1..4517: mol_type = unassigned DNA
cagccagggccaccccaggggctataagagcaactagatttctggagcagctcggggatgggtgccatttgagcccagcttggctccccctcctggctggcctccttcctgcccttctgcctgcctgtgtctgctgagattctgcaaagaggaacgcttggcaccatgtctctgctcaaccctgtcctgctgccccccaaggtgaaggcctatctgagccaaggggagcgcttcatcaaatgggatgatgaaactacagttgcctctccagttatcctccgtgtggatcctaagggctactacttatactggacgtatcaaagtaaggagatggagtttctggatatcaccagcatccgggatactcgctttgggaagtttgccaagatgcccaagagccagaagctccgggacgtcttcaacatggactttcctgataacagtttcctgctgaagacactcacggtggtgtccggcccggacatggtggacctcaccttccacaacttcgtctcctacaaggagaacgtgggcaaggcctgggctgaggacgtactggccctagtcaaacatccgctgacggccaacgcctcccgcagcaccttcctggacaagatccttgtgaagctcaagatgcagctcaactctgaagggaagattccggtgaagaactttttccagatgtttcctgctgaccgcaagcgggtggaagctgctctcagtgcctgccacctccccaaaggcaaaaatgacgccatcaatcctgaggacttcccagaacctgtctacaagagtttcctcatgagcctctgtcctcggccagaaatagatgagatcttcacttcttaccatgctaaggccaaaccctacatgacgaaggagcacctgaccaaattcatcaaccagaaacagcgggactcccggcttaactccctgctgttcccgccagcacggcctgaccaggtgcagggcctcatcgacaagtatgagcccagtggcatcaatgcacagaggggccagctgtcacctgaaggcatggtctggtttctctgtgggccagagaacagcgtgctggcccaggacaagctgctgctccaccacgacatgacgcagccactcaatcattacttcatcaactcgtcccacaacacctacctgacagccggccagttctcaggcctctcctcggctgagatgtaccgccaggtgctgctctctggctgccgttgcgtggagctagactgctggaaggggaaaccccctgacgaggagcccattatcacccatggcttcaccatgaccacagacatcttcttcaaagaagcaattgaggctattgcagaaagcgcctttaagacctccccctatcccatcatcctgtcgtttgagaaccatgtggactcaccccgccagcaggctaagatggctgagtattgccggacgatctttggggatatgctgctcacagagcccctggaaaagttcccactaaaaccaggtgtccccctgcccagccctgaggatctcaggggcaagatcctcatcaagaacaagaagaaccagttttctggccccacctcctccagtaaggatactggtggggaggctgagggcagcagcccacccagtgcccctgcagtgtgggctggcgaggaagggactgagctggaggaggaggaggtggaagaggaagaggaggaggagtcaggaaacctggatgaagaagagattaagaagatgcagtcggatgagggcacagcgggcctggaagtgacggcttatgaggagatgtccagcctagtcaattacatccagcccaccaagttcgtctcctttgagttctctgcccaaaagaaccgaagttatgtcatctcgtccttcacagagctcaaggcatatgacctgctctccaaggcctcggtgcagtttgtggactacaacaagcgccagatgagccgcatttaccccaagggaacccgcatggactcctccaactacatgccccagatgttctggaatgctggatgccagatggttgccctcaacttccagacgatggacttgcccatgcagcagaacatggcagtatttgagttcaacgggcagagcggctacctcctcaagcatgagttcatgcgccggccggacaagcagttcaaccccttctcagtggaccgcatcgacgtggtggtggccaccaccctttccattacggtgatctctgggcagttcctgtcagaacgcagcgtgcgcacctatgtagaagtggagctgtttggccttcctggggaccccaagaggcgctatcgaactaagctgtcacccagtactaactccatcaatcctgtctggaaggaggagccctttgtctttgagaagatcttgatgcctgagctggcctccctcagagtggctgtgatggaggaaggcaacaagtttcttggacaccgcatcatccccatcaatgccctaaattctgggtaccaccacctgtgcctgcacagtgagagcaacatgcccctcaccatgcctgcgctcttcatcttcctggagatgaaggactacatacctggtgcttgggcagatctcactgtggccctcgccaaccccattaagttcttcagtgcccatgacacgaagtctgtgaagctcaaggaggccatgggaggtctgcctgagaagcccttcccactggcgagtccagttgccagccaggtcaatggggcgttggccccaacgagcaatgggtcaccagcagccagggccggggccagggaagaggctatgaaagaagctgcggagccgcggaccgccagcctggaggagctccgggagctaaagggcgtggtgaagctgcagcggcggcacgagaaggagctgcgagagttggagcggcgcggagcgcggcgctgggaggagctgctgcagcggggcgcggcgcagctggcggagctcgggccaccgggcgtggggggcgtcggggcctgcaagctcggtcccggcaagggctctcgcaagaagaggagcctgccccgcgaggagagcgccggagccgcgccgggcgagggccctgagggcgtggacgggcgcgtgcgggagctgaaagacaggctggagctggagctgctgcggcagggcgaggagcagtacgagtgcgttctgaagcgcaaggagcagcacgtggccgagcaaatctccaaaatgatggagctggccagagagaaacaggcggcagagctgaaggccctgaaggagacgtcggagaacgacaccaaagagatgaagaaaaagctggagacaaagagactggagcggatccagggcatgaccaaagtcaccacagacaagatggcccaggagaggttgaagagagagattaacaactcccacatccaggaagtagtgcaggtgatcaagcagatgacggagaacttggagaggcaccaggagaagctggaggagaagcaggcggcttgcctggaacagatacgggagatggaaaagcagttccagaaggaggcgctggcagagtacgaggccaggatgaagggtctggaggcagaggtgaaggagtcggtgagggcctgcctcaggacctgctttccctccgaggccaaggacaagcctgagagggcctgcgagtgccccccagagctgtgtgagcaggacccactcatagcaaaggcagatgcccaggagagccgcctctgatgcccccatcccactgggacatttagcaaggaggttcagccccttctctgggatgtggttctattcccccaggaaaaaggagccccagccttctgaggctgtgggaacctgtggctgccttggacgctgcagccccctcctcaacggccaggccagagtctgagacaggacccaggcaccctcacggcagggcctctctggggcctagaagtcttctcaagctgacttcctacctccccctccatctctagataagtgtcatatatttgttgagggcaaaagactatggactggaaggcagaaagtgggatcctggccccactctgcctttcctattgagcaaccagctctgggctcagtttcctcacctggagggttggacccactcacctccactctagccccgaaccctcctgccccaggcttccaggccccatcaggcctgccctgagttggccttgtccactccttgaggcagatcctggcactacctcacagctccctggggacggccactccctggctgagggccctcccctcccctctgcctgtccggaacgggaggctgaaatggaaaagctgccttggccctgcttggctgagtcacaaggggcagtgggctcttgggtgctgttccaccctgaccctggctcacccctcttcctaggcctgggggcaggcagttcctaccatgtacccctctcaggctgcctgcctgacaaggtcagcatcatttgctctcctgaatttatgaggtttatttatttttctctttcctactcctattaaagaacctcgtcccagtg

SEQ ID NO: 22454 - DNA, 4197 bp, Homo sapiens
  source 1..4197: mol_type = unassigned DNA
ccgggacagactggcgggcgggcgggcactgacgccgcggggccggagcgggccgcgcggtgggagcagcggcgccgtcggtccccgtcagggctccgtgggtccccgacccgcccctggccgggccatggcgggcgcccagcccggcgtccacgcgctgcagttggagccgcccaccgtggtggagaccctgcggcgcgggagtaagttcatcaaatgggacgaggagacctccagtcggaacctggtgaccctgcgtgtggaccccaatggcttcttcttgtactggacgggccccaacatggaggtggacacactggacatcagttccatcagggacacacggacaggccggtacgcccgcctgcccaaggaccccaagatccgggaagttctgggctttgggggtcccgatgcccggctggaggagaagctgatgacggtggtgtctgggccagacccagtgaacacagtgttcttgaacttcatggccgtgcaggatgacacagccaaggtctggtctgaggagctattcaagctggctatgaacatcctggctcagaacgcctcccggaacaccttcctgcgcaaagcatacacgaagctgaagctgcaggtgaaccaggatggtcggatccccgtcaagaacatcctgaagatgttctcagcagacaagaagcgggtggagactgcgctggaatcctgtggcctcaaattcaaccggagtgagtccatccggcctgatgagttttccttggaaatctttgagcggttcctgaacaagctgtgtctgcggccggacattgacaagatcctgctggagataggcgccaagggcaagccatacctgacgctggagcagctcatggacttcatcaaccagaagcaacgcgacccgagactcaacgaagtgctgtacccgcccctgcggccctcccaggcccggctgctcatcgaaaagtatgagcccaaccagcagtttctggagcgagaccagatgtccatggagggctttagccgctacctgggaggcgaggagaatggcatcctgcccctggaagccctggatctgagcacggacatgacccagccactgagtgcctacttcatcaactcctcgcataacacctatctcactgcggggcagctggctgggacctcgtcggtggagatgtaccgccaggcactactatggggctgccgctgcgtggagctggacgtgtggaagggacggccgcctgaggaggaacccttcattacccacggcttcaccatgaccacagaggtgcctctgcgcgacgtgctggaggccattgccgagactgccttcaagacctcgccctaccccgtcatcctctccttcgagaaccatgtggactcggcaaagcaacaggcaaagatggctgagtactgccgctccatctttggagacgcgctactcatcgagcctctggacaagtacccgctggccccaggcgttcccctgcccagcccccaggacctgatgggccgtatcctggtgaagaacaagaagcggcaccgacccagcgcaggtggcccagacagcgccgggcgcaagcggcccctggagcagagcaattctgccctgagcgagagctccgcggccaccgagccctcctccccgcagctggggtctcccagctctgacagctgcccaggcctgagcaatggggaggaggtagggcttgagaagcccagcctggagcctcagaagtctctgggtgacgagggcctgaaccgaggcccctatgttcttggacctgctgaccgtgaggatgaggaggaagatgaggaagaggaggaacagacagaccccaaaaagccaactacagatgagggcacagccagcagcgaggtgaatgccactgaggagatgtccacgcttgtcaactacatcgaacctgtcaagttcaagtcctttgaggctgctcgaaagaggaacaaatgcttcgagatgtcgtcctttgtggagaccaaggccatggagcaactgaccaagagccccatggagtttgtggaatacaacaagcagcagctcagccgcatctaccccaagggcacccgcgtggactcctccaactacatgccccagctcttctggaacgtagggtgccagcttgttgcgctcaacttccagaccctcgatgtggcgatgcagctcaacgcgggcgtttttgagtacaacgggcgcagcgggtacctgctcaagccggagttcatgcggcggccggacaagtccttcgaccccttcactgaggtcatcgtggatggcatcgtggccaatgccttgcgggtcaaggtgatctcagggcagttcctgtccgacaggaaggtgggcatctacgtggaggtggacatgtttggcctccctgttgatacgcggcgcaagtaccgcacccggacctctcaggggaactcgttcaaccccgtgtgggacgaagagcccttcgacttccccaaggtggtgctgcccacgctggcttcacttcgcattgcagcctttgaggaggggggtaaattcgtagggcaccggatcctgcctgtctctgccatccgctccggataccactacgtctgcctgcggaacgaggccaaccaaccgctgtgcctgccggccctgctcatctacaccgaagcctcggactacattcctgacgaccaccaggactatgcggaggccctgatcaaccccattaagcacgtcagcctgatggaccagagggcccggcagctggccgccctcattggggagagtgaggctcaggctggccaagagacgtgccaggacacccagtctcagcagctggggtctcagccgtcctcaaaccccacccccagcccactggatgcctccccccgccggccccctggccccaccacctcccctgccagcacctccctcagcagcccagggcagcgtgatgatctcatcgccagcatcctctcagaggtggcccccaccccgctggatgagctccgaggtcacaaggctctggtcaagctccggagccggcaagagcgagacctgcgggagctgcgcaagaagcatcagcggaaggcagtcaccctcacccgccgcctgctggatggcctggctcaggcacaggctgagggcaggtgccggctgcggccaggtgccctaggtggggccgctgatgtggaggacacgaaggagggggaggacgaggcaaagcggtatcaggagttccagaacagacaggtgcagagcctgctggagctgcgggaggcccaggtggacgcagaggcccagcggaggctggaacacctgagacaggctctgcagcggctcagggaggtcgtccttgatgcaaacacaactcagttcaagaggctgaaagagatgaacgagagggagaagaaggagctgcagaagatcctggacagaaagcgccataacagcatctcggaggccaagatgagggacaagcataagaaggaggcggaactgacggagattaaccgtcggcacatcactgagtcagtcaactccatccgtcggctggaggaggcccagaagcagcggcatgaccgtcttgtggctgggcagcagcaggtcctgcaacagctggcagaagaggagcccaagctgctggcccagctggcccaggagtgtcaggagcagcgggcgaggctcccccaggagatccgccggagcctgctgggcgagatgccggaggggctgggggacgggcctctggtggcctgtgccagcaacggtcacgcacccgggagcagcgggcacctgtcgggcgctgactcggagagccaggaggagaacacgcagctctgaactggctgagcgaggtggccacagggccagggcgggcgctgggtggagggcaggaggcaatgacactaatgctttttttttttttttttaactttttatctagaaattttatttttttaaacccggggcaagtacctcagctaactcccttcatcctcctggggcccctccttcctgccctcagtcttaggttagggccttggtcagggctttgctccctgtgacacccacaccctcgagctagcagcgtctcctcccttccccgggagagctggctggagacttggagctccgggaagtaggagtcacatttttttctctattctttggggattttttttacatgaataaaagtggatttcagg

SEQ ID NO: 22455 - DNA, 4469 bp, Homo sapiens
  source 1..4469: mol_type = unassigned DNA
ggcactgacgccgcggggccggagcgggccgcgcggtgggagcagcggcgccgtcggtccccgtcagggctccgtgggtccccgacccgcccctggccgggccatggcgggcgcccagcccggcgtccacgcgctgcagttggagccgcccaccgtggtggagaccctgcggcgcgggagtaagttcatcaaatgggacgaggagacctccagtcggaacctggtgaccctgcgtgtggaccccaatggcttcttcttgtactggacgggccccaacatggaggtggacacactggacatcagttccatcagggacacacggacaggccggtacgcccgcctgcccaaggaccccaagatccgggaagttctgggctttgggggtcccgatgcccggctggaggagaagctgatgacggtggtgtctgggccagacccagtgaacacagtgttcttgaacttcatggccgtgcaggatgacacagccaaggtctggtctgaggagctattcaagctggctatgaacatcctggctcagaacgcctcccggaacaccttcctgcgcaaagcatacacgaagctgaagctgcaggtgaaccaggatggtcggatccccgtcaagaacatcctgaagatgttctcagcagacaagaagcgggtggagactgcgctggaatcctgtggcctcaaattcaaccggagtgagtccatccggcctgatgagttttccttggaaatctttgagcggttcctgaacaagctgtgtctgcggccggacattgacaagatcctgctggagataggcgccaagggcaagccatacctgacgctggagcagctcatggacttcatcaaccagaagcaacgcgacccgagactcaacgaagtgctgtacccgcccctgcggccctcccaggcccggctgctcatcgaaaagtatgagcccaaccagcagtttctggagcgagaccagatgtccatggagggctttagccgctacctgggaggcgaggagaatggcatcctgcccctggaagccctggatctgagcacggacatgacccagccactgagtgcctacttcatcaactcctcgcataacacctatctcactgcggggcagctggctgggacctcgtcggtggagatgtaccgccaggcactactatggggctgccgctgcgtggagctggacgtgtggaagggacggccgcctgaggaggaacccttcattacccacggcttcaccatgaccacagaggtgcctctgcgcgacgtgctggaggccattgccgagactgccttcaagacctcgccctaccccgtcatcctctccttcgagaaccatgtggactcggcaaagcaacaggcaaagatggctgagtactgccgctccatctttggagacgcgctactcatcgagcctctggacaagtacccgctggccccaggcgttcccctgcccagcccccaggacctgatgggccgtatcctggtgaagaacaagaagcggcaccgacccagcgcaggtggcccagacagcgccgggcgcaagcggcccctggagcagagcaattctgccctgagcgagagctccgcggccaccgagccctcctccccgcagctggggtctcccagctctgacagctgcccaggcctgagcaatggggaggaggtagggcttgagaagcccagcctggagcctcagaagtctctgggtgacgagggcctgaaccgaggcccctatgttcttggacctgctgaccgtgaggatgaggaggaagatgaggaagaggaggaacagacagaccccaaaaagccaactacagatgagggcacagccagcagcgaggtgaatgccactgaggagatgtccacgcttgtcaactacatcgaacctgtcaagttcaagtcctttgaggctgctcgaaagaggaacaaatgcttcgagatgtcgtcctttgtggagaccaaggccatggagcaactgaccaagagccccatggagtttgtggaatacaacaagcagcagctcagccgcatctaccccaagggcacccgcgtggactcctccaactacatgccccagctcttctggaacgtagggtgccagcttgttgcgctcaacttccagaccctcgatgtggcgatgcagctcaacgcgggcgtttttgagtacaacgggcgcagcgggtacctgctcaagccggagttcatgcggcggccggacaagtccttcgaccccttcactgaggtcatcgtggatggcatcgtggccaatgccttgcgggtcaaggtgatctcagggcagttcctgtccgacaggaaggtgggcatctacgtggaggtggacatgtttggcctccctgttgatacgcggcgcaagtaccgcacccggacctctcaggggaactcgttcaaccccgtgtgggacgaagagcccttcgacttccccaaggtggtgctgcccacgctggcttcacttcgcattgcagcctttgaggaggggggtaaattcgtagggcaccggatcctgcctgtctctgccatccgctccggataccactacgtctgcctgcggaacgaggccaaccaaccgctgtgcctgccggccctgctcatctacaccgaagcctcggactacattcctgacgaccaccaggactatgcggaggccctgatcaaccccattaagcacgtcagcctgatggaccagagggcccggcagctggccgccctcattggggagagtgaggctcaggctggccaagagacgtgccaggacacccagtctcagcagctggggtctcagccgtcctcaaaccccacccccagcccactggatgcctccccccgccggccccctggccccaccacctcccctgccagcacctccctcagcagcccagggcagcgtgatgatctcatcgccagcatcctctcagaggtggcccccaccccgctggatgagctccgaggtcacaaggctctggtcaagctccggagccggcaagagcgagacctgcgggagctgcgcaagaagcatcagcggaaggcagtcaccctcacccgccgcctgctggatggcctggctcaggcacaggctgagggcaggtgccggctgcggccaggtgccctaggtggggccgctgatgtggaggacacgaaggagggggaggacgaggcaaagcggtatcaggagttccagaacagacaggtgcagagcctgctggagctgcgggaggcccaggtggacgcagaggcccagcggaggctggaacacctgagacaggctctgcagcggctcagggaggtcgtccttgatgcaaacacaactcagttcaagaggctgaaagagatgaacgagagggagaagaaggagctgcagaagatcctggacagaaagcgccataacagcatctcggaggccaagatgagggacaagcataagaaggaggcggaactgacggagattaaccgtcggcacatcactgagtcagtcaactccatccgtcggctggaggaggcccagaagcagcggcatgaccgtcttgtggctgggcagcagcaggtcctgcaacagctggcagaagaggagcccaagctgctggcccagctggcccaggagtgtcaggagcagcgggcgaggctcccccaggagatccgccggagcctgctgggcgagatgccggaggggctgggggacgggcctctggtggcctgtgccagcaacggtcacgcacccgggagcagcgggcacctgtcgggcgctgactcggagagccaggaggagaacacgcagctctgaactggctgagcgagatgaggagactgaggcccggagccatctgtcgtgtgctaggccacagctaagtcaagacgtcctgacctggaggcagggcaggcctggaccctccgtggtggactgtcttcagccagcctggacctgtcccatgcctcaagaccagcgaaaagtggcagagagcccacagtgcgggctccagggcggggctgggctcgcagcagggtcggcttggcacctcttcaaggcctctcccagcttcctggctcttcccaggctgcccgcctgcatccctcctccaggggaaggcggcctcttatctgggcttatctcctgccaattgagtatcttctttgctttgtttttgctgcagcctcaggcaaacagatggggtggggaggccagggaaacaggctccggagtagggccctcctccctcagggtcaatgcaatggccccagacttcctcacttcttctgtgggacgctgccctatcccccagttctgctcactccagtgtattccgtatctaggctcctcagcagccaactcccaccttcctgactctagctggtgtccactgagggacacactccaagtcagttcccaggtcctcaaataccagctgaatgtctaacttctgggtgtgacattccagcccctagaa

SEQ ID NO: 22456 - DNA, 5430 bp, Homo sapiens
  source 1..5430: mol_type = unassigned DNA
aggacagtgctgctgtgagtttgacgaagtggacatcacctgcagtcagtccagagctgcccagtcttgaatataatcatggccaaaccttatgaatttaactggcagaaggaagttccctcctttttgcaagaaggagcagtttttgacagatacgaggaggaatcctttgtgtttgaacccaactgcctcttcaaagtggatgagtttggcttctttctgacatggagaagtgaaggcaaggaaggacaggtgctagaatgctccctcatcaacagtattcggtcgggagccataccaaaggatcccaaaatcttggctgctcttgaagctgttggaaaatcagaaaatgatctggaagggcggatagtttgtgtctgcagtggcacagatctagtgaacattagttttacctacatggtggctgaaaatccagaagtaactaagcaatgggtagaaggcctgagatcaatcatacacaacttcagggccaacaacgtcagtccaatgacatgcctcaagaaacactggatgaaattggcatttatgaccaacacaaatggtaaaattccagttaggagtattactagaacatttgcatcgggaaaaacagaaaaggtgatctttcaagcactcaaggagttaggtcttcccagtggaaagaatgatgaaattgagcccacagcattttcttatgaaaagttctatgaactgacacaaaagatttgtcctcggacagatatagaagatcttttcaaaaaaatcaatggagacaaaactgattatttaacggtagaccaattagtgagctttctaaatgaacatcaacgagatcctcgattgaatgaaattttatttccattttatgatgccaaaagggcaatgcagatcattgagatgtatgaacctgatgaagatttgaagaaaaaaggccttatatcaagtgatgggttttgcagatatctgatgtcagatgaaaacgccccagtcttcctagatcgtttagaactttaccaagaaatggaccatcctctggctcactacttcatcagttcttcccataacacttatctcactggcagacagttcggcgggaagtcttcggtagaaatgtacagacaggttctcctggctggttgcagatgtgttgaacttgactgctgggatggaaaaggtgaagaccaagaaccaataataactcatggaaaagcaatgtgtacagatatcctttttaaggatgtaattcaagccatcaaggaaactgcatttgtcacatcagaatatcctgtaattctctcctttgaaaatcactgcagcaaatatcaacagtacaagatgtccaaatattgcgaagatctatttggggatctcctgttgaaacaagcacttgaatcacatccacttgaaccaggcagggctttgccatcccccaatgacctcaaaagaaaaatactcataaaaaacaagcggctgaaacctgaagttgaaaaaaaacagctggaagctttgagaagcatgatggaagctggagaatctgcctccccagcaaacatcttagaggacgataatgaagaggagatcgaaagtgctgaccaagaggaggaagctcaccccgaattcaaatttggaaatgaactttctgctgatgacttgggtcacaaggaagctgttgcaaatagcgtcaagaagggcctggtcactgtagaagatgagcaggcgtggatggcatcttataaatatgtaggtgctaccactaatatccatccatatttgtccacaatgatcaactacgcccagcctgtaaagtttcaaggtttccatgtggcagaagaacgcaatattcattataacatgtcttcttttaatgaatcagtcggtcttggctacttgaagacacatgcaattgaatttgtcaattataacaaacggcaaatgagtcgcatttaccccaagggaggccgagtcgattccagtaattacatgcctcagattttctggaacgctggctgccagatggtttcactgaactatcaaaccccagatttagcgatgcaattgaatcagggaaaatttgagtataatggatcgtgcgggtaccttctcaaaccagatttcatgaggcggcctgatcgaacatttgaccccttctctgaaactcctgttgatggtgttattgcagccacttgctcagtgcaggttatatcaggtcaattcttatcagataagaaaattggcacctacgtagaggtggatatgtatgggttgcccactgacaccatacgtaaggaattccgaactcgcatggttatgaataatggactcaatccagtttacaatgaagagtcatttgtatttcggaaggtgatcctgccggacctggctgtcttgagaatagctgtgtatgatgataacaacaagctgattggccagaggatcctcccgcttgatggcctccaagccggatatcgacacatttcccttcgaaatgagggaaataaaccattatcactaccaacaattttctgcaatattgttcttaaaacatatgtgcctgatggatttggagatatcgtggatgctttatcagatccaaagaaatttctctcaattacagaaaagagagcagaccaaatgagagctatgggcattgaaactagtgacatagccgacgtgcccagtgacacttccaaaaatgacaagaaaggaaaggccaacaccgccaaagcaaatgtgacccctcagagtagctctgagctcagaccaaccaccacggctgccctggcctctggtgtggaagccaagaaaggtattgaacttatccctcaagtaaggatagaagacttaaagcagatgaaggcttacttgaagcatttaaagaaacagcagaaggagctaaattctttaaagaagaaacatgcaaaggaacacagtaccatgcagaagttacactgcacgcaagttgacaaaattgtggcacagtatgacaaagagaagtcgactcatgagaaaatcctagagaaggcaatgaagaagaaggggggaagtaattgtctcgaaatgaaaaaagaaacagaaatcaaaattcagacgctgacatcagatcacaaatctaaggtcaaagagattgtagcacagcacacaaaggaatggtcagaaatgatcaatacccacagtgctgaggagcaagaaatccgagacctgcacctcagccagcagtgtgagctgctgaaaaagctactcatcaatgcccacgagcagcaaacccagcagctgaaactgtcccatgacagggaaagcaaggaaatgcgagcacaccaggctaagatttctatggaaaatagcaaagccatcagccaagataaatctatcaagaataaagcagaacgggaaaggcgagtcagggagttaaacagcagcaacactaaaaagtttctggaagaaagaaagagacttgccatgaagcagtccaaagaaatggatcagttgaaaaaagtccagcttgaacatctagaattcctagagaaacagaatgagcaggcgaaggagatgcagcagatggtgaaattggaagccgagatggaccgcagaccagcaacagtagtatgaaactccaaaatgcaaactgaagcagcaaacccacaaagcatcaaaagactcactcacaaacttctgaacacaaactccatggatgaaagctgtttattttgtttcctttatgtgtaaacaagatgatatctgaaaccagagagacttggaatgtctgactgacttctatttaacagcttgagtattgcatttccttggccaaacaaaaatagctacaaatccacaaaaatttactattccagtaaggcagagtccaaccattgataatacaacttaaacatgtttgctataaaataccatcacaagtaaatgagcttggtgtgaacaactctcctttgtgatgccttaggacatgtttgaactgcagcaaaaaacaaaaacaaaaaacagtgcattagcaatttcatagcaagtgcatgcactaggaaaagaaaactctgtctacaagtttattagcagaagtggtggtctgctagacaaataattttgcaaaatttttctacatctaagttacctcatcagtaagtgccatgtctctaccatgccatcagaggctaatttcctgtaaaagttgtggaaattgttagaacaatagaaaaatagagcagtgtatgtgtgccaaaactcatcattactcaaaggagaactgtgttaggcacatttaagaaagtttacatctgacattgctttataggaattgtttctgcagattccggatattataattcacaccataaagattgtgaagtggttattggcaaacgtttgtaaatgtgaccatgtataaagtatttatactctttaattcacactgttagagagcaaaatcatctaagtattgccacatgacaagattagtaaacaggaatactagaactatgtttgcatgatacacaagcaccaataaagactaatccatacacagttaacctaatgccaaataaatactggttaaataaatgtatggcacagaatataatttgactatcaagacttttagcataatgaaaaaccctctctctatatatatatgtgtatatgaattatgtgggcattcttgatacttcaagttctagtttgaaaaaaatacataactaatttaattttacacaaaaatatttatgcagattttcagaatttcatatcaggaaatgacctttttatgtctgttaaatatcaaaacaatttgctacagtgttaatctgcatggtctttaagcctgctgtagttgagttgcagacagtgcatgaaaaagtattccgctgggaattgagccatgccaccaaagccaagaggagcgcatggaaacccggtagtctagaactaatcagattactgattttagggcacagcaccagatgaattgttgtatatgcttgtaaaaattgattctgtgtgttcctctgaacaaagcggagaaaatgatgataccatcaatattgaaattaaacttccaacttctctaataaaaaattaaaacacgcataacactcgtcaagagtatttgctcccaagacacattctagcaaatgttttgcctttttcatatacatgatatcatcgttattttcaaagggggcttattaataccctcagcatgtttttcacccaaatgatgcaaaacatgcagattctagttgacttcagttgtaatagacttgtttttctcctatttatgatttgaagtggattctgtaaaatatctcttgttcttagtttccttatctgtaaaacagtggagttagactacatatcttttggcactaacatctcatgaaaaattatggttaataaaatatcaccacatttggattgccaattttc

SEQ ID NO: 22457 - DNA, 5620 bp, Homo sapiens
  source 1..5620: mol_type = unassigned DNA
agtaagtgagctgcaccgccaacaagatctctcacacacagacacacacacgcacacgcacacacgggcgcgcacacacacgcgcgtacacactgggtctccaggcagcggccgtcgccgcatccccggcagcagctccaggcaaagtgacagaggacagtgctgctgtgagtttgacgaagtggacatcacctgcagtcagtccagagctgcccagtcttgaatataatcatggccaaaccttatgaatttaactggcagaaggaagttccctcctttttgcaagaaggagcagtttttgacagatacgaggaggaatcctttgtgtttgaacccaactgcctcttcaaagtggatgagtttggcttctttctgacatggagaagtgaaggcaaggaaggacaggtgctagaatgctccctcatcaacagtattcggtcgggagccataccaaaggatcccaaaatcttggctgctcttgaagctgttggaaaatcagaaaatgatctggaagggcggatagtttgtgtctgcagtggcacagatctagtgaacattagttttacctacatggtggctgaaaatccagaagtaactaagcaatgggtagaaggcctgagatcaatcatacacaacttcagggccaacaacgtcagtccaatgacatgcctcaagaaacactggatgaaattggcatttatgaccaacacaaatggtaaaattccagttaggagtattactagaacatttgcatcgggaaaaacagaaaaggtgatctttcaagcactcaaggagttaggtcttcccagtggaaagaatgatgaaattgagcccacagcattttcttatgaaaagttctatgaactgacacaaaagatttgtcctcggacagatatagaagatcttttcaaaaaaatcaatggagacaaaactgattatttaacggtagaccaattagtgagctttctaaatgaacatcaacgagatcctcgattgaatgaaattttatttccattttatgatgccaaaagggcaatgcagatcattgagatgtatgaacctgatgaagatttgaagaaaaaaggccttatatcaagtgatgggttttgcagatatctgatgtcagatgaaaacgccccagtcttcctagatcgtttagaactttaccaagaaatggaccatcctctggctcactacttcatcagttcttcccataacacttatctcactggcagacagttcggcgggaagtcttcggtagaaatgtacagacaggttctcctggctggttgcagatgtgttgaacttgactgctgggatggaaaaggtgaagaccaagaaccaataataactcatggaaaagcaatgtgtacagatatcctttttaaggatgtaattcaagccatcaaggaaactgcatttgtcacatcagaatatcctgtaattctctcctttgaaaatcactgcagcaaatatcaacagtacaagatgtccaaatattgcgaagatctatttggggatctcctgttgaaacaagcacttgaatcacatccacttgaaccaggcagggctttgccatcccccaatgacctcaaaagaaaaatactcataaaaaacaagcggctgaaacctgaagttgaaaaaaaacagctggaagctttgagaagcatgatggaagctggagaatctgcctccccagcaaacatcttagaggacgataatgaagaggagatcgaaagtgctgaccaagaggaggaagctcaccccgaattcaaatttggaaatgaactttctgctgatgacttgggtcacaaggaagctgttgcaaatagcgtcaagaagggcctggtcactgtagaagatgagcaggcgtggatggcatcttataaatatgtaggtgctaccactaatatccatccatatttgtccacaatgatcaactacgcccagcctgtaaagtttcaaggtttccatgtggcagaagaacgcaatattcattataacatgtcttcttttaatgaatcagtcggtcttggctacttgaagacacatgcaattgaatttgtcaattataacaaacggcaaatgagtcgcatttaccccaagggaggccgagtcgattccagtaattacatgcctcagattttctggaacgctggctgccagatggtttcactgaactatcaaaccccagatttagcgatgcaattgaatcagggaaaatttgagtataatggatcgtgcgggtaccttctcaaaccagatttcatgaggcggcctgatcgaacatttgaccccttctctgaaactcctgttgatggtgttattgcagccacttgctcagtgcaggttatatcaggtcaattcttatcagataagaaaattggcacctacgtagaggtggatatgtatgggttgcccactgacaccatacgtaaggaattccgaactcgcatggttatgaataatggactcaatccagtttacaatgaagagtcatttgtatttcggaaggtgatcctgccggacctggctgtcttgagaatagctgtgtatgatgataacaacaagctgattggccagaggatcctcccgcttgatggcctccaagccggatatcgacacatttcccttcgaaatgagggaaataaaccattatcactaccaacaattttctgcaatattgttcttaaaacatatgtgcctgatggatttggagatatcgtggatgctttatcagatccaaagaaatttctctcaattacagaaaagagagcagaccaaatgagagctatgggcattgaaactagtgacatagccgacgtgcccagtgacacttccaaaaatgacaagaaaggaaaggccaacaccgccaaagcaaatgtgacccctcagagtagctctgagctcagaccaaccaccacggctgccctggcctctggtgtggaagccaagaaaggtattgaacttatccctcaagtaaggatagaagacttaaagcagatgaaggcttacttgaagcatttaaagaaacagcagaaggagctaaattctttaaagaagaaacatgcaaaggaacacagtaccatgcagaagttacactgcacgcaagttgacaaaattgtggcacagtatgacaaagagaagtcgactcatgagaaaatcctagagaaggcaatgaagaagaaggggggaagtaattgtctcgaaatgaaaaaagaaacagaaatcaaaattcagacgctgacatcagatcacaaatctaaggtcaaagagattgtagcacagcacacaaaggaatggtcagaaatgatcaatacccacagtgctgaggagcaagaaatccgagacctgcacctcagccagcagtgtgagctgctgaaaaagctactcatcaatgcccacgagcagcaaacccagcagctgaaactgtcccatgacagggaaagcaaggaaatgcgagcacaccaggctaagatttctatggaaaatagcaaagccatcagccaagataaatctatcaagaataaagcagaacgggaaaggcgagtcagggagttaaacagcagcaacactaaaaagtttctggaagaaagaaagagacttgccatgaagcagtccaaagaaatggatcagttgaaaaaagtccagcttgaacatctagaattcctagagaaacagaatgagcagcttttgaaatcctgtcatgcagtgtcccaaacgcaaggcgaaggagatgcagcagatggtgaaattggaagccgagatggaccgcagaccagcaacagtagtatgaaactccaaaatgcaaactgaagcagcaaacccacaaagcatcaaaagactcactcacaaacttctgaacacaaactccatggatgaaagctgtttattttgtttcctttatgtgtaaacaagatgatatctgaaaccagagagacttggaatgtctgactgacttctatttaacagcttgagtattgcatttccttggccaaacaaaaatagctacaaatccacaaaaatttactattccagtaaggcagagtccaaccattgataatacaacttaaacatgtttgctataaaataccatcacaagtaaatgagcttggtgtgaacaactctcctttgtgatgccttaggacatgtttgaactgcagcaaaaaacaaaaacaaaaaacagtgcattagcaatttcatagcaagtgcatgcactaggaaaagaaaactctgtctacaagtttattagcagaagtggtggtctgctagacaaataattttgcaaaatttttctacatctaagttacctcatcagtaagtgccatgtctctaccatgccatcagaggctaatttcctgtaaaagttgtggaaattgttagaacaatagaaaaatagagcagtgtatgtgtgccaaaactcatcattactcaaaggagaactgtgttaggcacatttaagaaagtttacatctgacattgctttataggaattgtttctgcagattccggatattataattcacaccataaagattgtgaagtggttattggcaaacgtttgtaaatgtgaccatgtataaagtatttatactctttaattcacactgttagagagcaaaatcatctaagtattgccacatgacaagattagtaaacaggaatactagaactatgtttgcatgatacacaagcaccaataaagactaatccatacacagttaacctaatgccaaataaatactggttaaataaatgtatggcacagaatataatttgactatcaagacttttagcataatgaaaaaccctctctctatatatatatgtgtatatgaattatgtgggcattcttgatacttcaagttctagtttgaaaaaaatacataactaatttaattttacacaaaaatatttatgcagattttcagaatttcatatcaggaaatgacctttttatgtctgttaaatatcaaaacaatttgctacagtgttaatctgcatggtctttaagcctgctgtagttgagttgcagacagtgcatgaaaaagtattccgctgggaattgagccatgccaccaaagccaagaggagcgcatggaaacccggtagtctagaactaatcagattactgattttagggcacagcaccagatgaattgttgtatatgcttgtaaaaattgattctgtgtgttcctctgaacaaagcggagaaaatgatgataccatcaatattgaaattaaacttccaacttctctaataaaaaattaaaacacgcataacactcgtcaagagtatttgctcccaagacacattctagcaaatgttttgcctttttcatatacatgatatcatcgttattttcaaagggggcttattaataccctcagcatgtttttcacccaaatgatgcaaaacatgcagattctagttgacttcagttgtaatagacttgtttttctcctatttatgatttgaagtggattctgtaaaatatctcttgttcttagtttccttatctgtaaaacagtggagttagactacatatcttttggcactaacatctcatgaaaaattatggttaataaaatatcaccacatttggattgccaattttc

SEQ ID NO: 22458 - DNA, 5619 bp, Homo sapiens
  source 1..5619: mol_type = unassigned DNA
agtaagtgagctgcaccgccaacaagatctctcacacacagacacacacacgcacacgcacacacgggcgcgcacacacacgcgcgtacacactgggtctccaggcagcggccgtcgccgcatccccggcagcagctccaggcaaagtgacagaggacagtgctgctgtgagtttgacgaagtggacatcacctgcagtcagtccagagctgcccagtcttgaatataatcatggccaaaccttatgaatttaactggcagaaggaagttccctcctttttgcaagaaggagcagtttttgacagatacgaggaggaatcctttgtgtttgaacccaactgcctcttcaaagtggatgagtttggcttctttctgacatggagaagtgaaggcaaggaaggacaggtgctagaatgctccctcatcaacagtattcggtcgggagccataccaaaggatcccaaaatcttggctgctcttgaagctgttggaaaatcagaaaatgatctggaagggcggatagtttgtgtctgcagtggcacagatctagtgaacattagttttacctacatggtggctgaaaatccagaagtaactaagcaatgggtagaaggcctgagatcaatcatacacaacttcagggccaacaacgtcagtccaatgacatgcctcaagaaacactggatgaaattggcatttatgaccaacacaaatggtaaaattccagttaggagtattactagaacatttgcatcgggaaaaacagaaaaggtgatctttcaagcactcaaggagttaggtcttcccagtggaaagaatgatgaaattgagcccacagcattttcttatgaaaagttctatgaactgacacaaaagatttgtcctcggacagatatagaagatcttttcaaaaaaatcaatggagacaaaactgattatttaacggtagaccaattagtgagctttctaaatgaacatcaacgagatcctcgattgaatgaaattttatttccattttatgatgccaaaagggcaatgcagatcattgagatgtatgaacctgatgaagatttgaagaaaaaaggccttatatcaagtgatgggttttgcagatatctgatgtcagatgaaaacgccccagtcttcctagatcgtttagaactttaccaagaaatggaccatcctctggctcactacttcatcagttcttcccataacacttatctcactggcagacagttcggcgggaagtcttcggtagaaatgtacagacaggttctcctggctggttgcagatgtgttgaacttgactgctgggatggaaaaggtgaagaccaagaaccaataataactcatggaaaagcaatgtgtacagatatcctttttaaggatgtaattcaagccatcaaggaaactgcatttgtcacatcagaatatcctgtaattctctcctttgaaaatcactgcagcaaatatcaacagtacaagatgtccaaatattgcgaagatctatttggggatctcctgttgaaacaagcacttgaatcacatccacttgaaccaggcagggctttgccatcccccaatgacctcaaaagaaaaatactcataaaaaacaagcggctgaaacctgaagttgaaaaaaaacagctggaagctttgagaagcatgatggaagctggagaatctgcctccccagcaaacatcttagaggacgataatgaagaggagatcgaaagtgctgaccaagaggaggaagctcaccccgaattcaaatttggaaatgaactttctgctgatgacttgggtcacaaggaagctgttgcaaatagcgtcaagaaggcttcagatgaccttgaacatgaaaacaacaaaaagggcctggtcactgtagaagatgagcaggcgtggatggcatcttataaatatgtaggtgctaccactaatatccatccatatttgtccacaatgatcaactacgcccagcctgtaaagtttcaaggtttccatgtggcagaagaacgcaatattcattataacatgtcttcttttaatgaatcagtcggtcttggctacttgaagacacatgcaattgaatttgtcaattataacaaacggcaaatgagtcgcatttaccccaagggaggccgagtcgattccagtaattacatgcctcagattttctggaacgctggctgccagatggtttcactgaactatcaaaccccagatttagcgatgcaattgaatcagggaaaatttgagtataatggatcgtgcgggtaccttctcaaaccagatttcatgaggcggcctgatcgaacatttgaccccttctctgaaactcctgttgatggtgttattgcagccacttgctcagtgcaggttatatcaggtcaattcttatcagataagaaaattggcacctacgtagaggtggatatgtatgggttgcccactgacaccatacgtaaggaattccgaactcgcatggttatgaataatggactcaatccagtttacaatgaagagtcatttgtatttcggaaggtgatcctgccggacctggctgtcttgagaatagctgtgtatgatgataacaacaagctgattggccagaggatcctcccgcttgatggcctccaagccggatatcgacacatttcccttcgaaatgagggaaataaaccattatcactaccaacaattttctgcaatattgttcttaaaacatatgtgcctgatggatttggagatatcgtggatgctttatcagatccaaagaaatttctctcaattacagaaaagagagcagaccaaatgagagctatgggcattgaaactagtgacatagccgacgtgcccagtgacacttccaaaaatgacaagaaaggaaaggccaacaccgccaaagcaaatgtgacccctcagagtagctctgagctcagaccaaccaccacggctgccctggcctctggtgtggaagccaagaaaggtattgaacttatccctcaagtaaggatagaagacttaaagcagatgaaggcttacttgaagcatttaaagaaacagcagaaggagctaaattctttaaagaagaaacatgcaaaggaacacagtaccatgcagaagttacactgcacgcaagttgacaaaattgtggcacagtatgacaaagagaagtcgactcatgagaaaatcctagagaaggcaatgaagaagaaggggggaagtaattgtctcgaaatgaaaaaagaaacagaaatcaaaattcagacgctgacatcagatcacaaatctaaggtcaaagagattgtagcacagcacacaaaggaatggtcagaaatgatcaatacccacagtgctgaggagcaagaaatccgagacctgcacctcagccagcagtgtgagctgctgaaaaagctactcatcaatgcccacgagcagcaaacccagcagctgaaactgtcccatgacagggaaagcaaggaaatgcgagcacaccaggctaagatttctatggaaaatagcaaagccatcagccaagataaatctatcaagaataaagcagaacgggaaaggcgagtcagggagttaaacagcagcaacactaaaaagtttctggaagaaagaaagagacttgccatgaagcagtccaaagaaatggatcagttgaaaaaagtccagcttgaacatctagaattcctagagaaacagaatgagcaggcgaaggagatgcagcagatggtgaaattggaagccgagatggaccgcagaccagcaacagtagtatgaaactccaaaatgcaaactgaagcagcaaacccacaaagcatcaaaagactcactcacaaacttctgaacacaaactccatggatgaaagctgtttattttgtttcctttatgtgtaaacaagatgatatctgaaaccagagagacttggaatgtctgactgacttctatttaacagcttgagtattgcatttccttggccaaacaaaaatagctacaaatccacaaaaatttactattccagtaaggcagagtccaaccattgataatacaacttaaacatgtttgctataaaataccatcacaagtaaatgagcttggtgtgaacaactctcctttgtgatgccttaggacatgtttgaactgcagcaaaaaacaaaaacaaaaaacagtgcattagcaatttcatagcaagtgcatgcactaggaaaagaaaactctgtctacaagtttattagcagaagtggtggtctgctagacaaataattttgcaaaatttttctacatctaagttacctcatcagtaagtgccatgtctctaccatgccatcagaggctaatttcctgtaaaagttgtggaaattgttagaacaatagaaaaatagagcagtgtatgtgtgccaaaactcatcattactcaaaggagaactgtgttaggcacatttaagaaagtttacatctgacattgctttataggaattgtttctgcagattccggatattataattcacaccataaagattgtgaagtggttattggcaaacgtttgtaaatgtgaccatgtataaagtatttatactctttaattcacactgttagagagcaaaatcatctaagtattgccacatgacaagattagtaaacaggaatactagaactatgtttgcatgatacacaagcaccaataaagactaatccatacacagttaacctaatgccaaataaatactggttaaataaatgtatggcacagaatataatttgactatcaagacttttagcataatgaaaaaccctctctctatatatatatgtgtatatgaattatgtgggcattcttgatacttcaagttctagtttgaaaaaaatacataactaatttaattttacacaaaaatatttatgcagattttcagaatttcatatcaggaaatgacctttttatgtctgttaaatatcaaaacaatttgctacagtgttaatctgcatggtctttaagcctgctgtagttgagttgcagacagtgcatgaaaaagtattccgctgggaattgagccatgccaccaaagccaagaggagcgcatggaaacccggtagtctagaactaatcagattactgattttagggcacagcaccagatgaattgttgtatatgcttgtaaaaattgattctgtgtgttcctctgaacaaagcggagaaaatgatgataccatcaatattgaaattaaacttccaacttctctaataaaaaattaaaacacgcataacactcgtcaagagtatttgctcccaagacacattctagcaaatgttttgcctttttcatatacatgatatcatcgttattttcaaagggggcttattaataccctcagcatgtttttcacccaaatgatgcaaaacatgcagattctagttgacttcagttgtaatagacttgtttttctcctatttatgatttgaagtggattctgtaaaatatctcttgttcttagtttccttatctgtaaaacagtggagttagactacatatcttttggcactaacatctcatgaaaaattatggttaataaaatatcaccacatttggattgccaattttc

SEQ ID NO: 22459 - DNA, 5796 bp, Homo sapiens
  source 1..5796: mol_type = unassigned DNA
gtcttgaatataatcatggccaaaccttatgaatttaactggcagaaggaagttccctcctttttgcaagaaggagcagtttttgacagatacgaggaggaatcctttgtgtttgaacccaactgcctcttcaaagtggatgagtttggcttctttctgacatggagaagtgaaggcaaggaaggacaggtgctagaatgctccctcatcaacagtattcggtcgggagccataccaaaggatcccaaaatcttggctgctcttgaagctgttggaaaatcagaaaatgatctggaagggcggatagtttgtgtctgcagtggcacagatctagtgaacattagttttacctacatggtggctgaaaatccagaagtaactaagcaatgggtagaaggcctgagatcaatcatacacaacttcagggccaacaacgtcagtccaatgacatgcctcaagaaacactggatgaaattggcatttatgaccaacacaaatggtaaaattccagttaggagtattactagaacatttgcatcgggaaaaacagaaaaggtgatctttcaagcactcaaggagttaggtcttcccagtggaaagaatgatgaaattgagcccacagcattttcttatgaaaagttctatgaactgacacaaaagatttgtcctcggacagatatagaagatcttttcaaaaaaatcaatggagacaaaactgattatttaacggtagaccaattagtgagctttctaaatgaacatcaacgagatcctcgattgaatgaaattttatttccattttatgatgccaaaagggcaatgcagatcattgagatgtatgaacctgatgaagatttgaagaaaaaaggccttatatcaagtgatgggttttgcagatatctgatgtcagatgaaaacgccccagtcttcctagatcgtttagaactttaccaagaaatggaccatcctctggctcactacttcatcagttcttcccataacacttatctcactggcagacagttcggcgggaagtcttcggtagaaatgtacagacaggttctcctggctggttgcagatgtgttgaacttgactgctgggatggaaaaggtgaagaccaagaaccaataataactcatggaaaagcaatgtgtacagatatcctttttaaggatgtaattcaagccatcaaggaaactgcatttgtcacatcagaatatcctgtaattctctcctttgaaaatcactgcagcaaatatcaacagtacaagatgtccaaatattgcgaagatctatttggggatctcctgttgaaacaagcacttgaatcacatccacttgaaccaggcagggctttgccatcccccaatgacctcaaaagaaaaatactcataaaaaacaagcggctgaaacctgaagttgaaaaaaaacagctggaagctttgagaagcatgatggaagctggagaatctgcctccccagcaaacatcttagaggacgataatgaagaggagatcgaaagtgctgaccaagaggaggaagctcaccccgaattcaaatttggaaatgaactttctgctgatgacttgggtcacaaggaagctgttgcaaatagcgtcaagaagggcctggtcactgtagaagatgagcaggcgtggatggcatcttataaatatgtaggtgctaccactaatatccatccatatttgtccacaatgatcaactacgcccagcctgtaaagtttcaaggtttccatgtggcagaagaacgcaatattcattataacatgtcttcttttaatgaatcagtcggtcttggctacttgaagacacatgcaattgaatttgtcaattataacaaacggcaaatgagtcgcatttaccccaagggaggccgagtcgattccagtaattacatgcctcagattttctggaacgctggctgccagatggtttcactgaactatcaaaccccagatttagcgatgcaattgaatcagggaaaatttgagtataatggatcgtgcgggtaccttctcaaaccagatttcatgaggcggcctgatcgaacatttgaccccttctctgaaactcctgttgatggtgttattgcagccacttgctcagtgcaggttatatcaggtcaattcttatcagataagaaaattggcacctacgtagaggtggatatgtatgggttgcccactgacaccatacgtaaggaattccgaactcgcatggttatgaataatggactcaatccagtttacaatgaagagtcatttgtatttcggaaggtgatcctgccggacctggctgtcttgagaatagctgtgtatgatgataacaacaagctgattggccagaggatcctcccgcttgatggcctccaagccggatatcgacacatttcccttcgaaatgagggaaataaaccattatcactaccaacaattttctgcaatattgttcttaaaacatatgtgcctgatggatttggagatatcgtggatgctttatcagatccaaagaaatttctctcaattacagaaaagagagcagaccaaatgagagctatgggcattgaaactagtgacatagccgacgtgcccagtgacacttccaaaaatgacaagaaaggaaaggccaacaccgccaaagcaaatgtgacccctcagagtagctctgagctcagaccaaccaccacggctgccctggcctctggtgtggaagccaagaaaggtattgaacttatccctcaagtaaggatagaagacttaaagcagatgaaggcttacttgaagcatttaaagaaacagcagaaggagctaaattctttaaagaagaaacatgcaaaggaacacagtaccatgcagaagttacactgcacgcaagttgacaaaattgtggcacagtatgacaaagagaagtcgactcatgagaaaatcctagagaaggcaatgaagaagaaggggggaagtaattgtctcgaaatgaaaaaagaaacagaaatcaaaattcagacgctgacatcagatcacaaatctaaggtcaaagagattgtagcacagcacacaaaggaatggtcagaaatgatcaatacccacagtgctgaggagcaagaaatccgagacctgcacctcagccagcagtgtgagctgctgaaaaagctactcatcaatgcccacgagcagcaaacccagcagctgaaactgtcccatgacagggaaagcaaggaaatgcgagcacaccaggctaagatttctatggaaaatagcaaagccatcagccaagataaatctatcaagaataaagcagaacgggaaaggcgagtcagggagttaaacagcagcaacactaaaaagtttctggaagaaagaaagagacttgccatgaagcagtccaaagaaatggatcagttgaaaaaagtccagcttgaacatctagaattcctagagaaacagaatgagcaggcgaaggagatgcagcagatggtgaaattggaagccgagatggaccgcagaccagcaacagtagtatgaaactccaaaatgcaaactgaagcagcaaacccacaaagcatcaaaagactcactcacaaacttctgaacacaaactccatggatgaaagctgtttattttgtttcctttatgtgtaaacaagatgatatctgaaaccagagagacttggaatgtctgactgacttctatttaacagcttgagtattgcatttccttggccaaacaaaaatagctacaaatccacaaaaatttactattccagtaaggcagagtccaaccattgataatacaacttaaacatgtttgctataaaataccatcacaagtaaatgagcttggtgtgaacaactctcctttgtgatgccttaggacatgtttgaactgcagcaaaaaacaaaaacaaaaaacagtgcattagcaatttcatagcaagtgcatgcactaggaaaagaaaactctgtctacaagtttattagcagaagtggtggtctgctagacaaataattttgcaaaatttttctacatctaagttacctcatcagtaagtgccatgtctctaccatgccatcagaggctaatttcctgtaaaagttgtggaaattgttagaacaatagaaaaatagagcagtgtatgtgtgccaaaactcatcattactcaaaggagaactgtgttaggcacatttaagaaagtttacatctgacattgctttataggaattgtttctgcagattccggatattataattcacaccataaagattgtgaagtggttattggcaaacgtttgtaaatgtgaccatgtataaagtatttatactctttaattcacactgttagagagcaaaatcatctaagtattgccacatgacaagattagtaaacaggaatactagaactatgtttgcatgatacacaagcaccaataaagactaatccatacacagttaacctaatgccaaataaatactggttaaataaatgtatggcacagaatataatttgactatcaagacttttagcataatgaaaaaccctctctctatatatatatgtgtatatgaattatgtgggcattcttgatacttcaagttctagtttgaaaaaaatacataactaatttaattttacacaaaaatatttatgcagattttcagaatttcatatcaggaaatgacctttttatgtctgttaaatatcaaaacaatttgctacagtgttaatctgcatggtctttaagcctgctgtagttgagttgcagacagtgcatgaaaaagtattccgctgggaattgagccatgccaccaaagccaagaggagcgcatggaaacccggtagtctagaactaatcagattactgattttagggcacagcaccagatgaattgttgtatatgcttgtaaaaattgattctgtgtgttcctctgaacaaagcggagaaaatgatgataccatcaatattgaaattaaacttccaacttctctaataaaaaattaaaacacgcataacactcgtcaagagtatttgctcccaagacacattctagcaaatgttttgcctttttcatatacatgatatcatcgttattttcaaagggggcttattaataccctcagcatgtttttcacccaaatgatgcaaaacatgcagattctagttgacttcagttgtaatagacttgtttttctcctatttatgatttgaagtggattctgtaaaatatctcttgttcttagtttccttatctgtaaaacagtggagttagactacatatcttttggcactaacatctcatgaaaaattatggttaataaaatatcaccacatttggattgccaattttcaaagattctgagtggcttctcatcatcaaatcaaatcaaatccaagagctcaactatgctcaccattctgtaacacttgactgaattcatcacttgcctcctcttgtttctgctttggagaggtactactagtttttccatttttcttatttcttccctcttttcatcctcctaggccaccataagcatttatattttccagtgttatacatggaaccagtttgtttttctttgatccaggttacttttagtatttgagacatcataccattaatccattgtagtaggattaaaatgtacacacaactcaaatgtgcaacaaaagcatgtgttacctgctattgtcagttcatattgcactcaaaccttgcattatcccttattatgaagaaaaattaatagccaattaaagtaactcagtgtcttcca

SEQ ID NO: 22460 - DNA, 5833 bp, Homo sapiens
  source 1..5833: mol_type = unassigned DNA
gtcttgaatataatcatggccaaaccttatgaatttaactggcagaaggaagttccctcctttttgcaagaaggagcagtttttgacagatacgaggaggaatcctttgtgtttgaacccaactgcctcttcaaagtggatgagtttggcttctttctgacatggagaagtgaaggcaaggaaggacaggtgctagaatgctccctcatcaacagtattcggtcgggagccataccaaaggatcccaaaatcttggctgctcttgaagctgttggaaaatcagaaaatgatctggaagggcggatagtttgtgtctgcagtggcacagatctagtgaacattagttttacctacatggtggctgaaaatccagaagtaactaagcaatgggtagaaggcctgagatcaatcatacacaacttcagggccaacaacgtcagtccaatgacatgcctcaagaaacactggatgaaattggcatttatgaccaacacaaatggtaaaattccagttaggagtattactagaacatttgcatcgggaaaaacagaaaaggtgatctttcaagcactcaaggagttaggtcttcccagtggaaagaatgatgaaattgagcccacagcattttcttatgaaaagttctatgaactgacacaaaagatttgtcctcggacagatatagaagatcttttcaaaaaaatcaatggagacaaaactgattatttaacggtagaccaattagtgagctttctaaatgaacatcaacgagatcctcgattgaatgaaattttatttccattttatgatgccaaaagggcaatgcagatcattgagatgtatgaacctgatgaagatttgaagaaaaaaggccttatatcaagtgatgggttttgcagatatctgatgtcagatgaaaacgccccagtcttcctagatcgtttagaactttaccaagaaatggaccatcctctggctcactacttcatcagttcttcccataacacttatctcactggcagacagttcggcgggaagtcttcggtagaaatgtacagacaggttctcctggctggttgcagatgtgttgaacttgactgctgggatggaaaaggtgaagaccaagaaccaataataactcatggaaaagcaatgtgtacagatatcctttttaaggatgtaattcaagccatcaaggaaactgcatttgtcacatcagaatatcctgtaattctctcctttgaaaatcactgcagcaaatatcaacagtacaagatgtccaaatattgcgaagatctatttggggatctcctgttgaaacaagcacttgaatcacatccacttgaaccaggcagggctttgccatcccccaatgacctcaaaagaaaaatactcataaaaaacaagcggctgaaacctgaagttgaaaaaaaacagctggaagctttgagaagcatgatggaagctggagaatctgcctccccagcaaacatcttagaggacgataatgaagaggagatcgaaagtgctgaccaagaggaggaagctcaccccgaattcaaatttggaaatgaactttctgctgatgacttgggtcacaaggaagctgttgcaaatagcgtcaagaagggcctggtcactgtagaagatgagcaggcgtggatggcatcttataaatatgtaggtgctaccactaatatccatccatatttgtccacaatgatcaactacgcccagcctgtaaagtttcaaggtttccatgtggcagaagaacgcaatattcattataacatgtcttcttttaatgaatcagtcggtcttggctacttgaagacacatgcaattgaatttgtcaattataacaaacggcaaatgagtcgcatttaccccaagggaggccgagtcgattccagtaattacatgcctcagattttctggaacgctggctgccagatggtttcactgaactatcaaaccccagatttagcgatgcaattgaatcagggaaaatttgagtataatggatcgtgcgggtaccttctcaaaccagatttcatgaggcggcctgatcgaacatttgaccccttctctgaaactcctgttgatggtgttattgcagccacttgctcagtgcaggttatatcaggtcaattcttatcagataagaaaattggcacctacgtagaggtggatatgtatgggttgcccactgacaccatacgtaaggaattccgaactcgcatggttatgaataatggactcaatccagtttacaatgaagagtcatttgtatttcggaaggtgatcctgccggacctggctgtcttgagaatagctgtgtatgatgataacaacaagctgattggccagaggatcctcccgcttgatggcctccaagccggatatcgacacatttcccttcgaaatgagggaaataaaccattatcactaccaacaattttctgcaatattgttcttaaaacatatgtgcctgatggatttggagatatcgtggatgctttatcagatccaaagaaatttctctcaattacagaaaagagagcagaccaaatgagagctatgggcattgaaactagtgacatagccgacgtgcccagtgacacttccaaaaatgacaagaaaggaaaggccaacaccgccaaagcaaatgtgacccctcagagtagctctgagctcagaccaaccaccacggctgccctggcctctggtgtggaagccaagaaaggtattgaacttatccctcaagtaaggatagaagacttaaagcagatgaaggcttacttgaagcatttaaagaaacagcagaaggagctaaattctttaaagaagaaacatgcaaaggaacacagtaccatgcagaagttacactgcacgcaagttgacaaaattgtggcacagtatgacaaagagaagtcgactcatgagaaaatcctagagaaggcaatgaagaagaaggggggaagtaattgtctcgaaatgaaaaaagaaacagaaatcaaaattcagacgctgacatcagatcacaaatctaaggtcaaagagattgtagcacagcacacaaaggaatggtcagaaatgatcaatacccacagtgctgaggagcaagaaatccgagacctgcacctcagccagcagtgtgagctgctgaaaaagctactcatcaatgcccacgagcagcaaacccagcagctgaaactgtcccatgacagggaaagcaaggaaatgcgagcacaccaggctaagatttctatggaaaatagcaaagccatcagccaagataaatctatcaagaataaagcagaacgggaaaggcgagtcagggagttaaacagcagcaacactaaaaagtttctggaagaaagaaagagacttgccatgaagcagtccaaagaaatggatcagttgaaaaaagtccagcttgaacatctagaattcctagagaaacagaatgagcagcttttgaaatcctgtcatgcagtgtcccaaacgcaaggcgaaggagatgcagcagatggtgaaattggaagccgagatggaccgcagaccagcaacagtagtatgaaactccaaaatgcaaactgaagcagcaaacccacaaagcatcaaaagactcactcacaaacttctgaacacaaactccatggatgaaagctgtttattttgtttcctttatgtgtaaacaagatgatatctgaaaccagagagacttggaatgtctgactgacttctatttaacagcttgagtattgcatttccttggccaaacaaaaatagctacaaatccacaaaaatttactattccagtaaggcagagtccaaccattgataatacaacttaaacatgtttgctataaaataccatcacaagtaaatgagcttggtgtgaacaactctcctttgtgatgccttaggacatgtttgaactgcagcaaaaaacaaaaacaaaaaacagtgcattagcaatttcatagcaagtgcatgcactaggaaaagaaaactctgtctacaagtttattagcagaagtggtggtctgctagacaaataattttgcaaaatttttctacatctaagttacctcatcagtaagtgccatgtctctaccatgccatcagaggctaatttcctgtaaaagttgtggaaattgttagaacaatagaaaaatagagcagtgtatgtgtgccaaaactcatcattactcaaaggagaactgtgttaggcacatttaagaaagtttacatctgacattgctttataggaattgtttctgcagattccggatattataattcacaccataaagattgtgaagtggttattggcaaacgtttgtaaatgtgaccatgtataaagtatttatactctttaattcacactgttagagagcaaaatcatctaagtattgccacatgacaagattagtaaacaggaatactagaactatgtttgcatgatacacaagcaccaataaagactaatccatacacagttaacctaatgccaaataaatactggttaaataaatgtatggcacagaatataatttgactatcaagacttttagcataatgaaaaaccctctctctatatatatatgtgtatatgaattatgtgggcattcttgatacttcaagttctagtttgaaaaaaatacataactaatttaattttacacaaaaatatttatgcagattttcagaatttcatatcaggaaatgacctttttatgtctgttaaatatcaaaacaatttgctacagtgttaatctgcatggtctttaagcctgctgtagttgagttgcagacagtgcatgaaaaagtattccgctgggaattgagccatgccaccaaagccaagaggagcgcatggaaacccggtagtctagaactaatcagattactgattttagggcacagcaccagatgaattgttgtatatgcttgtaaaaattgattctgtgtgttcctctgaacaaagcggagaaaatgatgataccatcaatattgaaattaaacttccaacttctctaataaaaaattaaaacacgcataacactcgtcaagagtatttgctcccaagacacattctagcaaatgttttgcctttttcatatacatgatatcatcgttattttcaaagggggcttattaataccctcagcatgtttttcacccaaatgatgcaaaacatgcagattctagttgacttcagttgtaatagacttgtttttctcctatttatgatttgaagtggattctgtaaaatatctcttgttcttagtttccttatctgtaaaacagtggagttagactacatatcttttggcactaacatctcatgaaaaattatggttaataaaatatcaccacatttggattgccaattttcaaagattctgagtggcttctcatcatcaaatcaaatcaaatccaagagctcaactatgctcaccattctgtaacacttgactgaattcatcacttgcctcctcttgtttctgctttggagaggtactactagtttttccatttttcttatttcttccctcttttcatcctcctaggccaccataagcatttatattttccagtgttatacatggaaccagtttgtttttctttgatccaggttacttttagtatttgagacatcataccattaatccattgtagtaggattaaaatgtacacacaactcaaatgtgcaacaaaagcatgtgttacctgctattgtcagttcatattgcactcaaaccttgcattatcccttattatgaagaaaaattaatagccaattaaagtaactcagtgtcttcca

SEQ ID NO: 22461 - DNA, 614 bp, Homo sapiens
  source 1..614: mol_type = unassigned DNA
gggaggaggaagcggctggccgctgaggggcggcggggcccggagcgggggacgcgcagggcccggcggtgggcgggcgggtcggcgctgccccgtgggctcgctggggagccacggcggagacccccgccctcaactgaggaaaagacaatttctctctgattcagaatcctgaaaatgtgatctcccttaaaaagaggacagtgctgctgtgagtttgacgaagtggacatcacctgcagtcagtccagagctgcccagtcttgaatataatcatggccaaaccttatgaatttaactggcagaaggaagttccctcctttttgcaagaaggagcagtttttgacagatacgaggaggaatcctttgtgtttgaacccaactgcctcttcaaagtggatgagtttggcttctttctgacatggagaagtgaaggcaaggaaggacaggtgctagaatgctccctcatcaacagtattcggtcgggagccataccaaaggatcccaaaatcttggctgctcttgaagctgttggaaaatcagaaaatgatctggaagggcggatagtttgtgtctgcagtggcacagatctagtgaacattagttttacctac

SEQ ID NO: 22462 - DNA, 5325 bp, Homo sapiens
  source 1..5325: mol_type = unassigned DNA
ccagttaggagtattactagaacatttgcatcgggaaaaacagaaaaggtgatctttcaagcactcaaggagttaggtcttcccagtggaaagaatgatgaaattgagcccacagcattttcttatgaaaagttctatgaactgacacaaaagatttgtcctcggacagatatagaagatcttttcaaaaaaatcaatggagacaaaactgattatttaacggtagaccaattagtgagctttctaaatgaacatcaacgagatcctcgattgaatgaaattttatttccattttatgatgccaaaagggcaatgcagatcattgagatgtatgaacctgatgaagatttgaagaaaaaaggccttatatcaagtgatgggttttgcagatatctgatgtcagatgaaaacgccccagtcttcctagatcgtttagaactttaccaagaaatggaccatcctctggctcactacttcatcagttcttcccataacacttatctcactggcagacagttcggcgggaagtcttcggtagaaatgtacagacaggttctcctggctggttgcagatgtgttgaacttgactgctgggatggaaaaggtgaagaccaagaaccaataataactcatggaaaagcaatgtgtacagatatcctttttaaggatgtaattcaagccatcaaggaaactgcatttgtcacatcagaatatcctgtaattctctcctttgaaaatcactgcagcaaatatcaacagtacaagatgtccaaatattgcgaagatctatttggggatctcctgttgaaacaagcacttgaatcacatccacttgaaccaggcagggctttgccatcccccaatgacctcaaaagaaaaatactcataaaaaacaagcggctgaaacctgaagttgaaaaaaaacagctggaagctttgagaagcatgatggaagctggagaatctgcctccccagcaaacatcttagaggacgataatgaagaggagatcgaaagtgctgaccaagaggaggaagctcaccccgaattcaaatttggaaatgaactttctgctgatgacttgggtcacaaggaagctgttgcaaatagcgtcaagaaggcttcagatgaccttgaacatgaaaacaacaaaaagggcctggtcactgtagaagatgagcaggcgtggatggcatcttataaatatgtaggtgctaccactaatatccatccatatttgtccacaatgatcaactacgcccagcctgtaaagtttcaaggtttccatgtggcagaagaacgcaatattcattataacatgtcttcttttaatgaatcagtcggtcttggctacttgaagacacatgcaattgaatttgtcaattataacaaacggcaaatgagtcgcatttaccccaagggaggccgagtcgattccagtaattacatgcctcagattttctggaacgctggctgccagatggtttcactgaactatcaaaccccagatttagcgatgcaattgaatcagggaaaatttgagtataatggatcgtgcgggtaccttctcaaaccagatttcatgaggcggcctgatcgaacatttgaccccttctctgaaactcctgttgatggtgttattgcagccacttgctcagtgcaggttatatcaggtcaattcttatcagataagaaaattggcacctacgtagaggtggatatgtatgggttgcccactgacaccatacgtaaggaattccgaactcgcatggttatgaataatggactcaatccagtttacaatgaagagtcatttgtatttcggaaggtgatcctgccggacctggctgtcttgagaatagctgtgtatgatgataacaacaagctgattggccagaggatcctcccgcttgatggcctccaagccggatatcgacacatttcccttcgaaatgagggaaataaaccattatcactaccaacaattttctgcaatattgttcttaaaacatatgtgcctgatggatttggagatatcgtggatgctttatcagatccaaagaaatttctctcaattacagaaaagagagcagaccaaatgagagctatgggcattgaaactagtgacatagccgacgtgcccagtgacacttccaaaaatgacaagaaaggaaaggccaacaccgccaaagcaaatgtgacccctcagagtagctctgagctcagaccaaccaccacggctgccctggcctctggtgtggaagccaagaaaggtattgaacttatccctcaagtaaggatagaagacttaaagcagatgaaggcttacttgaagcatttaaagaaacagcagaaggagctaaattctttaaagaagaaacatgcaaaggaacacagtaccatgcagaagttacactgcacgcaagttgacaaaattgtggcacagtatgacaaagagaagtcgactcatgagaaaatcctagagaaggcaatgaagaagaaggggggaagtaattgtctcgaaatgaaaaaagaaacagaaatcaaaattcagacgctgacatcagatcacaaatctaaggtcaaagagattgtagcacagcacacaaaggaatggtcagaaatgatcaatacccacagtgctgaggagcaagaaatccgagacctgcacctcagccagcagtgtgagctgctgaaaaagctactcatcaatgcccacgagcagcaaacccagcagctgaaactgtcccatgacagggaaagcaaggaaatgcgagcacaccaggctaagatttctatggaaaatagcaaagccatcagccaagataaatctatcaagaataaagcagaacgggaaaggcgagtcagggagttaaacagcagcaacactaaaaagtttctggaagaaagaaagagacttgccatgaagcagtccaaagaaatggatcagttgaaaaaagtccagcttgaacatctagaattcctagagaaacagaatgagcaggcgaaggagatgcagcagatggtgaaattggaagccgagatggaccgcagaccagcaacagtagtatgaaactccaaaatgcaaactgaagcagcaaacccacaaagcatcaaaagactcactcacaaacttctgaacacaaactccatggatgaaagctgtttattttgtttcctttatgtgtaaacaagatgatatctgaaaccagagagacttggaatgtctgactgacttctatttaacagcttgagtattgcatttccttggccaaacaaaaatagctacaaatccacaaaaatttactattccagtaaggcagagtccaaccattgataatacaacttaaacatgtttgctataaaataccatcacaagtaaatgagcttggtgtgaacaactctcctttgtgatgccttaggacatgtttgaactgcagcaaaaaacaaaaacaaaaaacagtgcattagcaatttcatagcaagtgcatgcactaggaaaagaaaactctgtctacaagtttattagcagaagtggtggtctgctagacaaataattttgcaaaatttttctacatctaagttacctcatcagtaagtgccatgtctctaccatgccatcagaggctaatttcctgtaaaagttgtggaaattgttagaacaatagaaaaatagagcagtgtatgtgtgccaaaactcatcattactcaaaggagaactgtgttaggcacatttaagaaagtttacatctgacattgctttataggaattgtttctgcagattccggatattataattcacaccataaagattgtgaagtggttattggcaaacgtttgtaaatgtgaccatgtataaagtatttatactctttaattcacactgttagagagcaaaatcatctaagtattgccacatgacaagattagtaaacaggaatactagaactatgtttgcatgatacacaagcaccaataaagactaatccatacacagttaacctaatgccaaataaatactggttaaataaatgtatggcacagaatataatttgactatcaagacttttagcataatgaaaaaccctctctctatatatatatgtgtatatgaattatgtgggcattcttgatacttcaagttctagtttgaaaaaaatacataactaatttaattttacacaaaaatatttatgcagattttcagaatttcatatcaggaaatgacctttttatgtctgttaaatatcaaaacaatttgctacagtgttaatctgcatggtctttaagcctgctgtagttgagttgcagacagtgcatgaaaaagtattccgctgggaattgagccatgccaccaaagccaagaggagcgcatggaaacccggtagtctagaactaatcagattactgattttagggcacagcaccagatgaattgttgtatatgcttgtaaaaattgattctgtgtgttcctctgaacaaagcggagaaaatgatgataccatcaatattgaaattaaacttccaacttctctaataaaaaattaaaacacgcataacactcgtcaagagtatttgctcccaagacacattctagcaaatgttttgcctttttcatatacatgatatcatcgttattttcaaagggggcttattaataccctcagcatgtttttcacccaaatgatgcaaaacatgcagattctagttgacttcagttgtaatagacttgtttttctcctatttatgatttgaagtggattctgtaaaatatctcttgttcttagtttccttatctgtaaaacagtggagttagactacatatcttttggcactaacatctcatgaaaaattatggttaataaaatatcaccacatttggattgccaattttcaaagattctgagtggcttctcatcatcaaatcaaatcaaatccaagagctcaactatgctcaccattctgtaacacttgactgaattcatcacttgcctcctcttgtttctgctttggagaggtactactagtttttccatttttcttatttcttccctcttttcatcctcctaggccaccataagcatttatattttccagtgttatacatggaaccagtttgtttttctttgatccaggttacttttagtatttgagacatcataccattaatccattgtagtaggattaaaatgtacacacaactcaaatgtgcaacaaaagcatgtgttacctgctattgtcagttcatattgcactcaaaccttgcattatcccttattatgaagaaaaattaatagccaattaaagtaactcagtgtcttcca

SEQ ID NO: 22463 - DNA, 595 bp, Homo sapiens
  source 1..595: mol_type = unassigned DNA
ctgtgacaagcgtttgctgtatttgttgttcgacttagggtagttgaaagagtctctctcagccactctctctggatattttgttgtggctgtgggcactgtttgcccagcctctcactttgtagcggaggggtgggactctgcgtgaaaggaccagcgttatagtccctggcttctccggctaattcatcccgaggctcctgccccttcccattctggaaggggcgagcttatcctagacctgtgactgcctctgaagttctccacctgcctcaggcgtgctctccagtgcctgtttctgactgagtgaggttgaaatcctactgactccttttcagaggacagtgctgctgtgagtttgacgaagtggacatcacctgcagtcagtccagagctgcccagtcttgaatataatcatggccaaaccttatgaatttaactggcagaaggaagttccctcctttttgcaagaaggagcagtttttgacagatacgaggaggaatcctttgtgtttgaacccaactgcctcttcaaagtggatgagtttggcttctttctgacatggagaagtgaaggcaaggaaggacaggtgct

SEQ ID NO: 22464 - DNA, 484 bp, Homo sapiens
  source 1..484: mol_type = unassigned DNA
acacgcacacgcacacacgggcgcgcacacacacgcgcgtacacactgggtctccaggcagcggccgtcgccgcatccccggcagcagctccaggcaaagtgacaggaaaagacaatttctctctgattcagaatcctgaaaatgtgatctcccttaaaaagaggacagtgctgctgtgagtttgacgaagtggacatcacctgcagtcagtccagagctgcccagtcttgaatataatcatggccaaaccttatgaatttaactggcagaaggaagttccctcctttttgcaagaaggagcagtttttgacagatacgaggaggaatcctttgtgtttgaacccaactgcctcttcaaagtggatgagtttggcttctttctgacatggagaagtgaaggcaaggaaggacaggtgctagaatgctccctcatcaacagtattcggtcgggagccataccaaaggatcccaaaatcttggctg

SEQ ID NO: 22465 - DNA, 505 bp, Homo sapiens
  source 1..505: mol_type = unassigned DNA
gcgggggacgcgcagggcccggcggtgggcgggcgggtcggcgctgccccgtgggctcgctggggagccacggcggagacccccgccctcaactgagaggacagtgctgctgtgagtttgacgaagtggacatcacctgcagtcagtccagagctgcccagtcttgaatataatcatggccaaaccttatgaatttaactggcagaaggaagttccctcctttttgcaagaaggagcagtttttgacagatacgaggaggaatcctttgtgtttgaacccaactgcctcttcaaagtggatgagtttggcttctttctgacatggagaagtgaaggcaaggaaggacaggtgctagaatgctccctcatcaacagtattcggtcgggagccataccaaaggatcccaaaatcttggctgctcttgaagctgttggaaaatcagaaaatgatctggaagggcggatagtttgtgtctgcagtggcacagatctagtgaacattagt

SEQ ID NO: 22466 - DNA, 2769 bp, Homo sapiens
  source 1..2769: mol_type = unassigned DNA
cgcgtccccagaagggggcggggagagacgagggttggcgggctcagggggcgggggcgcagggcagcgggggcggggcggtgtcccgggaccacccccggcctcctcccaccgcggtccattcaggtccctgcaccgcactccgctcggaccccaggccgccggtgctgtcgctactcaagtgagtcccgcggtgcccctcccgccgcgccgcccgtcgggcatggactcgggccgggacttcctgaccctgcacggcctacaggatgatgaggatctacaggcgctgctgaagggcagccagctcctgaaggtgaagtccagctcatggaggagagagcgcttctacaagttgcaggaggactgcaagaccatctggcaggagtcccgcaaggtcatgcggaccccggagtcccagctgttctccatcgaggacattcaggaggtgcgaatggggcaccgcacggagggtctggagaagttcgcccgtgatgtgcccgaggaccgctgcttctccattgtcttcaaggaccagcgcaatacactagacctcatcgccccatcgccagctgatgcccagcactgggtgctggggctgcacaagatcatccaccactcaggctccatggaccagcgtcagaagctacagcactggattcactcctgcttgcgaaaagctgacaaaaacaaggacaacaagatgagcttcaaggagctgcagaacttcctgaaggagctcaacatccaggtggacgacagctatgcccggaagatcttcagggagtgtgaccactcccagacagactccctggaggacgaggagattgaggccttctacaagatgctgacccagcgggtggagatcgaccgcaccttcgccgaggccgcgggctcaggggagactctgtcggtggatcagttagtgacgttcctgcagcaccagcagcgggaggaggcggcagggcctgcgctggccctctccctcattgagcgctacgagcccagcgagactgccaaggcgcagcggcagatgaccaaggacggcttcctcatgtacttactgtcggctgacggcagcgccttcagcctggcacaccgccgtgtctaccaggacatgggccagccacttagccactacctggtgtcctcttcacacaacacctacctgctggaggaccagctagccgggcccagcagcactgaagcctacatccgggcactgtgcaaaggctgccgatgcctggagcttgactgctgggacgggcccaaccaggaaccaatcatctaccacggctatactttcacttccaagatcctcttctgcgatgtgctcagggccatccgggactatgccttcaaggcgtccccctaccctgtcatcctatccctggagaaccactgcacactggagcagcagcgcgtgatggcgcggcacctgcatgccatcctgggccccatgctgttgaaccgaccactggatggggtcaccaacagcctgccctcccctgagcaactgaaggggaagatcctgctgaaggggaagaagctcggggggctcctgccccctggaggggagggtggccctgaggccactgtggtgtcagacgaagacgaggctgctgagatggaggatgaggcagtgaggagccgtgtgcagcacaagcccaaggaggacaagctcaggctagcacaggagctctctgacatggtcatttactgcaagagtgtccactttgggggcttctccagtcctggcacccctggacaggccttctacgagatggcgtccttctctgagaaccgtgcccttcgactgctccaagaatcaggaaacggctttgtccgccacaacgtggggcacctgagcagaatctacccggctggatggagaacagactcctccaactacagccccgtggagatgtggaatgggggctgccagatcgtggccctgaatttccagacacctgggccagagatggacgtgtaccagggccgcttccaggacaacggggcctgtgggtacgtgctgaagcccgccttcctgcgagaccccaacggcacctttaacccccgcgccctggctcaggggccctggtgggcacggaagcggctcaacatcagggtcatttcggggcagcagctgccaaaagtcaacaagaataagaattcaattgtggaccccaaagtgacagtggagatccatggcgtgagccgggacgtggccagccgccagactgctgtcatcaccaacaatggtttcaacccatggtgggacacggagtttgcgtttgaggtagttgtgcctgaccttgccctcatccgcttcttggtggaagattatgatgcctcctccaagaatgacttcattggccagagtaccatccccttgaacagcctcaagcaaggataccgccatgtccacctcatgtctaagaacggggaccagcatccatcagccaccctctttgtgaagatctccctccaggactaggctggaggaagccagtggggtcccccctgagtgggctgggccctctgtccacatgtggggacagggctggtgtggctgctcccagcctcttgctcagagctaggcccccaaattgccttcagccctaacatagtgtctgctgctgcctccctggggaccaggagctagcccagtccctggagctgtccttcattccgttaggaataacactgcagccctctccaccctccggccagcgagtggtcaaggatttttataaaaatcacgataagatt

SEQ ID NO: 22467 - DNA, 2963 bp, Homo sapiens
  source 1..2963: mol_type = unassigned DNA
ttcttctcgtcccgcctcctgtattctgactccccccactcatttactttgcctcggtttcgctctcgcctcaccttcagggggcataggtcccgccgctcgtggactagctccgcctcctagcgtctgactaccccctcagcccagatttccctctcgtcccgcccctccgaagtgcgcccctcctctcgaactctagctcctccctcccattcctggactccgcccctgctcccctccaagggcgacagttccgccccccggaccagagcagagggtgttgtgagcataaaacactggaggcggcactgccccggacccggctccgcgcaggcaggggcactgtggagggccatgcagtgcctggggatccggagccggagccgctccagggagctctacctgcaggagcggagccttaaggtggcggcgctcaatggacggaggctgggcctacaggatgatgaggatctacaggcgctgctgaagggcagccagctcctgaaggtgaagtccagctcatggaggagagagcgcttctacaagttgcaggaggactgcaagaccatctggcaggagtcccgcaaggtcatgcggaccccggagtcccagctgttctccatcgaggacattcaggaggtgcgaatggggcaccgcacggagggtctggagaagttcgcccgtgatgtgcccgaggaccgctgcttctccattgtcttcaaggaccagcgcaatacactagacctcatcgccccatcgccagctgatgcccagcactgggtgctggggctgcacaagatcatccaccactcaggctccatggaccagcgtcagaagctacagcactggattcactcctgcttgcgaaaagctgacaaaaacaaggacaacaagatgagcttcaaggagctgcagaacttcctgaaggagctcaacatccaggtggacgacagctatgcccggaagatcttcagggagtgtgaccactcccagacagactccctggaggacgaggagattgaggccttctacaagatgctgacccagcgggtggagatcgaccgcaccttcgccgaggccgcgggctcaggggagactctgtcggtggatcagttagtgacgttcctgcagcaccagcagcgggaggaggcggcagggcctgcgctggccctctccctcattgagcgctacgagcccagcgagactgccaaggcgcagcggcagatgaccaaggacggcttcctcatgtacttactgtcggctgacggcagcgccttcagcctggcacaccgccgtgtctaccaggacatgggccagccacttagccactacctggtgtcctcttcacacaacacctacctgctggaggaccagctagccgggcccagcagcactgaagcctacatccgggcactgtgcaaaggctgccgatgcctggagcttgactgctgggacgggcccaaccaggaaccaatcatctaccacggctatactttcacttccaagatcctcttctgcgatgtgctcagggccatccgggactatgccttcaaggcgtccccctaccctgtcatcctatccctggagaaccactgcacactggagcagcagcgcgtgatggcgcggcacctgcatgccatcctgggccccatgctgttgaaccgaccactggatggggtcaccaacagcctgccctcccctgagcaactgaaggggaagatcctgctgaaggggaagaagctcggggggctcctgccccctggaggggagggtggccctgaggccactgtggtgtcagacgaagacgaggctgctgagatggaggatgaggcagtgaggagccgtgtgcagcacaagcccaaggaggacaagctcaggctagcacaggagctctctgacatggtcatttactgcaagagtgtccactttgggggcttctccagtcctggcacccctggacaggccttctacgagatggcgtccttctctgagaaccgtgcccttcgactgctccaagaatcaggaaacggctttgtccgccacaacgtggggcacctgagcagaatctacccggctggatggagaacagactcctccaactacagccccgtggagatgtggaatgggggctgccagatcgtggccctgaatttccagacacctgggccagagatggacgtgtaccagggccgcttccaggacaacggggcctgtgggtacgtgctgaagcccgccttcctgcgagaccccaacggcacctttaacccccgcgccctggctcaggggccctggtgggcacggaagcggctcaacatcagggtcatttcggggcagcagctgccaaaagtcaacaagaataagaattcaattgtggaccccaaagtgacagtggagatccatggcgtgagccgggacgtggccagccgccagactgctgtcatcaccaacaatggtttcaacccatggtgggacacggagtttgcgtttgaggtagttgtgcctgaccttgccctcatccgcttcttggtggaagattatgatgcctcctccaagaatgacttcattggccagagtaccatccccttgaacagcctcaagcaaggataccgccatgtccacctcatgtctaagaacggggaccagcatccatcagccaccctctttgtgaagatctccctccaggactaggctggaggaagccagtggggtcccccctgagtgggctgggccctctgtccacatgtggggacagggctggtgtggctgctcccagcctcttgctcagagctaggcccccaaattgccttcagccctaacatagtgtctgctgctgcctccctggggaccaggagctagcccagtccctggagctgtccttcattccgttaggaataacactgcagccctctccaccctccggccagcgagtggtcaaggatttttataaaaatcacgataagatt

SEQ ID NO: 22468 - DNA, 7992 bp, Homo sapiens
  source 1..7992: mol_type = unassigned DNA
cgctgggcaacgtgggcaacgcggcgggcggcgggctcgcgcggcgggaggggcagcggcggcgcgcccgggctctacctcccgggctctgcctcccgggctctgcctctcgggcacttgcctggctcctgcgcgttcctgggcatcggctctgcagctgacacacagtagcggggacacccgacgccgctagcgacaggcgcgcggacggctggtcccagagggacgctgcgcttggggacgccggcgagactcgccaggagccaagaggaaacaggaatcattcaaactggattttaaaatcattgcaaatcagtgatggatcagaagttgcagagtgcaatcccgagtaaaagtcttcaaaaaattttgcttcaggtaacagaggaaggaaaattgatctaccaccttaaaaccctgatctagaaaaaatatatattcatgataggaagttataactaagaaaatttatttgcctcttaatgctcctgaatgaaaggaattatccctttgttctttgggaggacttgtgtatctgagattgttgtaataatcagtcattttattaaaaccttgacatgatcaccagggaggaaaaatagagcaatagtcaaaacctgtgtgttagtccaagatgacttctgaagaaatgacagcttctgttctcatacctgtgactcagagaaaagtggtttctgcccagtcggctgcagatgaaagtagtgaaaaggtctcagacatcaatatttcaaaagcacatactgtcagacgaagtggggagacttctcataccatctcacaactgaacaaacttaaagaagaaccttctggaagcaacttgccaaagattctctcaatagcgagggagaaaatagtgagtgatgagaacagtaatgaaaaatgttgggagaaaatcatgccagattctgcgaaaaaccttaacattaactgcaacaacatattgagaaaccatcagcatggccttcctcagagacaattttatgaaatgtacaactctgttgctgaggaagacttgtgtttagaaactggaattccttctccactggaaagaaaggtgttccctggaattcaactggaactagacagaccttccatgggcattagtcctttaggaaatcagtcagtgatcatagagacaggcagagcacaccctgacagcagaagggcagtatttcattttcattatgaagttgacagaagaatgtcagacactttctgtaccctatcagaaaacttaattttagacgattgtggaaattgtgtaccactacctgggggtgaggagaagcaaaagaaaaactatgtggcatatacctgtaaactgatggaattggccaaaaattgtgataataagaatgagcagctgcagtgtgatcattgtgacaccttgaatgataaatacttttgctttgaaggctcttgtgagaaggttgacatggtatattcaggtgatagcttttgtaggaaagactttactgacagtcaagctgccaagacctttttgagccattttgaggacttccctgataattgtgatgatgtagaagaagacgcttttaaaagcaaaaaggagcgatccactttgttagtcaggagattctgtaaaaatgacagagaagttaagaaatctgtgtatactggaacaagagcaattgtgagaactctgccttctggccacattgggctgactgcatggagttacatagatcagaagagaaatggtcccttactgccttgtgggagagtaatggaacccccgtcaacagtggagataaggcaagatgggagccaacgtctgtcagaagcccagtggtatcctatctacaatgcagtgagaagagaagaaacagaaaatacagttggatctctactccatttcctcaccaagctcccagcctccgagacagcccatggaaggataagcgttggtccatgcttaaagcaatgtgtccgagacactgtatgtgagtatcgcgccaccctccaaaggacttcaatatcgcagtacatcaccggttctctcctagaagcaaccacgtctttgggagcaagaagtggccttctcagtacttttggaggatccactggacgaatgatgctgaaagaacgccagccaggcccctctgtggccaattccaatgccctcccttcaagttcagctgggatcagcaaggagctgatcgatctgcagcctctcatccagttcccagaggaagtcgccagcatcctgatggagcaagagcagactatttaccgcagggtcttgccagtcgactacctttgcttcttaacacgggacttgggcactcctgaatgccagagctccttgccctgcctcaaagcatccatctcagcgtcgattcttaccactcagaatggagagcacaatgcccttgaagatctggtgatgaggtttaatgaggtgagctcctgggtgacatggctgatcctcacggcaggctccatggaggagaagcgagaagtcttttcatatttggtgcatgtggccaaatgctgctggaacatgggcaactacaacgctgtcatggagttcttggctggcctcaggtcaagaaaagttttaaaaatgtggcagttcatggaccagtctgatattgagaccatgaggagcctgaaggatgctatggcccagcatgagtcctcttgtgagtacagaaaggtggtgacacgtgccctgcacatccctggctgtaaggtggttccattctgtggggtgtttctgaaggagctctgtgaagtgcttgacggcgcctccggtctcatgaagctttgcccgcggtacaattcccaagaagaaactttagagtttgtagcagattacagtggacaagataatttcttacaacgagtgggacaaaatggcttaaagaattcggagaaggagtccactgtcaacagcatctttcaggtcatccggagctgcaatcgaagtctggagacagacgaggaggacagccccagtgaaggaaacagctccaggaaaagctccttgaaggataaaagccgatggcagtttataattggagatttgttggattcagacaatgacatctttgagcaatccaaagaatacgactctcatggttcagaggactcacagaaggccttcgaccatgggacggagctcatcccttggtacgtgctgtccatccaagccgatgtgcaccagttcctgctgcagggggccacggtcatccactacgaccaggacacacacctctctgcccgctgcttcctccagcttcagcccgacaatagcaccttgacctgggtaaagcccacaactgcctccccagccagcagtaaagcaaaacttggtgtacttaataacacagctgagcctggaaaattcccactactgggtaatgctggattaagtagcctgacggaaggggtcttggatctttttgcagtgaaggctgtatacatgggccaccctggcattgatatacacactgtgtgtgttcagaacaaactgggtagcatgttcctgtcagagactggtgtgacattgctctatgggcttcagaccacagacaacagattattgcacttcgtggcaccaaagcacacagctaaaatgctcttcagcggattattggaactcactagagctgtgagaaagatgaggaaattccctgaccaaagacagcagtggctgcggaaacagtacgtcagcctttatcaggaggatggacggtatgaaggcccaactttggctcacgctgtggagttgtttggtggcagacggtggagtgctcgaaaccccagccccggaacatcagcaaagaatgctgagaagcccaatatgcagagaaacaataccctgggcataagcactaccaagaaaaagaagaaaatcctcatgaggggtgagagtggagaggtaactgacgatgagatggcaacccgaaaggccaagatgcacaaagagtgtcgaagccggagtggttctgatcctcaagacattaatgaacaagaagaatcagaggtgaatgccatcgctaaccctccaaaccccctcccttccagaagagcccactctttgaccacagctgggtcccccaacttggctgccgggacgtcatctcccatcaggccagtgtcctcccctgtgctgtcttcttcaaacaagagcccatccagtgcttggagcagtagtagctggcacgggcggatcaaaggcggcatgaagggatttcagagcttcatggtttcagatagcaacatgagttttgttgaatttgttgagctgttcaaatcattcagtgtcaggagccgcaaggacctgaaggatctgtttgatgtctatgcagtgccctgcaaccgatctggctccgagtcagccccactctacaccaacctgacaattgatgaaaacaccagcgatcttcagcctgacctagatctgttgaccagaaatgtctcggatttggggttgttcattaagagtaaacagcagctatcggacaaccagaggcagatatctgatgccattgctgctgcaagcattgtgacaaatggcactgggattgagagcacatctctgggcatttttggggtgggcatacttcagctcaacgatttcctcgtgaattgccaaggagaacactgcacttatgatgaaatcctcagcatcatccagaagttcgagcctagcatcagtatgtgtcatcagggactaatgtcatttgaagggtttgccaggtttctgatggataaagaaaattttgcctcaaaaaatgatgagtcacaggagaacattaaagaactgcagctacccctctcatactattacatcgaatcttcgcacaatacctacctcacgggccatcagctcaaaggagaatcctcggtagaactctacagccaggtccttttgcaaggctgtcgaagtgtagaattggactgctgggacggagacgatgggatgcccatcatttatcatggacatacgctgacaaccaagatccccttcaaggaagtggttgaagccattgatcgcagtgccttcatcaactctgacctgccaatcatcatatcgattgagaaccactgttcattgcctcagcaacgaaaaatggcagaaattttcaagactgtgtttggagaaaagctggtgactaaattcttatttgagactgatttctcagatgatccaatgcttccttcacctgaccaactcagaaagaaagttcttcttaaaaacaagaagctaaaagcccatcagacgccagtggatatcttaaagcaaaaggctcatcagttagcatctatgcaagtgcaggcttataatggtgggaatgccaacccccgacctgccaataatgaggaagaggaagatgaggaggacgaatatgattatgactatgaatccctttctgatgacaacattctggaagacagacctgaaaataaatcatgtaatgacaagcttcagtttgaatataatgaagaaatcccaaagaggataaagaaagcagataactctgcttgcaacaaaggaaaggtttatgatatggaactgggagaagaattttatcttgatcagaataaaaaggaaagcagacagattgcaccagagctttctgaccttgtaatctattgtcaagcagtaaaatttccaggactgtcaactctaaatgcatctggctctagcagaggaaaagaaaggaaaagcaggaagtccatttttggcaacaatccgggcagaatgagcccaggggagacagcatcatttaacaaaacatctggaaaaagttcctgtgaaggcattcgacagacctgggaggaatcttcttcccctctcaacccaaccacgtccctcagtgctatcattagaactcccaaatgttatcatatctcgtcgctgaatgaaaatgccgccaaacgtctgtgtcgcaggtattctcagaaactgacccagcacaccgcctgtcagctgctgagaacttaccctgctgccacccgcatcgactcttccaacccgaaccccctcatgttctggctccatgggatacagcttgtggcactcaactaccagactgatgatctccctttacatttaaatgctgcaatgtttgaggcaaatggtggttgtggttatgtattgaaacctccagttctgtgggacaagaactgccccatgtatcagaagttttctccactagaaagagatctggacagcatggatcctgcagtctattctttaactattgtctctggtcagaatgtgtgccccagtaatagcatgggaagcccgtgcattgaagtcgacgtcctgggcatgcctctggacagctgccatttccgcacaaagcccatccatcgaaacaccctgaaccccatgtggaacgagcagtttctgttccacgttcacttcgaagatcttgtatttcttcgttttgcagttgtggaaaacaatagttcagcggtaactgctcagagaatcattccactgaaagctttaaaacgaggatatcgacatcttcagctgcgaaaccttcacaatgaagtcttggagatttctagtttattcattaacagcagaaggatggaagaaaattcctctggcaataccatgtcagcctcttcgatgtttaatacagaagaaagaaaatgtttgcagactcacagagtcacggtgcatggggtcccagggccagagccctttaccgttttcactattaatggaggcaccaaggcaaagcagcttctgcagcaaattctgacaaatgaacaagacatcaaacctgttaccacagactattttttgatggaagaaaaatattttatatctaaagaaaagaatgaatgtaggaaacaaccattccagagagccattggtccagaagaggagatcatgcaaattttaagcagctggtttccagaagagggatacatgggcaggattgtcttaaaaacccagcaggaaaacctagaagagaaaaacattgttcaagatgacaaagaggtgatcttgagctcagaggaggagagtttctttgtccaagtgcatgatgtttctccagagcaacctcgaacagtcatcaaagcaccccgcgtcagcactgcacaggatgtcattcagcagaccttatgcaaagccaaatattcctacagcatcctgagcaaccccaatccaagcgactatgtgcttttggaagaggtggtgaaagacactaccaacaagaagactaccacaccaaagtcctctcagcgggtccttctggatcaggagtgtgtgtttcaagcccaaagcaagtggaaaggtgcaggaaaattcatccttaagctaaaggagcaggtgcaggcatctcgagaagataaaaagaaaggcatttctttcgcaagtgaactcaagaagctcaccaagtcaactaaacagccccgaggacttacatcaccttctcagctcttgacctcagaaagtatccaaaccaaggaggagaaacctgtgggtggcttgtcctccagtgacacaatggattaccgacagtgactaagggcagcatgtttaacccaggtgaagatctttaagcaagaagttaaagagtgaacatggtggaaaaaatataattattttcatcagacttaaactggaaattgatgatttctgaactgaagccttcacacatgtgagatccatgctgaggagaagcaaaatggcacagggctagttgccaccaaccaatttactgatgaatgaagcccaggggactgccattttataaatgtcagcagttggaaaaatcgtcacgaattgacttagagcaagggtcagcaagcttgtctgtaaagggccaaacagtaaatattttagggctgggggccataaaatatgttgcaaccacccaattctgccattgtagtgcaaaagcagccatagacaacacatacatgaacgaacgtggctgtattccaataaaactttatttatggacactgaaa

SEQ ID NO: 22469 - DNA, 6514 bp, Homo sapiens
  source 1..6514: mol_type = unassigned DNA
atggtttcagaaggaagtgcagcaggaagagactttgcaggaatggaagaggtgaggcagctccacgtgagattctgcaaagggattaagatttggcaccaggcttggtttctgtgcagcctcttaggcagagagccccaggagagggaagcaggctgtcagctgtggctttgcacgctctcagctgtcttgaaggttggttggctcttcccgctctctgaggtacccaattttaccttgttaaaggatggatgtggatgctggaggcttaaagaagaccagatctacaatgcagtgagaagagaagaaacagaaaatacagttggatctctactccatttcctcaccaagctcccagcctccgagacagcccatggaaggataagcgttggtccatgcttaaagcaatgtgtccgagacactgtatgtgagtatcgcgccaccctccaaaggacttcaatatcgcagtacatcaccggttctctcctagaagcaaccacgtctttgggagcaagaagtggccttctcagtacttttggaggatccactggacgaatgatgctgaaagaacgccagccaggcccctctgtggccaattccaatgccctcccttcaagttcagctgggatcagcaaggagctgatcgatctgcagcctctcatccagttcccagaggaagtcgccagcatcctgatggagcaagagcagactatttaccgcagggtcttgccagtcgactacctttgcttcttaacacgggacttgggcactcctgaatgccagagctccttgccctgcctcaaagcatccatctcagcgtcgattcttaccactcagaatggagagcacaatgcccttgaagatctggtgatgaggtttaatgaggtgagctcctgggtgacatggctgatcctcacggcaggctccatggaggagaagcgagaagtcttttcatatttggtgcatgtggccaaatgctgctggaacatgggcaactacaacgctgtcatggagttcttggctggcctcaggtcaagaaaagttttaaaaatgtggcagttcatggaccagtctgatattgagaccatgaggagcctgaaggatgctatggcccagcatgagtcctcttgtgagtacagaaaggtggtgacacgtgccctgcacatccctggctgtaaggtggttccattctgtggggtgtttctgaaggagctctgtgaagtgcttgacggcgcctccggtctcatgaagctttgcccgcggtacaattcccaagaagaaactttagagtttgtagcagattacagtggacaagataatttcttacaacgagtgggacaaaatggcttaaagaattcggagaaggagtccactgtcaacagcatctttcaggtcatccggagctgcaatcgaagtctggagacagacgaggaggacagccccagtgaaggaaacagctccaggaaaagctccttgaaggataaaagccgatggcagtttataattggagatttgttggattcagacaatgacatctttgagcaatccaaagaatacgactctcatggttcagaggactcacagaaggccttcgaccatgggacggagctcatcccttggtacgtgctgtccatccaagccgatgtgcaccagttcctgctgcagggggccacggtcatccactacgaccaggacacacacctctctgcccgctgcttcctccagcttcagcccgacaatagcaccttgacctgggtaaagcccacaactgcctccccagccagcagtaaagcaaaacttggtgtacttaataacacagctgagcctggaaaattcccactactgggtaatgctggattaagtagcctgacggaaggggtcttggatctttttgcagtgaaggctgtatacatgggccaccctggcattgatatacacactgtgtgtgttcagaacaaactgggtagcatgttcctgtcagagactggtgtgacattgctctatgggcttcagaccacagacaacagattattgcacttcgtggcaccaaagcacacagctaaaatgctcttcagcggattattggaactcactagagctgtgagaaagatgaggaaattccctgaccaaagacagcagtggctgcggaaacagtacgtcagcctttatcaggaggatggacggtatgaaggcccaactttggctcacgctgtggagttgtttggtggcagacggtggagtgctcgaaaccccagccccggaacatcagcaaagaatgctgagaagcccaatatgcagagaaacaataccctgggcataagcactaccaagaaaaagaagaaaatcctcatgaggggtgagagtggagaggtaactgacgatgagatggcaacccgaaaggccaagatgcacaaagagtgtcgaagccggagtggttctgatcctcaagacattaatgaacaagaagaatcagaggtgaatgccatcgctaaccctccaaaccccctcccttccagaagagcccactctttgaccacagctgggtcccccaacttggctgccgggacgtcatctcccatcaggccagtgtcctcccctgtgctgtcttcttcaaacaagagcccatccagtgcttggagcagtagtagctggcacgggcggatcaaaggcggcatgaagggatttcagagcttcatggtttcagatagcaacatgagttttgttgaatttgttgagctgttcaaatcattcagtgtcaggagccgcaaggacctgaaggatctgtttgatgtctatgcagtgccctgcaaccgatctggctccgagtcagccccactctacaccaacctgacaattgatgaaaacaccagcgatcttcagcctgacctagatctgttgaccagaaatgtctcggatttggggttgttcattaagagtaaacagcagctatcggacaaccagaggcagatatctgatgccattgctgctgcaagcattgtgacaaatggcactgggattgagagcacatctctgggcatttttggggtgggcatacttcagctcaacgatttcctcgtgaattgccaaggagaacactgcacttatgatgaaatcctcagcatcatccagaagttcgagcctagcatcagtatgtgtcatcagggactaatgtcatttgaagggtttgccaggtttctgatggataaagaaaattttgcctcaaaaaatgatgagtcacaggagaacattaaagaactgcagctacccctctcatactattacatcgaatcttcgcacaatacctacctcacgggccatcagctcaaaggagaatcctcggtagaactctacagccaggtccttttgcaaggctgtcgaagtgtagaattggactgctgggacggagacgatgggatgcccatcatttatcatggacatacgctgacaaccaagatccccttcaaggaagtggttgaagccattgatcgcagtgccttcatcaactctgacctgccaatcatcatatcgattgagaaccactgttcattgcctcagcaacgaaaaatggcagaaattttcaagactgtgtttggagaaaagctggtgactaaattcttatttgagactgatttctcagatgatccaatgcttccttcacctgaccaactcagaaagaaagttcttcttaaaaacaagaagctaaaagcccatcagacgccagtggatatcttaaagcaaaaggctcatcagttagcatctatgcaagtgcaggcttataatggtgggaatgccaacccccgacctgccaataatgaggaagaggaagatgaggaggacgaatatgattatgactatgaatccctttctgatgacaacattctggaagacagacctgaaaataaatcatgtaatgacaagcttcagtttgaatataatgaagaaatcccaaagaggataaagaaagcagataactctgcttgcaacaaaggaaaggtttatgatatggaactgggagaagaattttatcttgatcagaataaaaaggaaagcagacagattgcaccagagctttctgaccttgtaatctattgtcaagcagtaaaatttccaggactgtcaactctaaatgcatctggctctagcagaggaaaagaaaggaaaagcaggaagtccatttttggcaacaatccgggcagaatgagcccaggggagacagcatcatttaacaaaacatctggaaaaagttcctgtgaaggcattcgacagacctgggaggaatcttcttcccctctcaacccaaccacgtccctcagtgctatcattagaactcccaaatgttatcatatctcgtcgctgaatgaaaatgccgccaaacgtctgtgtcgcaggtattctcagaaactgacccagcacaccgcctgtcagctgctgagaacttaccctgctgccacccgcatcgactcttccaacccgaaccccctcatgttctggctccatgggatacagcttgtggcactcaactaccagactgatgatctccctttacatttaaatgctgcaatgtttgaggcaaatggtggttgtggttatgtattgaaacctccagttctgtgggacaagaactgccccatgtatcagaagttttctccactagaaagagatctggacagcatggatcctgcagtctattctttaactattgtctctggtcagaatgtgtgccccagtaatagcatgggaagcccgtgcattgaagtcgacgtcctgggcatgcctctggacagctgccatttccgcacaaagcccatccatcgaaacaccctgaaccccatgtggaacgagcagtttctgttccacgttcacttcgaagatcttgtatttcttcgttttgcagttgtggaaaacaatagttcagcggtaactgctcagagaatcattccactgaaagctttaaaacgaggatatcgacatcttcagctgcgaaaccttcacaatgaagtcttggagatttctagtttattcattaacagcagaaggatggaagaaaattcctctggcaataccatgtcagcctcttcgatgtttaatacagaagaaagaaaatgtttgcagactcacagagtcacggtgcatggggtcccagggccagagccctttaccgttttcactattaatggaggcaccaaggcaaagcagcttctgcagcaaattctgacaaatgaacaagacatcaaacctgttaccacagactattttttgatggaagaaaaatattttatatctaaagaaaagaatgaatgtaggaaacaaccattccagagagccattggtccagaagaggagatcatgcaaattttaagcagctggtttccagaagagggatacatgggcaggattgtcttaaaaacccagcaggaaaacctagaagagaaaaacattgttcaagatgacaaagaggtgatcttgagctcagaggaggagagtttctttgtccaagtgcatgatgtttctccagagcaacctcgaacagtcatcaaagcaccccgcgtcagcactgcacaggatgtcattcagcagaccttatgcaaagccaaatattcctacagcatcctgagcaaccccaatccaagcgactatgtgcttttggaagaggtggtgaaagacactaccaacaagaagactaccacaccaaagtcctctcagcgggtccttctggatcaggagtgtgtgtttcaagcccaaagcaagtggaaaggtgcaggaaaattcatccttaagctaaaggagcaggtgcaggcatctcgagaagataaaaagaaaggcatttctttcgcaagtgaactcaagaagctcaccaagtcaactaaacagccccgaggacttacatcaccttctcagctcttgacctcagaaagtatccaaaccaaggaggagaaacctgtgggtggcttgtcctccagtgacacaatggattaccgacagtgactaagggcagcatgtttaacccaggtatagtaagtcattgcaccatcctggaacagggcttaacttaaactactttgtaaggaaggcataattagtacaatgtcttttatcttttccaacaggaggatgtcccttgaaggcaggtaggaatgggaccttaaaacaggaaaagggctctgaagatatgtgtaacatgatatgctattgaacaccgcctataaagaaaaagggaaagaggctgggcgtggtggcgcatgcctgtaatcccagcactttgggaggccaaggcaggcagatcacctgaggtcagttcaagaccagcctgaccaacatggagaaaccccgtctctactaaaaatacaaaattagctgggcatggtggtgcatgcctataatcccagctactggggaggctgaggcaggagaatcacttgaacttggaaggcagaggttgcagtgagctgagatcacaccattgcactccagcctgggcaatgagagtgaaaactccgtctcaaaaaaaaaaaaa

SEQ ID NO: 22470 - DNA, 7563 bp, Homo sapiens
  source 1..7563: mol_type = unassigned DNA
atctaccaccttaaaaccctgatctagaaaaaatatatattcatgataggaagttataactaagaaaatttatttgcctcttaatgctcctgaatgaaaggaattatccctttgttctttgggaggacttgtgtatctgagattgttgtaataatcagtcattttattaaaaccttgacatgatcaccagggaggaaaaatagagcaatagtcaaaacctgtgtgttagtccaagatgacttctgaagaaatgacagcttctgttctcatacctgtgactcagagaaaagtggtttctgcccagtcggctgcagatgaaagtagtgaaaaggtctcagacatcaatatttcaaaagcacatactgtcagacgaagtggggagacttctcataccatctcacaactgaacaaacttaaagaagaaccttctggaagcaacttgccaaagattctctcaatagcgagggagaaaatagtgagtgatgagaacagtaatgaaaaatgttgggagaaaatcatgccagattctgcgaaaaaccttaacattaactgcaacaacatattgagaaaccatcagcatggccttcctcagagacaattttatgaaatgtacaactctgttgctgaggaagacttgtgtttagaaactggaattccttctccactggaaagaaaggtgttccctggaattcaactggaactagacagaccttccatgggcattagtcctttaggaaatcagtcagtgatcatagagacaggcagagcacaccctgacagcagaagggcagtatttcattttcattatgaagttgacagaagaatgtcagacactttctgtaccctatcagaaaacttaattttagacgattgtggaaattgtgtaccactacctgggggtgaggagaagcaaaagaaaaactatgtggcatatacctgtaaactgatggaattggccaaaaattgtgataataagaatgagcagctgcagtgtgatcattgtgacaccttgaatgataaatacttttgctttgaaggctcttgtgagaaggttgacatggtatattcaggtgatagcttttgtaggaaagactttactgacagtcaagctgccaagacctttttgagccattttgaggacttccctgataattgtgatgatgtagaagaagacgcttttaaaagcaaaaaggagcgatccactttgttagtcaggagattctgtaaaaatgacagagaagttaagaaatctgtgtatactggaacaagagcaattgtgagaactctgccttctggccacattgggctgactgcatggagttacatagatcagaagagaaatggtcccttactgccttgtgggagagtaatggaacccccgtcaacagtggagataaggcaagatgggagccaacgtctgtcagaagcccagtggtatcctatctacaatgcagtgagaagagaagaaacagaaaatacagttggatctctactccatttcctcaccaagctcccagcctccgagacagcccatggaaggataagcgttggtccatgcttaaagcaatgtgtccgagacactgtatgtgagtatcgcgccaccctccaaaggacttcaatatcgcagtacatcaccggttctctcctagaagcaaccacgtctttgggagcaagaagtggccttctcagtacttttggaggatccactggacgaatgatgctgaaagaacgccagccaggcccctctgtggccaattccaatgccctcccttcaagttcagctgggatcagcaaggagctgatcgatctgcagcctctcatccagttcccagaggaagtcgccagcatcctgatggagcaagagcagactatttaccgcagggtcttgccagtcgactacctttgcttcttaacacgggacttgggcactcctgaatgccagagctccttgccctgcctcaaagcatccatctcagcgtcgattcttaccactcagaatggagagcacaatgcccttgaagatctggtgatgaggtttaatgaggtgagctcctgggtgacatggctgatcctcacggcaggctccatggaggagaagcgagaagtcttttcatatttggtgcatgtggccaaatgctgctggaacatgggcaactacaacgctgtcatggagttcttggctggcctcaggtcaagaaaagttttaaaaatgtggcagttcatggaccagtctgatattgagaccatgaggagcctgaaggatgctatggcccagcatgagtcctcttgtgagtacagaaaggtggtgacacgtgccctgcacatccctggctgtaaggtggttccattctgtggggtgtttctgaaggagctctgtgaagtgcttgacggcgcctccggtctcatgaagctttgcccgcggtacaattcccaagaagaaactttagagtttgtagcagattacagtggacaagataatttcttacaacgagtgggacaaaatggcttaaagaattcggagaaggagtccactgtcaacagcatctttcaggtcatccggagctgcaatcgaagtctggagacagacgaggaggacagccccagtgaaggaaacagctccaggaaaagctccttgaaggataaaagccgatggcagtttataattggagatttgttggattcagacaatgacatctttgagcaatccaaagaatacgactctcatggttcagaggactcacagaaggccttcgaccatgggacggagctcatcccttggtacgtgctgtccatccaagccgatgtgcaccagttcctgctgcagggggccacggtcatccactacgaccaggacacacacctctctgcccgctgcttcctccagcttcagcccgacaatagcaccttgacctgggtaaagcccacaactgcctccccagccagcagtaaagcaaaacttggtgtacttaataacacagctgagcctggaaaattcccactactgggtaatgctggattaagtagcctgacggaaggggtcttggatctttttgcagtgaaggctgtatacatgggccaccctggcattgatatacacactgtgtgtgttcagaacaaactgggtagcatgttcctgtcagagactggtgtgacattgctctatgggcttcagaccacagacaacagattattgcacttcgtggcaccaaagcacacagctaaaatgctcttcagcggattattggaactcactagagctgtgagaaagatgaggaaattccctgaccaaagacagcagtggctgcggaaacagtacgtcagcctttatcaggaggatggacggtatgaaggcccaactttggctcacgctgtggagttgtttggtggcagacggtggagtgctcgaaaccccagccccggaacatcagcaaagaatgctgagaagcccaatatgcagagaaacaataccctgggcataagcactaccaagaaaaagaagaaaatcctcatgaggggtgagagtggagaggtaactgacgatgagatggcaacccgaaaggccaagatgcacaaagagtgtcgaagccggagtggttctgatcctcaagacattaatgaacaagaagaatcagaggtgaatgccatcgctaaccctccaaaccccctcccttccagaagagcccactctttgaccacagctgggtcccccaacttggctgccgggacgtcatctcccatcaggccagtgtcctcccctgtgctgtcttcttcaaacaagagcccatccagtgcttggagcagtagtagctggcacgggcggatcaaaggcggcatgaagggatttcagagcttcatggtttcagatagcaacatgagttttgttgaatttgttgagctgttcaaatcattcagtgtcaggagccgcaaggacctgaaggatctgtttgatgtctatgcagtgccctgcaaccgatctggctccgagtcagccccactctacaccaacctgacaattgatgaaaacaccagcgatcttcagcctgacctagatctgttgaccagaaatgtctcggatttggggttgttcattaagagtaaacagcagctatcggacaaccagaggcagatatctgatgccattgctgctgcaagcattgtgacaaatggcactgggattgagagcacatctctgggcatttttggggtgggcatacttcagctcaacgatttcctcgtgaattgccaaggagaacactgcacttatgatgaaatcctcagcatcatccagaagttcgagcctagcatcagtatgtgtcatcagggactaatgtcatttgaagggtttgccaggtttctgatggataaagaaaattttgcctcaaaaaatgatgagtcacaggagaacattaaagaactgcagctacccctctcatactattacatcgaatcttcgcacaatacctacctcacgggccatcagctcaaaggagaatcctcggtagaactctacagccaggtccttttgcaaggctgtcgaagtgtagaattggactgctgggacggagacgatgggatgcccatcatttatcatggacatacgctgacaaccaagatccccttcaaggaagtggttgaagccattgatcgcagtgccttcatcaactctgacctgccaatcatcatatcgattgagaaccactgttcattgcctcagcaacgaaaaatggcagaaattttcaagactgtgtttggagaaaagctggtgactaaattcttatttgagactgatttctcagatgatccaatgcttccttcacctgaccaactcagaaagaaagttcttcttaaaaacaagaagctaaaagcccatcagacgccagtggatatcttaaagcaaaaggctcatcagttagcatctatgcaagtgcaggcttataatggtgggaatgccaacccccgacctgccaataatgaggaagaggaagatgaggaggacgaatatgattatgactatgaatccctttctgatgacaacattctggaagacagacctgaaaataaatcatgtaatgacaagcttcagtttgaatataatgaagaaatcccaaagaggataaagaaagcagataactctgcttgcaacaaaggaaaggtttatgatatggaactgggagaagaattttatcttgatcagaataaaaaggaaagcagacagattgcaccagagctttctgaccttgtaatctattgtcaagcagtaaaatttccaggactgtcaactctaaatgcatctggctctagcagaggaaaagaaaggaaaagcaggaagtccatttttggcaacaatccgggcagaatgagcccaggggagacagcatcatttaacaaaacatctggaaaaagttcctgtgaaggcattcgacagacctgggaggaatcttcttcccctctcaacccaaccacgtccctcagtgctatcattagaactcccaaatgttatcatatctcgtcgctgaatgaaaatgccgccaaacgtctgtgtcgcaggtattctcagaaactgacccagcacaccgcctgtcagctgctgagaacttaccctgctgccacccgcatcgactcttccaacccgaaccccctcatgttctggctccatgggatacagcttgtggcactcaactaccagactgatgatctccctttacatttaaatgctgcaatgtttgaggcaaatggtggttgtggttatgtattgaaacctccagttctgtgggacaagaactgccccatgtatcagaagttttctccactagaaagagatctggacagcatggatcctgcagtctattctttaactattgtctctggtcagaatgtgtgccccagtaatagcatgggaagcccgtgcattgaagtcgacgtcctgggcatgcctctggacagctgccatttccgcacaaagcccatccatcgaaacaccctgaaccccatgtggaacgagcagtttctgttccacgttcacttcgaagatcttgtatttcttcgttttgcagttgtggaaaacaatagttcagcggtaactgctcagagaatcattccactgaaagctttaaaacgaggatatcgacatcttcagctgcgaaaccttcacaatgaagtcttggagatttctagtttattcattaacagcagaaggatggaagaaaattcctctggcaataccatgtcagcctcttcgatgtttaatacagaagaaagaaaatgtttgcagactcacagagtcacggtgcatggggtcccagggccagagccctttaccgttttcactattaatggaggcaccaaggcaaagcagcttctgcagcaaattctgacaaatgaacaagacatcaaacctgttaccacagactattttttgatggaagaaaaatattttatatctaaagaaaagaatgaatgtaggaaacaaccattccagagagccattggtccagaagaggagatcatgcaaattttaagcagctggtttccagaagagggatacatgggcaggattgtcttaaaaacccagcaggaaaacctagaagagaaaaacattgttcaagatgacaaagaggtgatcttgagctcagaggaggagagtttctttgtccaagtgcatgatgtttctccagagcaacctcgaacagtcatcaaagcaccccgcgtcagcactgcacaggatgtcattcagcagaccttatgcaaagccaaatattcctacagcatcctgagcaaccccaatccaagcgactatgtgcttttggaagaggtggtgaaagacactaccaacaagaagactaccacaccaaagtcctctcagcgggtccttctggatcaggagtgtgtgtttcaagcccaaagcaagtggaaaggtgcaggaaaattcatccttaagctaaaggagcaggtgcaggcatctcgagaagataaaaagaaaggcatttctttcgcaagtgaactcaagaagctcaccaagtcaactaaacagccccgaggacttacatcaccttctcagctcttgacctcagaaagtatccaaaccaaggaggagaaacctgtgggtggcttgtcctccagtgacacaatggattaccgacaggtgaagatctttaagcaagaagttaaagagtgaacatggtggaaaaaatataattattttcatcagacttaaactggaaattgatgatttctgaactgaagccttcacacatgtgagatccatgctgaggagaagcaaaatggcacagggctagttgccaccaaccaatttactgatgaatgaagcccaggggactgccattttataaatgtcagcagttggaaaaatcgtcacgaattgacttagagcaagggtcagcaagcttgtctgtaaagggccaaacagtaaatattttagggctgggggccataaaatatgttgcaaccacccaattctgccattgtagtgcaaaagcagccatagacaacacatacatgaacgaacgtggctgtattccaataaaactttatttatggacactg

SEQ ID NO: 22471 - DNA, 6456 bp, Homo sapiens
  source 1..6456: mol_type = unassigned DNA
attcagtgggtcgtggtgattaatggtttcagaaggaagtgcagcaggaagagactttgcaggaatggaagaggtgaggcagctccacgtgagattctgcaaagggattaagatttggcaccaggcttggtttctgtgcagcctcttaggcagagagccccaggagagggaagcaggctgtcagctgtggctttgcacgctctcagctgtcttgaaggttggttggctcttcccgctctctgaggtacccaattttaccttgttaaaggatggatgtggatgctggaggcttaaagaagaccagatctacaatgcagtgagaagagaagaaacagaaaatacagttggatctctactccatttcctcaccaagctcccagcctccgagacagcccatggaaggataagcgttggtccatgcttaaagcaatgtgtccgagacactgtatgtgagtatcgcgccaccctccaaaggacttcaatatcgcagtacatcaccggttctctcctagaagcaaccacgtctttgggagcaagaagtggccttctcagtacttttggaggatccactggacgaatgatgctgaaagaacgccagccaggcccctctgtggccaattccaatgccctcccttcaagttcagctgggatcagcaaggagctgatcgatctgcagcctctcatccagttcccagaggaagtcgccagcatcctgatggagcaagagcagactatttaccgcagggtcttgccagtcgactacctttgcttcttaacacgggacttgggcactcctgaatgccagagctccttgccctgcctcaaagcatccatctcagcgtcgattcttaccactcagaatggagagcacaatgcccttgaagatctggtgatgaggtttaatgaggtgagctcctgggtgacatggctgatcctcacggcaggctccatggaggagaagcgagaagtcttttcatatttggtgcatgtggccaaatgctgctggaacatgggcaactacaacgctgtcatggagttcttggctggcctcaggtcaagaaaagttttaaaaatgtggcagttcatggaccagtctgatattgagaccatgaggagcctgaaggatgctatggcccagcatgagtcctcttgtgagtacagaaaggtggtgacacgtgccctgcacatccctggctgtaaggtggttccattctgtggggtgtttctgaaggagctctgtgaagtgcttgacggcgcctccggtctcatgaagctttgcccgcggtacaattcccaagaagaaactttagagtttgtagcagattacagtggacaagataatttcttacaacgagtgggacaaaatggcttaaagaattcggagaaggagtccactgtcaacagcatctttcaggtcatccggagctgcaatcgaagtctggagacagacgaggaggacagccccagtgaaggaaacagctccaggaaaagctccttgaaggataaaagccgatggcagtttataattggagatttgttggattcagacaatgacatctttgagcaatccaaagaatacgactctcatggttcagaggactcacagaaggccttcgaccatgggacggagctcatcccttggtacgtgctgtccatccaagccgatgtgcaccagttcctgctgcagggggccacggtcatccactacgaccaggacacacacctctctgcccgctgcttcctccagcttcagcccgacaatagcaccttgacctgggtaaagcccacaactgcctccccagccagcagtaaagcaaaacttggtgtacttaataacacagctgagcctggaaaattcccactactgggtaatgctggattaagtagcctgacggaaggggtcttggatctttttgcagtgaaggctgtatacatgggccaccctggcattgatatacacactgtgtgtgttcagaacaaactgggtagcatgttcctgtcagagactggtgtgacattgctctatgggcttcagaccacagacaacagattattgcacttcgtggcaccaaagcacacagctaaaatgctcttcagcggattattggaactcactagagctgtgagaaagatgaggaaattccctgaccaaagacagcagtggctgcggaaacagtacgtcagcctttatcaggaggatggacggtatgaaggcccaactttggctcacgctgtggagttgtttggtggcagacggtggagtgctcgaaaccccagccccggaacatcagcaaagaatgctgagaagcccaatatgcagagaaacaataccctgggcataagcactaccaagaaaaagaagaaaatcctcatgaggggtgagagtggagaggtaactgacgatgagatggcaacccgaaaggccaagatgcacaaagagtgtcgaagccggagtggttctgatcctcaagacattaatgaacaagaagaatcagaggtgaatgccatcgctaaccctccaaaccccctcccttccagaagagcccactctttgaccacagctgggtcccccaacttggctgccgggacgtcatctcccatcaggccagtgtcctcccctgtgctgtcttcttcaaacaagagcccatccagtgcttggagcagtagtagctggcacgggcggatcaaaggcggcatgaagggatttcagagcttcatggtttcagatagcaacatgagttttgttgaatttgttgagctgttcaaatcattcagtgtcaggagccgcaaggacctgaaggatctgtttgatgtctatgcagtgccctgcaaccgatctggctccgagtcagccccactctacaccaacctgacaattgatgaaaacaccagcgatcttcagcctgacctagatctgttgaccagaaatgtctcggatttggggttgttcattaagagtaaacagcagctatcggacaaccagaggcagatatctgatgccattgctgctgcaagcattgtgacaaatggcactgggattgagagcacatctctgggcatttttggggtgggcatacttcagctcaacgatttcctcgtgaattgccaaggagaacactgcacttatgatgaaatcctcagcatcatccagaagttcgagcctagcatcagtatgtgtcatcagggactaatgtcatttgaagggtttgccaggtttctgatggataaagaaaattttgcctcaaaaaatgatgagtcacaggagaacattaaagaactgcagctacccctctcatactattacatcgaatcttcgcacaatacctacctcacgggccatcagctcaaaggagaatcctcggtagaactctacagccaggtccttttgcaaggctgtcgaagtgtagaattggactgctgggacggagacgatgggatgcccatcatttatcatggacatacgctgacaaccaagatccccttcaaggaagtggttgaagccattgatcgcagtgccttcatcaactctgacctgccaatcatcatatcgattgagaaccactgttcattgcctcagcaacgaaaaatggcagaaattttcaagactgtgtttggagaaaagctggtgactaaattcttatttgagactgatttctcagatgatccaatgcttccttcacctgaccaactcagaaagaaagttcttcttaaaaacaagaagctaaaagcccatcagacgccagtggatatcttaaagcaaaaggctcatcagttagcatctatgcaagtgcaggcttataatggtgggaatgccaacccccgacctgccaataatgaggaagaggaagatgaggaggacgaatatgattatgactatgaatccctttctgatgacaacattctggaagacagacctgaaaataaatcatgtaatgacaagcttcagtttgaatataatgaagaaatcccaaagaggataaagaaagcagataactctgcttgcaacaaaggaaaggtttatgatatggaactgggagaagaattttatcttgatcagaataaaaaggaaagcagacagattgcaccagagctttctgaccttgtaatctattgtcaagcagtaaaatttccaggactgtcaactctaaatgcatctggctctagcagaggaaaagaaaggaaaagcaggaagtccatttttggcaacaatccgggcagaatgagcccaggggagacagcatcatttaacaaaacatctggaaaaagttcctgtgaaggcattcgacagacctgggaggaatcttcttcccctctcaacccaaccacgtccctcagtgctatcattagaactcccaaatgttatcatatctcgtcgctgaatgaaaatgccgccaaacgtctgtgtcgcaggtattctcagaaactgacccagcacaccgcctgtcagctgctgagaacttaccctgctgccacccgcatcgactcttccaacccgaaccccctcatgttctggctccatgggatacagcttgtggcactcaactaccagactgatgatctccctttacatttaaatgctgcaatgtttgaggcaaatggtggttgtggttatgtattgaaacctccagttctgtgggacaagaactgccccatgtatcagaagttttctccactagaaagagatctggacagcatggatcctgcagtctattctttaactattgtctctggtcagaatgtgtgccccagtaatagcatgggaagcccgtgcattgaagtcgacgtcctgggcatgcctctggacagctgccatttccgcacaaagcccatccatcgaaacaccctgaaccccatgtggaacgagcagtttctgttccacgttcacttcgaagatcttgtatttcttcgttttgcagttgtggaaaacaatagttcagcggtaactgctcagagaatcattccactgaaagctttaaaacgaggatatcgacatcttcagctgcgaaaccttcacaatgaagtcttggagatttctagtttattcattaacagcagaaggatggaagaaaattcctctggcaataccatgtcagcctcttcgatgtttaatacagaagaaagaaaatgtttgcagactcacagagtcacggtgcatggggtcccagggccagagccctttaccgttttcactattaatggaggcaccaaggcaaagcagcttctgcagcaaattctgacaaatgaacaagacatcaaacctgttaccacagactattttttgatggaagaaaaatattttatatctaaagaaaagaatgaatgtaggaaacaaccattccagagagccattggtccagaagaggagatcatgcaaattttaagcagctggtttccagaagagggatacatgggcaggattgtcttaaaaacccagcaggaaaacctagaagagaaaaacattgttcaagatgacaaagaggtgatcttgagctcagaggaggagagtttctttgtccaagtgcatgatgtttctccagagcaacctcgaacagtcatcaaagcaccccgcgtcagcactgcacaggatgtcattcagcagaccttatgcaaagccaaatattcctacagcatcctgagcaaccccaatccaagcgactatgtgcttttggaagaggtggtgaaagacactaccaacaagaagactaccacaccaaagtcctctcagcgggtccttctggatcaggagtgtgtgtttcaagcccaaagcaagtggaaaggtgcaggaaaattcatccttaagctaaaggagcaggtgcaggcatctcgagaagataaaaagaaaggcatttctttcgcaagtgaactcaagaagctcaccaagtcaactaaacagccccgaggacttacatcaccttctcagctcttgacctcagaaagtatccaaaccaaggaggagaaacctgtgggtggcttgtcctccagtgacacaatggattaccgacagtgactaagggcagcatgtttaacccaggtgaagatctttaagcaagaagttaaagagtgaacatggtggaaaaaatataattattttcatcagacttaaactggaaattgatgatttctgaactgaagccttcacacatgtgagatccatgctgaggagaagcaaaatggcacagggctagttgccaccaaccaatttactgatgaatgaagcccaggggactgccattttataaatgtcagcagttggaaaaatcgtcacgaattgacttagagcaagggtcagcaagcttgtctgtaaagggccaaacagtaaatattttagggctgggggccataaaatatgttgcaaccacccaattctgccattgtagtgcaaaagcagccatagacaacacatacatgaacgaacgtggctgtattccaataaaactttatttatggacactgaaa

SEQ ID NO: 22472 - DNA, 6128 bp, Homo sapiens
  source 1..6128: mol_type = unassigned DNA
tggaaaaaaggaactgtgtgcagtaccgcaggcattttctggtggacaacagtgtgtttcatgttgaaagatgcatgagtgtgatgcagtccgggacacagatgatcaagctgaaacgtggaaccaaagggcttgtccgcctcttttacctggatgagcaccggacacgcctccgatggcgaccctctaggaagagtgagaaggcaaaaatacttattgattccatttacaaagtgactgagggccggcagtctgaaatattccacagacaagctgaggggaacttcgaccccagctgctgcttcaccatctaccatggcaaccacatggagtccctggacctcatcacctccaaccccgaggaggcccgcacctggatcacaggcctcaagtacctgatggctggcatcagtgatgaagactcccttgccaaaaggcagaggacccatgaccaatgggtgaagcagacctttgaggaagctgataagaatggtgacggcttgctgaatattgaagagatacatcagctgatgcataaactgaatgttaatctgccccgaagaaaagtcagacaaatgtttcaggaagccgacacagatgagaatcagggaactttgacatttgaagagttctgtgttttttacaaaatgatgtctttgagacgagacctttatttgttacttttgagctacagtgacaagaaagatcacctaactgtggaagaactggctcagtttttgaaggtggagcaaaagatgaataatgtgacaacggactattgtcttgacatcataaagaagtttgaagtttcagaagaaaataaggtgaaaaatgttcttggcatagaaggcttcacgaacttcatgcgtagtcctgcctgtgacatatttaacccattgcaccatgaagtgtaccaagacatggatcagcccctctgcaactactacattgcttcctctcacaatacatacctgactggagaccagctcctttctcagtccaaagtggatatgtatgcacgggtgctgcaagagggctgtcgctgtgtggaagttgactgttgggatggcccagatggagagccagtagtacatcatggttacactctcacttcaaaaattctcttcagagatgttgtggagaccatcaacaagcatgcctttgtgaagaatgagtttcctgttatattgtctatcgagaatcactgcagtatccagcagcaaaggaagattgctcagtacctgaaaggaatattcggagacaaactggacctgtcatctgttgatacaggggagtgcaagcagcttccaagccctcaaagtttgaaaggcaaaattctagtgaagggtaagaagttgccttatcaccttggggatgatgcagaggaaggggaagtttctgatgaggacagtgcagatgaaattgaagacgagtgcaaattcaagctccattatagtaatgggaccactgagcatcaggtggaatctttcataaggaaaaaactggagtcactgttaaaagaatctcaaattcgagataaagaagatcctgatagtttcacagtgcgggcactactgaaggccacgcatgaaggcttaaatgcacacctgaagcagagtccagatgtaaaggaaagtggaaagaaatcacatggacgatccctcatgaccaactttggaaaacataagaaaactacaaaatcacggtctaaatcttacagtactgatgatgaggaagacacacagcagagtactggcaaggagggtggccagctgtacagattgggtcgccgaaggaaaaccatgaagctctgccgagaactctctgatttggttgtgtacacaaactccgtggccgctcaggacattgtggatgacggaaccacaggaaatgtgttatcattcagtgaaacaagagcacatcaggttgttcagcaaaaatcagagcagttcatgatttataatcaaaagcaactcacgaggatttacccctctgcctaccgcattgattccagtaacttcaaccctctcccctactggaacgcaggctgccagctagtggcactgaattatcaatctgaaggacgaatgatgcagttaaaccgagccaaattcaaggcaaatggcaattgtggctatgtcctcaaaccccagcaaatgtgcaaaggtactttcaaccctttctctggtgaccctcttcctgccaaccccaaaaagcagctcatcctgaaagttatcagtggacagcaactccccaaacctccagactccatgtttggagatcgaggcgagatcattgacccttttgttgaagttgaaattattggattgccagtagattgttgtaaagatcaaacccgtgtggtagatgacaatggatttaaccctgtgtgggaagaaacactgacatttacagtacacatgccagaaatagctttggttcggttccttgtgtgggatcacgatcccattggacgagactttgttggacaaagaactgtgaccttcagcagcttagtgcctggctaccggcatgtctatttggaaggactgacagaagcatccatatttgtacacataaccatcaatgaaatctatggaaagaacagacaactccagggtctgaagggactgttcaataagaatcctaggcacagttcttcagaaaacaattcccattatgtacggaagcgatccattggagatagaattctgcgacgcacagctagcgccccagccaaaggcaggaaaaagagcaaaatgggcttccaagaaatggtggagataaaggattctgtgtccgaggccacaagagatcaagatggcgtgctgaggaggaccacacgcagtttgcaagcacgccctgtctctatgcctgttgacagaaaccttctgggagctttgtcgctgcctgtatctgaaacagcaaaagacattgaaggaaaagaaaactctctagcagaagataaagatggcagaagaaaagggaaagcaagtataaaagatccacattttctaaatttcaacaaaaagttatcatcctcctccagtgctctgctccacaaagataccagccaaggggacaccattgtatctactgcccacatgtcagtcacaggagaacagctgggcatgtcaagtcctaggggtgggagaaccacatcaaatgccacaagcaattgccaggaaaacccctgtcccagcaagtctctctccccaaagcagcatttggctcccgatcctgtagttaaccccacacaagatctgcatggtgtgaaaatcaaggaaaagggtaatcctgaggactttgtggaagggaaaagcatcttgtcaggaagcgtcctttctcatagcaacctagaaattaagaacctggaaggtaataggggtaagggccgagctgcaacatccttttctttgtcagacgtctccatgctctgttctgacatacctgacctacattcaactgcaattctgcaggagagtgtaatttcccatcttattgacaatgtcactttaacaaatgagaatgagccgggcagttccatctcagccctgattggccagtttgatgagaccaacaatcaggctctcacagttgtttctcatcttcataataccagtgtgatgtcaggccattgtcccttgcctagcctgggcctaaaaatgcccatcaagcatggtttttgcaagggaaaatccaagtcttccttcctgtgctcatctccggagctgatagcactctcgagttctgagaccaccaaacatgcaacgaacacagtttatgaaactacctgcactcccatctctaaaaccaaaccagatgatgacctttctagtaaggccaagacagcggccttagaaagcaacctgcctggatcccctaatacttctcgtggctggttaccaaaaagtcctaccaagggagaagactgggaaacactgaagagctgcagccctgcctcttcccctgatttgaccctggaggatgtaatagctgatcccactctctgtttcaattctggggagagcagccttgtggaaattgatggagaatcagaaaatctttctctaacaacctgtgaatataggagagagggcacaagtcaacttgcttctcctttaaaactcaagtacaatcagggtgtggtagaacactttcaaagaggtttgagaaacggctactgtaaagagaccctccgcccttctgtccctgaaatattcaacaatattcaagatgtcaaaactcaaagtatttcttatctagcctatcagggtgctggctttgtgcataatcatttctcagattcagatgcaaaaatgttccagacctgtgtgccccagcaatctagtgctcaagatatgcatgtccctgtacccaagcagttggcacatcttcctttgcctgctctgaaactgcctagtccttgcaaatccaaaagtctgggggacttaacatcagaggacattgcctgcaattttgagagcaagtaccagtgtattagtaagagttttgttacaactggcattagagacaagaagggcgtgactgtgaagacaaagtcgttagagcctatagatgccctgaccgagcagcttcggaagcttgtgtcctttgaccaggaagacaactgccaagtgctatattcaaagcaggatgccaatcagctcccccgggcactggtcaggaagttgtcatccagaagtcagagcagagtgcgcaatattgctagtcgtgccaaggagaaacaggaagccaacaagcagaaagttccaaaccccagcaatggggcaggagtggttcttagaaacaaaccctcagcacccacccctgcagtgaatcgccactccaccggctcctacatcgcaggctacctgaagaacacgaaagggggtggccttgaaggccggggcatcccagagggggcatgcacggctcttcactatggccacgttgaccagttttgttcagataattctgttttgcagactgagccaagcagtgatgataaaccagaaatttattttcttttgagactgtgaattatttaaaactgcattcttaaggttttcaaggtattctgtagaatgtcagagttttcagtaaataagttccttggctttggaatgattttcaaatgtatttttaaacttgtatttgggtctccctttgacttcatgtgttctccctgttaatgcgtttgtatatagatttggtgacatttcccatgtacctattatgatctttctcccttgagttgttgtaaactgtatcagtatgaaatatgtgcatgccctagatgtgaaactcctcagcagctcgggttataatgtgtgtgtgtttcaccaagatgtcctttactgtgtcctcagattgcagtcacaaatgtagtcatttttactctctaactgttgagttgattaagagactttgcaaacgacaaagggatgaattccttactttaatctgttatcatttttcctatgtttccctctttgttcagaagcccagatgcatttttataactcagttttaaaaactttaaaatagttaccttgccttttaggatgttcttatcccacccataatgagagttgaaaggggatggatagctgctccccatgcccttcccactttttggaataggccgtgagggtgtgaggaagaaggctgtcttttgtacataaggacaaaattgtttgttttacataaattttgttacatatttttgctaatggctttgtatgtaacaagaagcgagttgccaaactacctgttgtacttttgaattttctgattgaattacagactgcgaacaacggctttcagaatgagggacttccatcagactctaatgataatagtagcacaaattgaaaacttccccaaagctttcacagaatattttctcataataaaatccaagtgaacagataattagaagaaacccttttccttcagggaaccaagcaactctattttagtactgacatgcattattttcactgtgaattcacttttttattgcatgttcagatgtccctctttgttttttttttttgtaacattaactgcaatgatgttcttcctggaattcatgaaaatataattaaaacacatttttaaac

SEQ ID NO: 22473 - DNA, 6168 bp, Homo sapiens
  source 1..6168: mol_type = unassigned DNA
atggcagaccttgaagtgtataaaaacttaagtccagaaaaagttgaaagatgcatgagtgtgatgcagtccgggacacagatgatcaagctgaaacgtggaaccaaagggcttgtccgcctcttttacctggatgagcaccggacacgcctccgatggcgaccctctaggaagagtgagaaggcaaaaatacttattgattccatttacaaagtgactgagggccggcagtctgaaatattccacagacaagctgaggggaacttcgaccccagctgctgcttcaccatctaccatggcaaccacatggagtccctggacctcatcacctccaaccccgaggaggcccgcacctggatcacaggcctcaagtacctgatggctggcatcagtgatgaagactcccttgccaaaaggcagaggacccatgaccaatgggtgaagcagacctttgaggaagctgataagaatggtgacggcttgctgaatattgaagagatacatcagctgatgcataaactgaatgttaatctgccccgaagaaaagtcagacaaatgtttcaggaagccgacacagatgagaatcagggaactttgacatttgaagagttctgtgttttttacaaaatgatgtctttgagacgagacctttatttgttacttttgagctacagtgacaagaaagatcacctaactgtggaagaactggctcagtttttgaaggtggagcaaaagatgaataatgtgacaacggactattgtcttgacatcataaagaagtttgaagtttcagaagaaaataaggtgaaaaatgttcttggcatagaaggcttcacgaacttcatgcgtagtcctgcctgtgacatatttaacccattgcaccatgaagtgtaccaagacatggatcagcccctctgcaactactacattgcttcctctcacaatacatacctgactggagaccagctcctttctcagtccaaagtggatatgtatgcacgggtgctgcaagagggctgtcgctgtgtggaagttgactgttgggatggcccagatggagagccagtagtacatcatggttacactctcacttcaaaaattctcttcagagatgttgtggagaccatcaacaagcatgcctttgtgaagaatgagtttcctgttatattgtctatcgagaatcactgcagtatccagcagcaaaggaagattgctcagtacctgaaaggaatattcggagacaaactggacctgtcatctgttgatacaggggagtgcaagcagcttccaagccctcaaagtttgaaaggcaaaattctagtgaagggtaagaagttgccttatcaccttggggatgatgcagaggaaggggaagtttctgatgaggacagtgcagatgaaattgaagacgagtgcaaattcaagctccattatagtaatgggaccactgagcatcaggtggaatctttcataaggaaaaaactggagtcactgttaaaagaatctcaaattcgagataaagaagatcctgatagtttcacagtgcgggcactactgaaggccacgcatgaaggcttaaatgcacacctgaagcagagtccagatgtaaaggaaagtggaaagaaatcacatggacgatccctcatgaccaactttggaaaacataagaaaactacaaaatcacggtctaaatcttacagtactgatgatgaggaagacacacagcagagtactggcaaggagggtggccagctgtacagattgggtcgccgaaggaaaaccatgaagctctgccgagaactctctgatttggttgtgtacacaaactccgtggccgctcaggacattgtggatgacggaaccacaggaaatgtgttatcattcagtgaaacaagagcacatcaggttgttcagcaaaaatcagagcagttcatgatttataatcaaaagcaactcacgaggatttacccctctgcctaccgcattgattccagtaacttcaaccctctcccctactggaacgcaggctgccagctagtggcactgaattatcaatctgaaggacgaatgatgcagttaaaccgagccaaattcaaggcaaatggcaattgtggctatgtcctcaaaccccagcaaatgtgcaaaggtactttcaaccctttctctggtgaccctcttcctgccaaccccaaaaagcagctcatcctgaaagttatcagtggacagcaactccccaaacctccagactccatgtttggagatcgaggcgagatcattgacccttttgttgaagttgaaattattggattgccagtagattgttgtaaagatcaaacccgtgtggtagatgacaatggatttaaccctgtgtgggaagaaacactgacatttacagtacacatgccagaaatagctttggttcggttccttgtgtgggatcacgatcccattggacgagactttgttggacaaagaactgtgaccttcagcagcttagtgcctggctaccggcatgtctatttggaaggactgacagaagcatccatatttgtacacataaccatcaatgaaatctatggaaagtggagccctttaatactcaaccccagttatactatattgcactttctaggagctacaaagaacagacaactccagggtctgaagggactgttcaataagaatcctaggcacagttcttcagaaaacaattcccattatgtacggaagcgatccattggagatagaattctgcgacgcacagctagcgccccagccaaaggcaggaaaaagagcaaaatgggcttccaagaaatggtggagataaaggattctgtgtccgaggccacaagagatcaagatggcgtgctgaggaggaccacacgcagtttgcaagcacgccctgtctctatgcctgttgacagaaaccttctgggagctttgtcgctgcctgtatctgaaacagcaaaagacattgaaggaaaagaaaactctctagcagaagataaagatggcagaagaaaagggaaagcaagtataaaagatccacattttctaaatttcaacaaaaagttatcatcctcctccagtgctctgctccacaaagataccagccaaggggacaccattgtatctactgcccacatgtcagtcacaggagaacagctgggcatgtcaagtcctaggggtgggagaaccacatcaaatgccacaagcaattgccaggaaaacccctgtcccagcaagtctctctccccaaagcagcatttggctcccgatcctgtagttaaccccacacaagatctgcatggtgtgaaaatcaaggaaaagggtaatcctgaggactttgtggaagggaaaagcatcttgtcaggaagcgtcctttctcatagcaacctagaaattaagaacctggaaggtaataggggtaagggccgagctgcaacatccttttctttgtcagacgtctccatgctctgttctgacatacctgacctacattcaactgcaattctgcaggagagtgtaatttcccatcttattgacaatgtcactttaacaaatgagaatgagccgggcagttccatctcagccctgattggccagtttgatgagaccaacaatcaggctctcacagttgtttctcatcttcataataccagtgtgatgtcaggccattgtcccttgcctagcctgggcctaaaaatgcccatcaagcatggtttttgcaagggaaaatccaagtcttccttcctgtgctcatctccggagctgatagcactctcgagttctgagaccaccaaacatgcaacgaacacagtttatgaaactacctgcactcccatctctaaaaccaaaccagatgatgacctttctagtaaggccaagacagcggccttagaaagcaacctgcctggatcccctaatacttctcgtggctggttaccaaaaagtcctaccaagggagaagactgggaaacactgaagagctgcagccctgcctcttcccctgatttgaccctggaggatgtaatagctgatcccactctctgtttcaattctggggagagcagccttgtggaaattgatggagaatcagaaaatctttctctaacaacctgtgaatataggagagagggcacaagtcaacttgcttctcctttaaaactcaagtacaatcagggtgtggtagaacactttcaaagaggtttgagaaacggctactgtaaagagaccctccgcccttctgtccctgaaatattcaacaatattcaagatgtcaaaactcaaagtatttcttatctagcctatcagggtgctggctttgtgcataatcatttctcagattcagatgcaaaaatgttccagacctgtgtgccccagcaatctagtgctcaagatatgcatgtccctgtacccaagcagttggcacatcttcctttgcctgctctgaaactgcctagtccttgcaaatccaaaagtctgggggacttaacatcagaggacattgcctgcaattttgagagcaagtaccagtgtattagtaagagttttgttacaactggcattagagacaagaagggcgtgactgtgaagacaaagtcgttagagcctatagatgccctgaccgagcagcttcggaagcttgtgtcctttgaccaggaagacaactgccaagtgctatattcaaagcaggatgccaatcagctcccccgggcactggtcaggaagttgtcatccagaagtcagagcagagtgcgcaatattgctagtcgtgccaaggagaaacaggaagccaacaagcagaaagttccaaaccccagcaatggggcaggagtggttcttagaaacaaaccctcagcacccacccctgcagtgaatcgccactccaccggctcctacatcgcaggctacctgaagaacacgaaagggggtggccttgaaggccggggcatcccagagggggcatgcacggctcttcactatggccacgttgaccagttttgttcagataattctgttttgcagactgagccaagcagtgatgataaaccagaaatttattttcttttgagactgtgaattatttaaaactgcattcttaaggttttcaaggtattctgtagaatgtcagagttttcagtaaataagttccttggctttggaatgattttcaaatgtatttttaaacttgtatttgggtctccctttgacttcatgtgttctccctgttaatgcgtttgtatatagatttggtgacatttcccatgtacctattatgatctttctcccttgagttgttgtaaactgtatcagtatgaaatatgtgcatgccctagatgtgaaactcctcagcagctcgggttataatgtgtgtgtgtttcaccaagatgtcctttactgtgtcctcagattgcagtcacaaatgtagtcatttttactctctaactgttgagttgattaagagactttgcaaacgacaaagggatgaattccttactttaatctgttatcatttttcctatgtttccctctttgttcagaagcccagatgcatttttataactcagttttaaaaactttaaaatagttaccttgccttttaggatgttcttatcccacccataatgagagttgaaaggggatggatagctgctccccatgcccttcccactttttggaataggccgtgagggtgtgaggaagaaggctgtcttttgtacataaggacaaaattgtttgttttacataaattttgttacatatttttgctaatggctttgtatgtaacaagaagcgagttgccaaactacctgttgtacttttgaattttctgattgaattacagactgcgaacaacggctttcagaatgagggacttccatcagactctaatgataatagtagcacaaattgaaaacttccccaaagctttcacagaatattttctcataataaaatccaagtgaacagataattagaagaaacccttttccttcagggaaccaagcaactctattttagtactgacatgcattattttcactgtgaattcacttttttattgcatgttcagatgtccctctttgttttttttttttgtaacattaactgcaatgatgttcttcctggaattcatgaaaatataattaaaacacatttttaaac

SEQ ID NO: 22474 - DNA, 6385 bp, Homo sapiens
  source 1..6385: mol_type = unassigned DNA
agatgcttccagcgtgcttatctggctgtgcttttcactttgggacaaagttctataatcatatctcatggatttattttctccacactataaagcctgaattgtgaagatctcatcatgccataaagggcagcatgagccaagttctgggggctgctaaggatttctttgccttttttccccccaccctttttggaaatgtgtatcaggaaaaggctttgcctttagagagaaattgtactgctcttgccaataatgtgtaatagtattaaatttaatggcagaccttgaagtgtataaaaacttaagtccagaaaaagttgaaagatgcatgagtgtgatgcagtccgggacacagatgatcaagctgaaacgtggaaccaaagggcttgtccgcctcttttacctggatgagcaccggacacgcctccgatggcgaccctctaggaagagtgagaaggcaaaaatacttattgattccatttacaaagtgactgagggccggcagtctgaaatattccacagacaagctgaggggaacttcgaccccagctgctgcttcaccatctaccatggcaaccacatggagtccctggacctcatcacctccaaccccgaggaggcccgcacctggatcacaggcctcaagtacctgatggctggcatcagtgatgaagactcccttgccaaaaggcagaggacccatgaccaatgggtgaagcagacctttgaggaagctgataagaatggtgacggcttgctgaatattgaagagatacatcagctgatgcataaactgaatgttaatctgccccgaagaaaagtcagacaaatgtttcaggaagccgacacagatgagaatcagggaactttgacatttgaagagttctgtgttttttacaaaatgatgtctttgagacgagacctttatttgttacttttgagctacagtgacaagaaagatcacctaactgtggaagaactggctcagtttttgaaggtggagcaaaagatgaataatgtgacaacggactattgtcttgacatcataaagaagtttgaagtttcagaagaaaataaggtgaaaaatgttcttggcatagaaggcttcacgaacttcatgcgtagtcctgcctgtgacatatttaacccattgcaccatgaagtgtaccaagacatggatcagcccctctgcaactactacattgcttcctctcacaatacatacctgactggagaccagctcctttctcagtccaaagtggatatgtatgcacgggtgctgcaagagggctgtcgctgtgtggaagttgactgttgggatggcccagatggagagccagtagtacatcatggttacactctcacttcaaaaattctcttcagagatgttgtggagaccatcaacaagcatgcctttgtgaagaatgagtttcctgttatattgtctatcgagaatcactgcagtatccagcagcaaaggaagattgctcagtacctgaaaggaatattcggagacaaactggacctgtcatctgttgatacaggggagtgcaagcagcttccaagccctcaaagtttgaaaggcaaaattctagtgaagggtaagaagttgccttatcaccttggggatgatgcagaggaaggggaagtttctgatgaggacagtgcagatgaaattgaagacgagtgcaaattcaagctccattatagtaatgggaccactgagcatcaggtggaatctttcataaggaaaaaactggagtcactgttaaaagaatctcaaattcgagataaagaagatcctgatagtttcacagtgcgggcactactgaaggccacgcatgaaggcttaaatgcacacctgaagcagagtccagatgtaaaggaaagtggaaagaaatcacatggacgatccctcatgaccaactttggaaaacataagaaaactacaaaatcacggtctaaatcttacagtactgatgatgaggaagacacacagcagagtactggcaaggagggtggccagctgtacagattgggtcgccgaaggaaaaccatgaagctctgccgagaactctctgatttggttgtgtacacaaactccgtggccgctcaggacattgtggatgacggaaccacaggaaatgtgttatcattcagtgaaacaagagcacatcaggttgttcagcaaaaatcagagcagttcatgatttataatcaaaagcaactcacgaggatttacccctctgcctaccgcattgattccagtaacttcaaccctctcccctactggaacgcaggctgccagctagtggcactgaattatcaatctgaaggacgaatgatgcagttaaaccgagccaaattcaaggcaaatggcaattgtggctatgtcctcaaaccccagcaaatgtgcaaaggtactttcaaccctttctctggtgaccctcttcctgccaaccccaaaaagcagctcatcctgaaagttatcagtggacagcaactccccaaacctccagactccatgtttggagatcgaggcgagatcattgacccttttgttgaagttgaaattattggattgccagtagattgttgtaaagatcaaacccgtgtggtagatgacaatggatttaaccctgtgtgggaagaaacactgacatttacagtacacatgccagaaatagctttggttcggttccttgtgtgggatcacgatcccattggacgagactttgttggacaaagaactgtgaccttcagcagcttagtgcctggctaccggcatgtctatttggaaggactgacagaagcatccatatttgtacacataaccatcaatgaaatctatggaaagaacagacaactccagggtctgaagggactgttcaataagaatcctaggcacagttcttcagaaaacaattcccattatgtacggaagcgatccattggagatagaattctgcgacgcacagctagcgccccagccaaaggcaggaaaaagagcaaaatgggcttccaagaaatggtggagataaaggattctgtgtccgaggccacaagagatcaagatggcgtgctgaggaggaccacacgcagtttgcaagcacgccctgtctctatgcctgttgacagaaaccttctgggagctttgtcgctgcctgtatctgaaacagcaaaagacattgaaggaaaagaaaactctctagcagaagataaagatggcagaagaaaagggaaagcaagtataaaagatccacattttctaaatttcaacaaaaagttatcatcctcctccagtgctctgctccacaaagataccagccaaggggacaccattgtatctactgcccacatgtcagtcacaggagaacagctgggcatgtcaagtcctaggggtgggagaaccacatcaaatgccacaagcaattgccaggaaaacccctgtcccagcaagtctctctccccaaagcagcatttggctcccgatcctgtagttaaccccacacaagatctgcatggtgtgaaaatcaaggaaaagggtaatcctgaggactttgtggaagggaaaagcatcttgtcaggaagcgtcctttctcatagcaacctagaaattaagaacctggaaggtaataggggtaagggccgagctgcaacatccttttctttgtcagacgtctccatgctctgttctgacatacctgacctacattcaactgcaattctgcaggagagtgtaatttcccatcttattgacaatgtcactttaacaaatgagaatgagccgggcagttccatctcagccctgattggccagtttgatgagaccaacaatcaggctctcacagttgtttctcatcttcataataccagtgtgatgtcaggccattgtcccttgcctagcctgggcctaaaaatgcccatcaagcatggtttttgcaagggaaaatccaagtcttccttcctgtgctcatctccggagctgatagcactctcgagttctgagaccaccaaacatgcaacgaacacagtttatgaaactacctgcactcccatctctaaaaccaaaccagatgatgacctttctagtaaggccaagacagcggccttagaaagcaacctgcctggatcccctaatacttctcgtggctggttaccaaaaagtcctaccaagggagaagactgggaaacactgaagagctgcagccctgcctcttcccctgatttgaccctggaggatgtaatagctgatcccactctctgtttcaattctggggagagcagccttgtggaaattgatggagaatcagaaaatctttctctaacaacctgtgaatataggagagagggcacaagtcaacttgcttctcctttaaaactcaagtacaatcagggtgtggtagaacactttcaaagaggtttgagaaacggctactgtaaagagaccctccgcccttctgtccctgaaatattcaacaatattcaagatgtcaaaactcaaagtatttcttatctagcctatcagggtgctggctttgtgcataatcatttctcagattcagatgcaaaaatgttccagacctgtgtgccccagcaatctagtgctcaagatatgcatgtccctgtacccaagcagttggcacatcttcctttgcctgctctgaaactgcctagtccttgcaaatccaaaagtctgggggacttaacatcagaggacattgcctgcaattttgagagcaagtaccagtgtattagtaagagttttgttacaactggcattagagacaagaagggcgtgactgtgaagacaaagtcgttagagcctatagatgccctgaccgagcagcttcggaagcttgtgtcctttgaccaggaagacaactgccaagtgctatattcaaagcaggatgccaatcagctcccccgggcactggtcaggaagttgtcatccagaagtcagagcagagtgcgcaatattgctagtcgtgccaaggagaaacaggaagccaacaagcagaaagttccaaaccccagcaatggggcaggagtggttcttagaaacaaaccctcagcacccacccctgcagtgaatcgccactccaccggctcctacatcgcaggctacctgaagaacacgaaagggggtggccttgaaggccggggcatcccagagggggcatgcacggctcttcactatggccacgttgaccagttttgttcagataattctgttttgcagactgagccaagcagtgatgataaaccagaaatttattttcttttgagactgtgaattatttaaaactgcattcttaaggttttcaaggtattctgtagaatgtcagagttttcagtaaataagttccttggctttggaatgattttcaaatgtatttttaaacttgtatttgggtctccctttgacttcatgtgttctccctgttaatgcgtttgtatatagatttggtgacatttcccatgtacctattatgatctttctcccttgagttgttgtaaactgtatcagtatgaaatatgtgcatgccctagatgtgaaactcctcagcagctcgggttataatgtgtgtgtgtttcaccaagatgtcctttactgtgtcctcagattgcagtcacaaatgtagtcatttttactctctaactgttgagttgattaagagactttgcaaacgacaaagggatgaattccttactttaatctgttatcatttttcctatgtttccctctttgttcagaagcccagatgcatttttataactcagttttaaaaactttaaaatagttaccttgccttttaggatgttcttatcccacccataatgagagttgaaaggggatggatagctgctccccatgcccttcccactttttggaataggccgtgagggtgtgaggaagaaggctgtcttttgtacataaggacaaaattgtttgttttacataaattttgttacatatttttgctaatggctttgtatgtaacaagaagcgagttgccaaactacctgttgtacttttgaattttctgattgaattacagactgcgaacaacggctttcagaatgagggacttccatcagactctaatgataatagtagcacaaattgaaaacttccccaaagctttcacagaatattttctcataataaaatccaagtgaacagataattagaagaaacccttttccttcagggaaccaagcaactctattttagtactgacatgcattattttcactgtgaattcacttttttattgcatgttcagatgtccctctttgttttttttttttgtaacattaactgcaatgatgttcttcctggaattcatgaaaatataattaaaacacatttttaaac

SEQ ID NO: 22475 - DNA, 6196 bp, Homo sapiens
  source 1..6196: mol_type = unassigned DNA
atggcagaccttgaagtgtataaaaacttaagtccagaaaaagttgaaagatgcatgagtgtgatgcagtccgggacacagatgatcaagctgaaacgtggaaccaaagggcttgtccgcctcttttacctggatgagcaccggacacgcctccgatggcgaccctctaggaagagtgagaaggcaaaaatacttattgattccatttacaaagtgactgagggccggcagtctgaaatattccacagacaagctgaggggaacttcgaccccagctgctgcttcaccatctaccatggcaaccacatggagtccctggacctcatcacctccaaccccgaggaggcccgcacctggatcacaggcctcaagtacctgatggctggcatcagtgatgaagactcccttgccaaaaggcagaggacccatgaccaatgggtgaagcagacctttgaggaagctgataagaatggtgacggcttgctgaatattgaagagatacatcagctgatgcataaactgaatgttaatctgccccgaagaaaagtcagacaaatgtttcaggaagccgacacagatgagaatcagggaactttgacatttgaagagttctgtgttttttacaaaatgatgtctttgagacgagacctttatttgttacttttgagctacagtgacaagaaagatcacctaactgtggaagaactggctcagtttttgaaggtggagcaaaagatgaataatgtgacaacggactattgtcttgacatcataaagaagtttgaagtttcagaagaaaataaggtgaaaaatgttcttggcatagaaggcttcacgaacttcatgcgtagtcctgcctgtgacatatttaacccattgcaccatgaagtgtaccaagacatggatcagcccctctgcaactactacattgcttcctctcacaatacatacctgactggagaccagctcctttctcagtccaaagtggatatgtatgcacgggtgctgcaagagggctgtcgctgtgtggaagttgactgttgggatggcccagatggagagccagtagtacatcatggttacactctcacttcaaaaattctcttcagagatgttgtggagaccatcaacaagcatgcctttgtgaagaatgagtttcctgttatattgtctatcgagaatcactgcagtatccagcagcaaaggaagattgctcagtacctgaaaggaatattcggagacaaactggacctgtcatctgttgatacaggggagtgcaagcagcttccaagccctcaaagtttgaaaggcaaaattctagtgaagggtaagaagttgccttatcaccttggggatgatgcagaggaaggggaagtttctgatgaggacagtgcagatgaaattgaagacgagtgcaaattcaagctccattatagtaatgggaccactgagcatcaggtggaatctttcataaggaaaaaactggagtcactgttaaaagaatctcaaattcgagataaagaagatcctgatagtttcacagtgcgggcactactgaaggccacgcatgaaggcttaaatgcacacctgaagcagagtccagatgtaaaggaaagtggaaagaaatcacatggacgatccctcatgaccaactttggaaaacataagaaaactacaaaatcacggtctaaatcttacagtactgatgatgaggaagacacacagcagagtactggcaaggagggtggccagctgtacagattgggtcgccgaaggaaaaccatgaagctctgccgagaactctctgatttggttgtgtacacaaactccgtggccgctcaggacattgtggatgacggaaccacaggaaatgtgttatcattcagtgaaacaagagcacatcaggttgttcagcaaaaatcagagcagttcatgatttataatcaaaagcaactcacgaggatttacccctctgcctaccgcattgattccagtaacttcaaccctctcccctactggaacgcaggctgccagctagtggcactgaattatcaatctgaaggacgaatgatgcagttaaaccgagccaaattcaaggcaaatggcaattgtggctatgtcctcaaaccccagcaaatgtgcaaaggtactttcaaccctttctctggtgaccctcttcctgccaaccccaaaaagcagctcatcctgaaagttatcagtggacagcaactccccaaacctccagactccatgtttggagatcgaggcgagatcattgacccttttgttgaagttgaaattattggattgccagtagattgttgtaaagatcaaacccgtgtggtagatgacaatggatttaaccctgtgtgggaagaaacactgacatttacagtacacatgccagaaatagctttggttcggttccttgtgtgggatcacgatcccattggacgagactttgttggacaaagaactgtgaccttcagcagcttagtgcctggctaccggcatgtctatttggaaggactgacagaagcatccatatttgtacacataaccatcaatgaaatctatggaaagtggagccctttaatactcaaccccagttatactatattgcactttctaggagctacaaagaacagacaactccagggtctgaagggactgttcaataagaatcctaggcacagttcttcagaaaacaattcccattatgtacggaagcgatccattggagatagaattctgcgacgcacagctagcgccccagccaaaggcaggaaaaagagcaaaatgggcttccaagaaatggtggagataaaggattctgtgtccgaggccacaagagatcaagatggcgtgctgaggaggaccacacgcagtttgcaagcacgccctgtctctatgcctgttgacagaaaccttctgggagctttgtcgctgcctgtatctgaaacagcaaaagacattgaaggaaaagaaaactctctagtacaaatctgaataggaaacaacttaagcagaagataaagatggcagaagaaaagggaaagcaagtataaaagatccacattttctaaatttcaacaaaaagttatcatcctcctccagtgctctgctccacaaagataccagccaaggggacaccattgtatctactgcccacatgtcagtcacaggagaacagctgggcatgtcaagtcctaggggtgggagaaccacatcaaatgccacaagcaattgccaggaaaacccctgtcccagcaagtctctctccccaaagcagcatttggctcccgatcctgtagttaaccccacacaagatctgcatggtgtgaaaatcaaggaaaagggtaatcctgaggactttgtggaagggaaaagcatcttgtcaggaagcgtcctttctcatagcaacctagaaattaagaacctggaaggtaataggggtaagggccgagctgcaacatccttttctttgtcagacgtctccatgctctgttctgacatacctgacctacattcaactgcaattctgcaggagagtgtaatttcccatcttattgacaatgtcactttaacaaatgagaatgagccgggcagttccatctcagccctgattggccagtttgatgagaccaacaatcaggctctcacagttgtttctcatcttcataataccagtgtgatgtcaggccattgtcccttgcctagcctgggcctaaaaatgcccatcaagcatggtttttgcaagggaaaatccaagtcttccttcctgtgctcatctccggagctgatagcactctcgagttctgagaccaccaaacatgcaacgaacacagtttatgaaactacctgcactcccatctctaaaaccaaaccagatgatgacctttctagtaaggccaagacagcggccttagaaagcaacctgcctggatcccctaatacttctcgtggctggttaccaaaaagtcctaccaagggagaagactgggaaacactgaagagctgcagccctgcctcttcccctgatttgaccctggaggatgtaatagctgatcccactctctgtttcaattctggggagagcagccttgtggaaattgatggagaatcagaaaatctttctctaacaacctgtgaatataggagagagggcacaagtcaacttgcttctcctttaaaactcaagtacaatcagggtgtggtagaacactttcaaagaggtttgagaaacggctactgtaaagagaccctccgcccttctgtccctgaaatattcaacaatattcaagatgtcaaaactcaaagtatttcttatctagcctatcagggtgctggctttgtgcataatcatttctcagattcagatgcaaaaatgttccagacctgtgtgccccagcaatctagtgctcaagatatgcatgtccctgtacccaagcagttggcacatcttcctttgcctgctctgaaactgcctagtccttgcaaatccaaaagtctgggggacttaacatcagaggacattgcctgcaattttgagagcaagtaccagtgtattagtaagagttttgttacaactggcattagagacaagaagggcgtgactgtgaagacaaagtcgttagagcctatagatgccctgaccgagcagcttcggaagcttgtgtcctttgaccaggaagacaactgccaagtgctatattcaaagcaggatgccaatcagctcccccgggcactggtcaggaagttgtcatccagaagtcagagcagagtgcgcaatattgctagtcgtgccaaggagaaacaggaagccaacaagcagaaagttccaaaccccagcaatggggcaggagtggttcttagaaacaaaccctcagcacccacccctgcagtgaatcgccactccaccggctcctacatcgcaggctacctgaagaacacgaaagggggtggccttgaaggccggggcatcccagagggggcatgcacggctcttcactatggccacgttgaccagttttgttcagataattctgttttgcagactgagccaagcagtgatgataaaccagaaatttattttcttttgagactgtgaattatttaaaactgcattcttaaggttttcaaggtattctgtagaatgtcagagttttcagtaaataagttccttggctttggaatgattttcaaatgtatttttaaacttgtatttgggtctccctttgacttcatgtgttctccctgttaatgcgtttgtatatagatttggtgacatttcccatgtacctattatgatctttctcccttgagttgttgtaaactgtatcagtatgaaatatgtgcatgccctagatgtgaaactcctcagcagctcgggttataatgtgtgtgtgtttcaccaagatgtcctttactgtgtcctcagattgcagtcacaaatgtagtcatttttactctctaactgttgagttgattaagagactttgcaaacgacaaagggatgaattccttactttaatctgttatcatttttcctatgtttccctctttgttcagaagcccagatgcatttttataactcagttttaaaaactttaaaatagttaccttgccttttaggatgttcttatcccacccataatgagagttgaaaggggatggatagctgctccccatgcccttcccactttttggaataggccgtgagggtgtgaggaagaaggctgtcttttgtacataaggacaaaattgtttgttttacataaattttgttacatatttttgctaatggctttgtatgtaacaagaagcgagttgccaaactacctgttgtacttttgaattttctgattgaattacagactgcgaacaacggctttcagaatgagggacttccatcagactctaatgataatagtagcacaaattgaaaacttccccaaagctttcacagaatattttctcataataaaatccaagtgaacagataattagaagaaacccttttccttcagggaaccaagcaactctattttagtactgacatgcattattttcactgtgaattcacttttttattgcatgttcagatgtccctctttgttttttttttttgtaacattaactgcaatgatgttcttcctggaattcatgaaaatataattaaaacacatttttaaac

SEQ ID NO: 22476 - DNA, 6413 bp, Homo sapiens
  source 1..6413: mol_type = unassigned DNA
gagaaagcaggttgtggcggcggcgccctgctcttccccgctcgtctggggcttctgctggctagtggggagaagtgctcttctaggggggcttttctggcccttggcaggggtttggagttggagtcacaggggccaataactcatcaccccagcacttcggaggtggctccttgtgccacggactccgaggagtccttcagctactgaacactcaaagctgaggagggcaatttggttttgatgctgtgccagaaatcttctgacaatgagttactggaacttggaaaaaaggaactgtgtgcagtaccgcaggcattttctggtggacaacagtgtgtttcatgttgaaagatgcatgagtgtgatgcagtccgggacacagatgatcaagctgaaacgtggaaccaaagggcttgtccgcctcttttacctggatgagcaccggacacgcctccgatggcgaccctctaggaagagtgagaaggcaaaaatacttattgattccatttacaaagtgactgagggccggcagtctgaaatattccacagacaagctgaggggaacttcgaccccagctgctgcttcaccatctaccatggcaaccacatggagtccctggacctcatcacctccaaccccgaggaggcccgcacctggatcacaggcctcaagtacctgatggctggcatcagtgatgaagactcccttgccaaaaggcagaggacccatgaccaatgggtgaagcagacctttgaggaagctgataagaatggtgacggcttgctgaatattgaagagatacatcagctgatgcataaactgaatgttaatctgccccgaagaaaagtcagacaaatgtttcaggaagccgacacagatgagaatcagggaactttgacatttgaagagttctgtgttttttacaaaatgatgtctttgagacgagacctttatttgttacttttgagctacagtgacaagaaagatcacctaactgtggaagaactggctcagtttttgaaggtggagcaaaagatgaataatgtgacaacggactattgtcttgacatcataaagaagtttgaagtttcagaagaaaataaggtgaaaaatgttcttggcatagaaggcttcacgaacttcatgcgtagtcctgcctgtgacatatttaacccattgcaccatgaagtgtaccaagacatggatcagcccctctgcaactactacattgcttcctctcacaatacatacctgactggagaccagctcctttctcagtccaaagtggatatgtatgcacgggtgctgcaagagggctgtcgctgtgtggaagttgactgttgggatggcccagatggagagccagtagtacatcatggttacactctcacttcaaaaattctcttcagagatgttgtggagaccatcaacaagcatgcctttgtgaagaatgagtttcctgttatattgtctatcgagaatcactgcagtatccagcagcaaaggaagattgctcagtacctgaaaggaatattcggagacaaactggacctgtcatctgttgatacaggggagtgcaagcagcttccaagccctcaaagtttgaaaggcaaaattctagtgaagggtaagaagttgccttatcaccttggggatgatgcagaggaaggggaagtttctgatgaggacagtgcagatgaaattgaagacgagtgcaaattcaagctccattatagtaatgggaccactgagcatcaggtggaatctttcataaggaaaaaactggagtcactgttaaaagaatctcaaattcgagataaagaagatcctgatagtttcacagtgcgggcactactgaaggccacgcatgaaggcttaaatgcacacctgaagcagagtccagatgtaaaggaaagtggaaagaaatcacatggacgatccctcatgaccaactttggaaaacataagaaaactacaaaatcacggtctaaatcttacagtactgatgatgaggaagacacacagcagagtactggcaaggagggtggccagctgtacagattgggtcgccgaaggaaaaccatgaagctctgccgagaactctctgatttggttgtgtacacaaactccgtggccgctcaggacattgtggatgacggaaccacaggaaatgtgttatcattcagtgaaacaagagcacatcaggttgttcagcaaaaatcagagcagttcatgatttataatcaaaagcaactcacgaggatttacccctctgcctaccgcattgattccagtaacttcaaccctctcccctactggaacgcaggctgccagctagtggcactgaattatcaatctgaaggacgaatgatgcagttaaaccgagccaaattcaaggcaaatggcaattgtggctatgtcctcaaaccccagcaaatgtgcaaaggtactttcaaccctttctctggtgaccctcttcctgccaaccccaaaaagcagctcatcctgaaagttatcagtggacagcaactccccaaacctccagactccatgtttggagatcgaggcgagatcattgacccttttgttgaagttgaaattattggattgccagtagattgttgtaaagatcaaacccgtgtggtagatgacaatggatttaaccctgtgtgggaagaaacactgacatttacagtacacatgccagaaatagctttggttcggttccttgtgtgggatcacgatcccattggacgagactttgttggacaaagaactgtgaccttcagcagcttagtgcctggctaccggcatgtctatttggaaggactgacagaagcatccatatttgtacacataaccatcaatgaaatctatggaaagaacagacaactccagggtctgaagggactgttcaataagaatcctaggcacagttcttcagaaaacaattcccattatgtacggaagcgatccattggagatagaattctgcgacgcacagctagcgccccagccaaaggcaggaaaaagagcaaaatgggcttccaagaaatggtggagataaaggattctgtgtccgaggccacaagagatcaagatggcgtgctgaggaggaccacacgcagtttgcaagcacgccctgtctctatgcctgttgacagaaaccttctgggagctttgtcgctgcctgtatctgaaacagcaaaagacattgaaggaaaagaaaactctctagcagaagataaagatggcagaagaaaagggaaagcaagtataaaagatccacattttctaaatttcaacaaaaagttatcatcctcctccagtgctctgctccacaaagataccagccaaggggacaccattgtatctactgcccacatgtcagtcacaggagaacagctgggcatgtcaagtcctaggggtgggagaaccacatcaaatgccacaagcaattgccaggaaaacccctgtcccagcaagtctctctccccaaagcagcatttggctcccgatcctgtagttaaccccacacaagatctgcatggtgtgaaaatcaaggaaaagggtaatcctgaggactttgtggaagggaaaagcatcttgtcaggaagcgtcctttctcatagcaacctagaaattaagaacctggaaggtaataggggtaagggccgagctgcaacatccttttctttgtcagacgtctccatgctctgttctgacatacctgacctacattcaactgcaattctgcaggagagtgtaatttcccatcttattgacaatgtcactttaacaaatgagaatgagccgggcagttccatctcagccctgattggccagtttgatgagaccaacaatcaggctctcacagttgtttctcatcttcataataccagtgtgatgtcaggccattgtcccttgcctagcctgggcctaaaaatgcccatcaagcatggtttttgcaagggaaaatccaagtcttccttcctgtgctcatctccggagctgatagcactctcgagttctgagaccaccaaacatgcaacgaacacagtttatgaaactacctgcactcccatctctaaaaccaaaccagatgatgacctttctagtaaggccaagacagcggccttagaaagcaacctgcctggatcccctaatacttctcgtggctggttaccaaaaagtcctaccaagggagaagactgggaaacactgaagagctgcagccctgcctcttcccctgatttgaccctggaggatgtaatagctgatcccactctctgtttcaattctggggagagcagccttgtggaaattgatggagaatcagaaaatctttctctaacaacctgtgaatataggagagagggcacaagtcaacttgcttctcctttaaaactcaagtacaatcagggtgtggtagaacactttcaaagaggtttgagaaacggctactgtaaagagaccctccgcccttctgtccctgaaatattcaacaatattcaagatgtcaaaactcaaagtatttcttatctagcctatcagggtgctggctttgtgcataatcatttctcagattcagatgcaaaaatgttccagacctgtgtgccccagcaatctagtgctcaagatatgcatgtccctgtacccaagcagttggcacatcttcctttgcctgctctgaaactgcctagtccttgcaaatccaaaagtctgggggacttaacatcagaggacattgcctgcaattttgagagcaagtaccagtgtattagtaagagttttgttacaactggcattagagacaagaagggcgtgactgtgaagacaaagtcgttagagcctatagatgccctgaccgagcagcttcggaagcttgtgtcctttgaccaggaagacaactgccaagtgctatattcaaagcaggatgccaatcagctcccccgggcactggtcaggaagttgtcatccagaagtcagagcagagtgcgcaatattgctagtcgtgccaaggagaaacaggaagccaacaagcagaaagttccaaaccccagcaatggggcaggagtggttcttagaaacaaaccctcagcacccacccctgcagtgaatcgccactccaccggctcctacatcgcaggctacctgaagaacacgaaagggggtggccttgaaggccggggcatcccagagggggcatgcacggctcttcactatggccacgttgaccagttttgttcagataattctgttttgcagactgagccaagcagtgatgataaaccagaaatttattttcttttgagactgtgaattatttaaaactgcattcttaaggttttcaaggtattctgtagaatgtcagagttttcagtaaataagttccttggctttggaatgattttcaaatgtatttttaaacttgtatttgggtctccctttgacttcatgtgttctccctgttaatgcgtttgtatatagatttggtgacatttcccatgtacctattatgatctttctcccttgagttgttgtaaactgtatcagtatgaaatatgtgcatgccctagatgtgaaactcctcagcagctcgggttataatgtgtgtgtgtttcaccaagatgtcctttactgtgtcctcagattgcagtcacaaatgtagtcatttttactctctaactgttgagttgattaagagactttgcaaacgacaaagggatgaattccttactttaatctgttatcatttttcctatgtttccctctttgttcagaagcccagatgcatttttataactcagttttaaaaactttaaaatagttaccttgccttttaggatgttcttatcccacccataatgagagttgaaaggggatggatagctgctccccatgcccttcccactttttggaataggccgtgagggtgtgaggaagaaggctgtcttttgtacataaggacaaaattgtttgttttacataaattttgttacatatttttgctaatggctttgtatgtaacaagaagcgagttgccaaactacctgttgtacttttgaattttctgattgaattacagactgcgaacaacggctttcagaatgagggacttccatcagactctaatgataatagtagcacaaattgaaaacttccccaaagctttcacagaatattttctcataataaaatccaagtgaacagataattagaagaaacccttttccttcagggaaccaagcaactctattttagtactgacatgcattattttcactgtgaattcacttttttattgcatgttcagatgtccctctttgttttttttttttgtaacattaactgcaatgatgttcttcctggaattcatgaaaatataattaaaacacatttttaaaca

SEQ ID NO: 22477 - DNA, 3525 bp, Homo sapiens
  source 1..3525: mol_type = unassigned DNA
ataatgccttgagggctttaacgcgctgcacgaagcatgcatgtctcatacccaaagtagccacagcgcctgcattcccacaatagcggcagccccgagcagatgcttccagcgtgcttatctggctgtgcttttcactttgggacaaagttctataatcatatctcatggatttattttctccacactataaagcctgaattgtgaagatctcatcatgccataaagggcagcatgagccaagttctgggggctgctaaggatttctttgccttttttccccccaccctttttggaaatgtgtatcaggaaaaggctttgcctttagagagaaattgtactgctcttgccaataatgtgtaatagtattaaatttaatggcagaccttgaagtgtataaaaacttaagtccagaaaaagttgaaagatgcatgagtgtgatgcagtccgggacacagatgatcaagctgaaacgtggaaccaaagggcttgtccgcctcttttacctggatgagcaccggacacgcctccgatggcgaccctctaggaagagtgagaaggcaaaaatacttattgattccatttacaaagtgactgagggccggcagtctgaaatattccacagacaagctgaggggaacttcgaccccagctgctgcttcaccatctaccatggcaaccacatggagtccctggacctcatcacctccaaccccgaggaggcccgcacctggatcacaggcctcaagtacctgatggctggcatcagtgatgaagactcccttgccaaaaggcagaggacccatgaccaatgggtgaagcagacctttgaggaagctgataagaatggtgacggcttgctgaatattgaagagatacatcagctgatgcataaactgaatgttaatctgccccgaagaaaagtcagacaaatgtttcaggaagccgacacagatgagaatcagggaactttgacatttgaagagttctgtgttttttacaaaatgatgtctttgagacgagacctttatttgttacttttgagctacagtgacaagaaagatcacctaactgtggaagaactggctcagtttttgaaggtggagcaaaagatgaataatgtgacaacggactattgtcttgacatcataaagaagtttgaagtttcagaagaaaataaggtgaaaaatgttcttggcatagaaggcttcacgaacttcatgcgtagtcctgcctgtgacatatttaacccattgcaccatgaagtgtaccaagacatggatcagcccctctgcaactactacattgcttcctctcacaatacatacctgactggagaccagctcctttctcagtccaaagtggatatgtatgcacgggtgctgcaagagggctgtcgctgtgtggaagttgactgttgggatggcccagatggagagccagtagtacatcatggttacactctcacttcaaaaattctcttcagagatgttgtggagaccatcaacaagcatgcctttgtgaagaatgagtttcctgttatattgtctatcgagaatcactgcagtatccagcagcaaaggaagattgctcagtacctgaaaggaatattcggagacaaactggacctgtcatctgttgatacaggggagtgcaagcagcttccaagccctcaaagtttgaaaggcaaaattctagtgaagggtaagaagttgccttatcaccttggggatgatgcagaggaaggggaagtttctgatgaggacagtgcagatgaaattgaagacgagtgcaaattcaagctccattatagtaatgggaccactgagcatcaggtggaatctttcataaggaaaaaactggagtcactgttaaaagaatctcaaattcgagataaagaagatcctgatagtttcacagtgcgggcactactgaaggccacgcatgaaggcttaaatgcacacctgaagcagagtccagatgtaaaggaaagtggaaagaaatcacatggacgatccctcatgaccaactttggaaaacataagaaaactacaaaatcacggtctaaatcttacagtactgatgatgaggaagacacacagcagagtactggcaaggagggtggccagctgtacagattgggtcgccgaaggaaaaccatgaagctctgccgagaactctctgatttggttgtgtacacaaactccgtggccgctcaggacattgtggatgacggaaccacaggaaatgtgttatcattcagtgaaacaagagcacatcaggttgttcagcaaaaatcagagcagttcatgatttataatcaaaagcaactcacgaggatttacccctctgcctaccgcattgattccagtaacttcaaccctctcccctactggaacgcaggctgccagctagtggcactgaattatcaatctgaaggacgaatgatgcagttaaaccgagccaaattcaaggcaaatggcaattgtggctatgtcctcaaaccccagcaaatgtgcaaaggtactttcaaccctttctctggtgaccctcttcctgccaaccccaaaaagcagctcatcctgaaagttatcagtggacagcaactccccaaacctccagactccatgtttggagatcgaggcgagatcattgacccttttgttgaagttgaaattattggattgccagtagattgttgtaaagatcaaacccgtgtggtagatgacaatggatttaaccctgtgtgggaagaaacactgacatttacagtacacatgccagaaatagctttggttcggttccttgtgtgggatcacgatcccattggacgagactttgttggacaaagaactgtgaccttcagcagcttagtgcctggctaccggcatgtctatttggaaggactgacagaagcatccatatttgtacacataaccatcaatgaaatctatggaaagaacagacaactccagggtctgaagggactgttcaataagaatcctaggcacagttcttcagaaaacaattcccattatgtacggaagcgatccattggagatagaattctgcgacgcacagctagcgccccagccaaaggcaggaaaaagagcaaaatgggcttccaagaaatggtggagataaaggattctgtgtccgaggccacaagagatcaagatggcgtgctgaggaggaccacacgcagtttgcaagcacgccctgtctctatgcctgttgacagaaaccttctgggagctttgtcgctgcctgtatctgaaacagcaaaagacattgaaggaaaagaaaactctctagactctagcttttgcaggccgactgagcaggctaaagcagaaatgtgcaaagtgcctttccccagacagttagaatgtgtaatgaagatggaaatttccgagacctgaatccccaaacccagactgatctctcttctcttcttgaatataaaagtaagctggcaagatttaaaaaactgaacccaaataaatattcatcatttttttcttc

SEQ ID NO: 22478 - DNA, 4031 bp, Homo sapiens
  source 1..4031: mol_type = unassigned DNA
ggcgcgcacctgggtcactggcctgcgctacctcatggccggcatcagcgacgaggacagcctggctcgccgccagcgcaccagggaccaagtggctgaagcagacgtttgacgaggccgacaagaacggggatggcagcctgagcattggcgaggtcctgcagctgctgcacaagctcaacgtgaacctgccccggcagagggtgaagcagatgttcagggaagcggacacggatgaccaccaagggacgctgggttttgaagagttctgtgccttctacaagatgatgtccacccgccgggacctctacctgctcatgctgacctacagcaaccacaaggaccacctggatgccgccagcctgcagcgcttcctgcaggtggagcagaagatggcgggtgtgaccctcgagagctgccaggacatcatcgagcagtttgagccatgcccagaaaacaagagtaaggggctgctgggcattgatggcttcaccaactacaccaggagccctgctggtgacatcttcaaccctgagcaccaccatgtgcaccaggacatgacgcagccgctgagccactacttcatcacctcgtcccacaacacctacctcgtgggtgaccagctcatgtcccagtcacgggtggacatgtatgcttgggtcctgcaggctggctgccgctgcgtggaggtggactgctgggatgggcccgacggggagcccattgtgcaccatggctacactctgacttccaagatcctcttcaaagacgtcattgaaaccatcaacaaatatgccttcatcaagaatgagtacccagtgatcctgtccatcgaaaaccactgcagtgtcatccagcagaagaaaatggcccagtatctgactgacatccttggggacaagctggacctgtcatcagtgagcagtgaagatgccaccacactcccctctccacagatgctcaagggcaagatcctcgtgaaggggaagaagctcccagccaacatcagcgaggatgcggaggaaggcgaggtgtctgatgaggacagtgctgatgagattgacgatgactgcaagctcctcaatggggatgcatccaccaatcgaaagcgtgtagaaaacactgctaagaggaaactggattccctcatcaaagagtcgaagattcgggactgtgaggaccccaacaacttctccgtctccacactgtccccatctggaaagctcggacgcaagagcaaggctgaagaggacgtggagtctggggaggatgccggggccagcagacgcaatggccgcctcgtcgtgggaagcttctccaggcgcaagaagaagggcagcaagctgaagaaggcggccagcgtggaggagggagatgagggtcaggactccccgggaggccagagccgaggggcgacccggcagaagaagaccatgaagctgtcccgggccctctctgacctggtgaagtacaccaagtccgtggccacccacgacatagagatggaggcggcgtccagctggcaggtgtcgtccttcagcgagaccaaggcccaccagattctgcagcagaagccggcgcagtacctacgcttcaaccagcagcagctctcccgcatctacccctcctcctaccgtgtggactccagcaactacaacccgcagcccttctggaacgccggctgccaaatgggcgtgttcaaccccaactcggaggaccccctgcccgggcagctcaagaagcagctggtgctccggatcatcagtggccagcagcttcccaagccgcgcgactccatgctgggggaccgtggggagatcatcgacccctttgtggaggtggagatcattgggctccctgtggactgcagcagggagcagacccgcgtggtggacgacaacgggttcaaccccacctgggaggagaccctggttttcatggtgcacatgccggagatcgcgctggtccgcttcctcgtctgggaccacgatcccatcgggcgtgacttcattggccagaggacgctggccttcagcagcatgatgccaggctacagacacgtgtacctagaagggatggaagaggcctccatcttcgtgcatgtggctgtcagtgacatcagcggtaaggtcaagcaggctctgggcctaaaaggcctcttcctccgaggcccaaagcccggctcgctggacagtcatgctgctgggcggcccccggcccggccctccgttagccagcggatcctgcggcgcacggccagcgccccgaccaagagccagaagccgggccgcaggggcttcccggagctggtcctgggtacacgggacacaggctccaagggggtggcagacgatgtggtgccccccgggcccggacctgctccggaagccccagcccaggaggggcccggcagcggcagcccccgagacacccgccccctctccacgcagcggccactccccccactgtgcagcctggaaaccatcgctgaggagcccgccccaggccctggtcccccgccaccagcggctgtccccaccagctcttctcagggacggcccccataccccacaggacccggagccaatgtggcaagccccctagaggacactgaggagccccgagacagcaggcctcggccgtgcaacggcgagggcgccggcggggcatacgagagggcccccggcagccagacggacggcaggagccagccccggaccctgggccacctgcccgtgattagaagggtgaagagtgaggggcaggtgcccacggagcccctgggagggtggcggcccctggccgctccctttccagctcctgccgtgtactccgatgccacgggcagtgacccgctgtggcagcggctggagccatgtggccaccgagacagcgtttcctcctcctccagcatgtcatccagcgacactgtcattgacctctccctgcccagcctgggcctgggccgcagccgtgagaacctcgctggagcccacatgggacgcctgccccccaggccccactcggcttcggctgcccgcccagacctgccacctgtgaccaagagcaaatccaaccccaaccttcgggctacaggccagcggcctcccatacctgacgaactgcagcccaggtccctggccccaaggatggctggcctccccttccggcctccctggggctgcctttccctggtgggcgtgcaggactgccccgtggctgccaagtccaagagcctgggcgacctcactgctgatgactttgcccctagctttgagggcggctcccgcagactgagccacagcctgggcctcccgggagggacacggcgggtgtcggggccaggggtgagacgggacaccctgacagagcagctgcgctggctcactgtcttccagcaggcaggagacatcacgtcacccaccagcctgggcccggctggggagggggtggcagggggccctggttttgtgcggcgctcctcctcccgcagccacagccgcgtgcgtgccattgccagccgggcccgccaggcccaggagcggcagcagagactgcagggcctgggccggcagggacccccagaagaggagcggggcacccccgagggcgcctgctccgtgggccacgagggcagtgtggatgcaccagcaccctccaagggagccctcgggccagcatccgcggctgctgaaaacctggtcctgctccgcctctgaccgtcagtggtgggaacctgggcggctctggaggcccagggcaggggtgggcgtgttgtttgctcaggaaacagggcagccaggcccccaaaactgtgtccccctggctgccctgtgtcccctccacccctgcctccctcctgcccctgctcccggggaggaaaggctaaagctgctggcccggggcccacaggaggggcttcgaggctggccctgccaggcagttttcccggcgttttaggatctgtacatagagaaatatttaaatttttagaagcaaaacttatacaacattaaaatgataccaagtcc

SEQ ID NO: 22479 - DNA, 1909 bp, Homo sapiens
  source 1..1909: mol_type = unassigned DNA
gcggctgcgtcagggattccttggtggccctggagggtggataggctggcctgggggccatcaggacagcaggtgacggtcaggccaatgccagccgggcctgggcacagccctgtgggggcttcggagggccctgaggaggaggaggaagaggcagaggagagaaggccccacggaggtcctgtcgccagcgctgccactgcctgacctccgctgcccgaaggccggtgggcctctgtggcctccgtgaagcaggcccggctgtcgtcaggccatgtctggtccatggccctcccccgacagccggaccaagggaacggtggcctggctggcggaggtactcctctgggttggagggagtgtggtgctgtcttcagagtggcagctcggccccctggtggagcggtgcatgggtgccatgcaagaggggatgcagatggtgaagctgcgtggcggctccaagggcctggtccgcttctactacctggacgagcaccgctcctgcatccgctggaggccctcacgcaagaacgagaaggccaagatctccatcgactccatccaggaggtgagtgaggggcggcagtcggaggtcttccagcgctaccctgacggcagcttcatcatcgacccctttgtggaggtggagatcattgggctccctgtggactgcagcagggagcagacccgcgtggtggacgacaacgggttcaaccccacctgggaggagaccctggttttcatggtgcacatgccggagatcgcgctggtccgcttcctcgtctgggaccacgatcccatcgggcgtgacttcattggccagaggacgctggccttcagcagcatgatgccaggctacagacacgtgtacctagaagggatggaagaggcctccatcttcgtgcatgtggctgtcagtgacatcagcggtaaggtcaagcaggctctgggcctaaaaggcctcttcctccgaggcccaaagcccggctcgctggacagtcatgctgctgggcggcccccggcccggccctccgttagccagcggatcctgcggcgcacggccagcgccccgaccaagagccagaagccgggccgcaggggcttcccggagctggtcctgggtacacgggacacaggctccaagggggtggcagacgatgtggtgccccccgggcccggacctgctccggaagccccagcccaggaggggcccggcagcggcagcccccgaggtaaggcgccagctgcggtggcagagaagagccctgtgcgagtgcggcccccgcgtgtcctggacggccccgggcctgctgggatggccgccacatgcatgaagtgtgtggtgggatcctgcgccggcgtgaacaccgggggcctgcagagggagcggccacccagcccggggcctgcaagcaggcaggcagccattcgccagcagccccgggcccgggctgactcactgggggccccctgctgtggcctggaccctcacgctatcccggggagaagcagagaggcccccaagggtcctggggcctggaggcagggtccaggcggtagcggctccatgtcctcggactccagcagcccagacagcccgggcatccccgaaaggtccccccgctggcctgagggtgcctgcaggcaaccgggggccctgcagggagagatgagtgccttgtttgctcaaaagctggaggagatcaggagtaaatcccccatgttctccgccggtaagcccctcttgccctgcgtggtcctcccgcacgcccctggcatggctgggcctgggtcacctgctgctgcttctgcgtggacggtgtcgcctcgtgtgctcgtgctcgtggctctgtatccgtggcactgtctccgtggcactctgctcccttggcttgcctgtggcccatag

SEQ ID NO: 22480 - DNA, 6453 bp, Homo sapiens
  source 1..6453: mol_type = unassigned DNA
cacagggaacgggtagggtcccacggtttggggagagacatggcagtcctcaagggctgggatcagggcgcagccagggtttctgatggctttgctgatggtcaggacccaggcatgccaggcaaggcctcagcccagcagttgccaagcgtgtagccactttgggcccgtggagagagtcgcgctgcggagcccccagggggacctgaggtcacaagagcctcgatgcacctgagcgcggagctgggggtccctggagccgctgtccccacctgcggcgctggagccctggaggtgtccaggggcttccttggaacgtggagacgtgctggttaaacgtggagccccgggccagccgggcactgggggctgcaggtggagggaggtggatgctctccctcgtgggggcgtgtcttttccacaggaaagggaaagggggagggacacgggtcagcagtggggggctgtgcagtctcgcagatcttcacccttggttcttgaactctggaccctgagccctgccgagggtcccgcaaaggtgggcaaggagctcccggctgcttggtctccgcagtgttggggctgccagcagggggacgctgggcccccggggacctgacccgtgctccctccccaccccgcagtctccatcgactccatccaggaggtgagtgaggggcggcagtcggaggtcttccagcgctaccctgacggcagcttcgaccccaactgctgcttcagcatctaccacggcagccaccgcgagtcgctggacctggtctccaccagcagcgaggtggcgcgcacctgggtcactggcctgcgctacctcatggccggcatcagcgacgaggacagcctggctcgccgccagcgcaccagggaccagtggctgaagcagacgtttgacgaggccgacaagaacggggatggcagcctgagcattggcgaggtcctgcagctgctgcacaagctcaacgtgaacctgccccggcagagggtgaagcagatgttcagggaagcggacacggatgaccaccaagggacgctgggttttgaagagttctgtgccttctacaagatgatgtccacccgccgggacctctacctgctcatgctgacctacagcaaccacaaggaccacctggatgccgccagcctgcagcgcttcctgcaggtggagcagaagatggcgggtgtgaccctcgagagctgccaggacatcatcgagcagtttgagccatgcccagaaaacaagagtaaggggctgctgggcattgatggcttcaccaactacaccaggagccctgctggtgacatcttcaaccctgagcaccaccatgtgcaccaggacatgacgcagccgctgagccactacttcatcacctcgtcccacaacacctacctcgtgggtgaccagctcatgtcccagtcacgggtggacatgtatgcttgggtcctgcaggctggctgccgctgcgtggaggtggactgctgggatgggcccgacggggagcccattgtgcaccatggctacactctgacttccaagatcctcttcaaagacgtcattgaaaccatcaacaaatatgccttcatcaagaatgagtacccagtgatcctgtccatcgaaaaccactgcagtgtcatccagcagaagaaaatggcccagtatctgactgacatccttggggacaagctggacctgtcatcagtgagcagtgaagatgccaccacactcccctctccacagatgctcaagggcaagatcctcgtgaaggggaagaagctcccagccaacatcagcgaggatgcggaggaaggcgaggtgtctgatgaggacagtgctgatgagattgacgatgactgcaagctcctcaatggggatgcatccaccaatcgaaagcgtgtagaaaacactgctaagaggaaactggattccctcatcaaagagtcgaagattcgggactgtgaggaccccaacaacttctccgtctccacactgtccccatctggaaagctcggacgcaagagcaaggctgaagaggacgtggagtctggggaggatgccggggccagcagacgcaatggccgcctcgtcgtgggaagcttctccaggcgcaagaagaagggcagcaagctgaagaaggcggccagcgtggaggagggagatgagggtcaggactccccgggaggccagagccgaggggcgacccggcagaagaagaccatgaagctgtcccgggccctctctgacctggtgaagtacaccaagtccgtggccacccacgacatagagatggaggcggcgtccagctggcaggtgtcgtccttcagcgagaccaaggcccaccagattctgcagcagaagccggcgcagtacctacgcttcaaccagcagcagctctcccgcatctacccctcctcctaccgtgtggactccagcaactacaacccgcagcccttctggaacgccggctgccaaatggttgccctgaactaccagtcagaggggcggatgctgcagctgaaccgagccaagttcagcgccaacggtggctgcggctacgtactcaagcctgggtgcatgtgccagggcgtgttcaaccccaactcggaggaccccctgcccgggcagctcaagaagcagctggtgctccggatcatcagtggccagcagcttcccaagccgcgcgactccatgctgggggaccgtggggagatcatcgacccctttgtggaggtggagatcattgggctccctgtggactgcagcagggagcagacccgcgtggtggacgacaacgggttcaaccccacctgggaggagaccctggttttcatggtgcacatgccggagatcgcgctggtccgcttcctcgtctgggaccacgatcccatcgggcgtgacttcattggccagaggacgctggccttcagcagcatgatgccaggctacagacacgtgtacctagaagggatggaagaggcctccatcttcgtgcatgtggctgtcagtgacatcagcggtaaggtcaagcaggctctgggcctaaaaggcctcttcctccgaggcccaaagcccggctcgctggacagtcatgctgctgggcggcccccggcccggccctccgttagccagcggatcctgcggcgcacggccagcgccccgaccaagagccagaagccgggccgcaggggcttcccggagctggtcctgggtacacgggacacaggctccaagggggtggcagacgatgtggtgccccccgggcccggacctgctccggaagccccagcccaggaggggcccggcagcggcagcccccgaggtaaggcgccagctgcggtggcagagaagagccctgtgcgagtgcggcccccgcgtgtcctggacggccccgggcctgctgggatggccgccacatgcatgaagtgtgtggtgggatcctgcgccggcgtgaacaccgggggcctgcagagggagcggccacccagcccggggcctgcaagcaggcaggcagccattcgccagcagccccgggcccgggctgactcactgggggccccctgctgtggcctggaccctcacgctatcccggggagaagcagagaggcccccaagggtcctggggcctggaggcagggtccaggcggtagcggctccatgtcctcggactccagcagcccagacagcccgggcatccccgaaaggtccccccgctggcctgagggtgcctgcaggcaaccgggggccctgcagggagagatgagtgccttgtttgctcaaaagctggaggagatcaggagtaaatcccccatgttctccgccggtaagcccctcttgccctgcgtggtcctcccgcacgcccctggcatggctgggcctgggtcacctgctgctgcttctgcgtggacggtgtcgcctcgtgtgctcgtgctcgtggctctgtatccgtggcactgtctccgtggcactctgctcccttggcttgcctgtggcccatagccccagccctcctgtctgagcttgaggccctgggacttgggtggagctggtttgaggcccgacaggctgggaagaaccagctgctcttgctgagggtctggggccgggactgtggcctgacatgctgggcccctccggctgggcgcttccccaaactcacctcctgggcggctggcgacctgcatggcccctgatgcctttcctgggactgggggccacgtaccatcccattcccacctccctctagggcaggctccaggggtccctactgggaagtctgatgtgggcaggtagtgcagctgctgggcgtctcctgcgcccctgggacgcctggagcctgctgagtgctgcgtggagtagattccctgggccccagggcttcgctgctttgggctgaagcaccccactagaagggtgtctccttagcctggagggagggacatacacggagcccgccccacaccaccctgcccctccagacccccctgaccaagctttcctttctgcccccacccacgctgcctccgtagttaggaactgagagcggcgagtgacaggtaacggggcccagccccggtgtcccgtgctgtcccagcccaaggagggccccgtgtgcggcacagggcgtggactgggccccagcagcagcagggtggggacaccgagtgtgccgcgcccgggggatgcctcggggtgggagctgggcctggcgaccctcggcacagggcaccggggacaccaccctgatccgactcctctccgcctctctccctgcctccctctctctcttctgcttctccctctggctctctctcactcccccacctccccacagacacccgccccctctccacgcagcggccactccccccactgtgcagcctggaaaccatcgctgaggagcccgccccaggccctggtcccccgccaccagcggctgtccccaccagctcttctcagggacggcccccataccccacaggacccggagccaatgtggcaagccccctagaggacactgaggagccccgagacagcaggcctcggccgtgcaacggcgagggcgccggcggggcatacgagagggcccccggcagccagacggacggcaggagccagccccggaccctgggccacctgcccgtgattagaagggtgaagagtgaggggcaggtgcccacggagcccctgggagggtggcggcccctggccgctccctttccagctcctgccgtgtactccgatgccacgggcagtgacccgctgtggcagcggctggagccatgtggccaccgagacagcgtttcctcctcctccagcatgtcatccagcgacactgtcattgacctctccctgcccagcctgggcctgggccgcagccgtgagaacctcgctggagcccacatgggacgcctgccccccaggccccactcggcttcggctgcccgcccagacctgccacctgtgaccaagagcaaatccaaccccaaccttcgggctacaggccagcggcctcccatacctgacgaactgcagcccaggtccctggccccaaggatggctggcctccccttccggcctccctggggctgcctttccctggtgggcgtgcaggactgccccgtggctgccaagtccaagagcctgggcgacctcactgctgatgactttgcccctagctttgagggcggctcccgcagactgagccacagcctgggcctcccgggagggacacggcgggtgtcggggccaggggtgagacgggacaccctgacagagcagctgcgctggctcactgtcttccagcaggcaggagacatcacgtcacccaccagcctgggcccggctggggagggggtggcagggggccctggttttgtgcggcgctcctcctcccgcagccacagccgcgtgcgtgccattgccagccgggcccgccaggcccaggagcggcagcagagactgcagggcctgggccggcagggacccccagaagaggagcggggcacccccgagggcgcctgctccgtgggccacgagggcagtgtggatgcaccagcaccctccaagggagccctcgggccagcatccgcggctgctgaaaacctggtcctgctccgcctctgaccgtcagtggtgggaacctgggcggctctggaggcccagggcaggggtgggcgtgttgtttgctcaggaaacagggcagccaggcccccaaaactgtgtccccctggctgccctgtgtcccctccacccctgcctccctcctgcccctgctcccggggaggaaaggctaaagctgctggcccggggcccacaggaggggcttcgaggctggccctgccaggcagttttcccggcgttttaggatctgtacatagagaaatatttaaatttttagaagcaaaacttatacaacattaaaatgataccaagtccctttc

SEQ ID NO: 22481 - DNA, 3949 bp, Homo sapiens
  source 1..3949: mol_type = unassigned DNA
tggagcggtgcatgggtgccatgcaagaggggatgcagatggtgaagctgcgtggcggctccaagggcctggtccgcttctactacctggacgagcaccgctcctgcatccgctggaggccctcacgcaagaacgagaaggccaagatctccatcgactccatccaggaggtgagtgaggggcggcagtcggaggtcttccagcgctaccctgacggcagcttcgacccctttgtggaggtggagatcattgggctccctgtggactgcagcagggagcagacccgcgtggtggacgacaacgggttcaaccccacctgggaggagaccctggttttcatggtgcacatgccggagatcgcgctggtccgcttcctcgtctgggaccacgatcccatcgggcgtgacttcattggccagaggacgctggccttcagcagcatgatgccaggctacagacacgtgtacctagaagggatggaagaggcctccatcttcgtgcatgtggctgtcagtgacatcagcggtaaggtcaagcaggctctgggcctaaaaggcctcttcctccgaggcccaaagcccggctcgctggacagtcatgctgctgggcggcccccggcccggccctccgttagccagcggatcctgcggcgcacggccagcgccccgaccaagagccagaagccgggccgcaggggcttcccggagctggtcctgggtacacgggacacaggctccaagggggtggcagacgatgtggtgccccccgggcccggacctgctccggaagccccagcccaggaggggcccggcagcggcagcccccgaggtaaggcgccagctgcggtggcagagaagagccctgtgcgagtgcggcccccgcgtgtcctggacggccccgggcctgctgggatggccgccacatgcatgaagtgtgtggtgggatcctgcgccggcgtgaacaccgggggcctgcagagggagcggccacccagcccggggcctgcaagcaggcaggcagccattcgccagcagccccgggcccgggctgactcactgggggccccctgctgtggcctggaccctcacgctatcccggggagaagcagagaggcccccaagggtcctggggcctggaggcagggtccaggcggtagcggctccatgtcctcggactccagcagcccagacagcccgggcatccccgaaaggtccccccgctggcctgagggtgcctgcaggcaaccgggggccctgcagggagagatgagtgccttgtttgctcaaaagctggaggagatcaggagtaaatcccccatgttctccgccggtaagcccctcttgccctgcgtggtcctcccgcacgcccctggcatggctgggcctgggtcacctgctgctgcttctgcgtggacggtgtcgcctcgtgtgctcgtgctcgtggctctgtatccgtggcactgtctccgtggcactctgctcccttggcttgcctgtggcccatagccccagccctcctgtctgagcttgaggccctgggacttgggtggagctggtttgaggcccgacaggctgggaagaaccagctgctcttgctgagggtctggggccgggactgtggcctgacatgctgggcccctccggctgggcgcttccccaaactcacctcctgggcggctggcgacctgcatggcccctgatgcctttcctgggactgggggccacgtaccatcccattcccacctccctctagggcaggctccaggggtccctactgggaagtctgatgtgggcaggtagtgcagctgctgggcgtctcctgcgcccctgggacgcctggagcctgctgagtgctgcgtggagtagattccctgggccccagggcttcgctgctttgggctgaagcaccccactagaagggtgtctccttagcctggagggagggacatacacggagcccgccccacaccaccctgcccctccagacccccctgaccaagctttcctttctgcccccacccacgctgcctccgtagttaggaactgagagcggcgagtgacaggtaacggggcccagccccggtgtcccgtgctgtcccagcccaaggagggccccgtgtgcggcacagggcgtggactgggccccagcagcagcagggtggggacaccgagtgtgccgcgcccgggggatgcctcggggtgggagctgggcctggcgaccctcggcacagggcaccggggacaccaccctgatccgactcctctccgcctctctccctgcctccctctctctcttctgcttctccctctggctctctctcactcccccacctccccacagacacccgccccctctccacgcagcggccactccccccactgtgcagcctggaaaccatcgctgaggagcccgccccaggccctggtcccccgccaccagcggctgtccccaccagctcttctcagggacggcccccataccccacaggacccggagccaatgtggcaagccccctagaggacactgaggagccccgagacagcaggcctcggccgtgcaacggcgagggcgccggcggggcatacgagagggcccccggcagccagacggacggcaggagccagccccggaccctgggccacctgcccgtgattagaagggtgaagagtgaggggcaggtgcccacggagcccctgggagggtggcggcccctggccgctccctttccagctcctgccgtgtactccgatgccacgggcagtgacccgctgtggcagcggctggagccatgtggccaccgagacagcgtttcctcctcctccagcatgtcatccagcgacactgtcattgacctctccctgcccagcctgggcctgggccgcagccgtgagaacctcgctggagcccacatgggacgcctgccccccaggccccactcggcttcggctgcccgcccagacctgccacctgtgaccaagagcaaatccaaccccaaccttcgggctacaggccagcggcctcccatacctgacgaactgcagcccaggtccctggccccaaggatggctggcctccccttccggcctccctggggctgcctttccctggtgggcgtgcaggactgccccgtggctgccaagtccaagagcctgggcgacctcactgctgatgactttgcccctagctttgagggcggctcccgcagactgagccacagcctgggcctcccgggagggacacggcgggtgtcggggccaggggtgagacgggacaccctgacagagcagctgcgctggctcactgtcttccagcaggcaggagacatcacgtcacccaccagcctgggcccggctggggagggggtggcagggggccctggttttgtgcggcgctcctcctcccgcagccacagccgcgtgcgtgccattgccagccgggcccgccaggcccaggagcggcagcagagactgcagggcctgggccggcagggacccccagaagaggagcggggcacccccgagggcgcctgctccgtgggccacgagggcagtgtggatgcaccagcaccctccaagggagccctcgggccagcatccgcggctgctgaaaacctggtcctgctccgcctctgaccgtcagtggtgggaacctgggcggctctggaggcccagggcaggggtgggcgtgttgtttgctcaggaaacagggcagccaggcccccaaaactgtgtccccctggctgccctgtgtcccctccacccctgcctccctcctgcccctgctcccggggaggaaaggctaaagctgctggcccggggcccacaggaggggcttcgaggctggccctgccaggcagttttcccggcgttttaggatctgtacatagagaaatatttaaatttttagaagcaaaacttatacaacattaaaatgataccaagtccctttc

SEQ ID NO: 22482 - DNA, 4837 bp, Homo sapiens
  source 1..4837: mol_type = unassigned DNA
gcggctgcgtcagggattccttggtggccctggagggtggataggctggcctgggggccatcaggacagcaggtgacggtcaggccaatgccagccgggcctgggcacagccctgtgggggcttcggagggccctgaggaggaggaggaagaggcagaggagagaaggccccacggaggtcctgtcgccagcgctgccactgcctgacctccgctgcccgaaggccggtgggcctctgtggcctccgtgaagcaggcccggctgtcgtcaggccatgtctggtccatggccctcccccgacagccggaccaagggaacggtggcctggctggcggaggtactcctctgggttggagggagtgtggtgctgtcttcagagtggcagctcggccccctggtggagcggtgcatgggtgccatgcaagaggggatgcagatggtgaagctgcgtggcggctccaagggcctggtccgcttctactacctggacgagcaccgctcctgcatccgctggaggccctcacgcaagaacgagaaggccaagatctccatcgactccatccaggaggtgagtgaggggcggcagtcggaggtcttccagcgctaccctgacggcagcttcgaccccaactgctgcttcagcatctaccacggcagccaccgcgagtcgctggacctggtctccaccagcagcgaggtggcgcgcacctgggtcactggcctgcgctacctcatggccggcatcagcgacgaggacagcctggctcgccgccagcgcaccagggaccagtggctgaagcagacgtttgacgaggccgacaagaacggggatggcagcctgagcattggcgaggtcctgcagctgctgcacaagctcaacgtgaacctgccccggcagagggtgaagcagatgttcagggaagcggacacggatgaccaccaagggacgctgggttttgaagagttctgtgccttctacaagatgatgtccacccgccgggacctctacctgctcatgctgacctacagcaaccacaaggaccacctggatgccgccagcctgcagcgcttcctgcaggtggagcagaagatggcgggtgtgaccctcgagagctgccaggacatcatcgagcagtttgagccatgcccagaaaacaagagtaaggggctgctgggcattgatggcttcaccaactacaccaggagccctgctggtgacatcttcaaccctgagcaccaccatgtgcaccaggacatgacgcagccgctgagccactacttcatcacctcgtcccacaacacctacctcgtgggtgaccagctcatgtcccagtcacgggtggacatgtatgcttgggtcctgcaggctggctgccgctgcgtggaggtggactgctgggatgggcccgacggggagcccattgtgcaccatggctacactctgacttccaagatcctcttcaaagacgtcattgaaaccatcaacaaatatgccttcatcaagaatgagtacccagtgatcctgtccatcgaaaaccactgcagtgtcatccagcagaagaaaatggcccagtatctgactgacatccttggggacaagctggacctgtcatcagtgagcagtgaagatgccaccacactcccctctccacagatgctcaagggcaagatcctcgtgaaggggaagaagctcccagccaacatcagcgaggatgcggaggaaggcgaggtgtctgatgaggacagtgctgatgagattgacgatgactgcaagctcctcaatggggatgcatccaccaatcgaaagcgtgtagaaaacactgctaagaggaaactggattccctcatcaaagagtcgaagattcgggactgtgaggaccccaacaacttctccgtctccacactgtccccatctggaaagctcggacgcaagagcaaggctgaagaggacgtggagtctggggaggatgccggggccagcagacgcaatggccgcctcgtcgtgggaagcttctccaggcgcaagaagaagggcagcaagctgaagaaggcggccagcgtggaggagggagatgagggtcaggactccccgggaggccagagccgaggggcgacccggcagaagaagaccatgaagctgtcccgggccctctctgacctggtgaagtacaccaagtccgtggccacccacgacatagagatggaggcggcgtccagctggcaggtgtcgtccttcagcgagaccaaggcccaccagattctgcagcagaagccggcgcagtacctacgcttcaaccagcagcagctctcccgcatctacccctcctcctaccgtgtggactccagcaactacaacccgcagcccttctggaacgccggctgccaaatggttgccctgaactaccagtcagaggggcggatgctgcagctgaaccgagccaagttcagcgccaacggtggctgcggctacgtactcaagcctgggtgcatgtgccagggcgtgttcaaccccaactcggaggaccccctgcccgggcagctcaagaagcagctggtgctccggatcatcagtggccagcagcttcccaagccgcgcgactccatgctgggggaccgtggggagatcatcgacccctttgtggaggtggagatcattgggctccctgtggactgcagcagggagcagacccgcgtggtggacgacaacgggttcaaccccacctgggaggagaccctggttttcatggtgcacatgccggagatcgcgctggtccgcttcctcgtctgggaccacgatcccatcgggcgtgacttcattggccagaggacgctggccttcagcagcatgatgccaggctacagacacgtgtacctagaagggatggaagaggcctccatcttcgtgcatgtggctgtcagtgacatcagcggtaaggtcaagcaggctctgggcctaaaaggcctcttcctccgaggcccaaagcccggctcgctggacagtcatgctgctgggcggcccccggcccggccctccgttagccagcggatcctgcggcgcacggccagcgccccgaccaagagccagaagccgggccgcaggggcttcccggagctggtcctgggtacacgggacacaggctccaagggggtggcagacgatgtggtgccccccgggcccggacctgctccggaagccccagcccaggaggggcccggcagcggcagcccccgagacacccgccccctctccacgcagcggccactccccccactgtgcagcctggaaaccatcgctgaggagcccgccccaggccctggtcccccgccaccagcggctgtccccaccagctcttctcagggacggcccccataccccacaggacccggagccaatgtggcaagccccctagaggacactgaggagccccgagacagcaggcctcggccgtgcaacggcgagggcgccggcggggcatacgagagggcccccggcagccagacggacggcaggagccagccccggaccctgggccacctgcccgtgattagaagggtgaagagtgaggggcaggtgcccacggagcccctgggagggtggcggcccctggccgctccctttccagctcctgccgtgtactccgatgccacgggcagtgacccgctgtggcagcggctggagccatgtggccaccgagacagcgtttcctcctcctccagcatgtcatccagcgacactgtcattgacctctccctgcccagcctgggcctgggccgcagccgtgagaacctcgctggagcccacatgggacgcctgccccccaggccccactcggcttcggctgcccgcccagacctgccacctgtgaccaagagcaaatccaaccccaaccttcgggctacaggccagcggcctcccatacctgacgaactgcagcccaggtccctggccccaaggatggctggcctccccttccggcctccctggggctgcctttccctggtgggcgtgcaggactgccccgtggctgccaagtccaagagcctgggcgacctcactgctgatgactttgcccctagctttgagggcggctcccgcagactgagccacagcctgggcctcccgggagggacacggcgggtgtcggggccaggggtgagacgggacaccctgacagagcagctgcgctggctcactgtcttccagcaggcaggagacatcacgtcacccaccagcctgggcccggctggggagggggtggcagggggccctggttttgtgcggcgctcctcctcccgcagccacagccgcgtgcgtgccattgccagccgggcccgccaggcccaggagcggcagcagagactgcagggcctgggccggcagggacccccagaagaggagcggggcacccccgagggcgcctgctccgtgggccacgagggcagtgtggatgcaccagcaccctccaagggagccctcgggccagcatccgcggctgctgaaaacctggtcctgctccgcctctgaccgtcagtggtgggaacctgggcggctctggaggcccagggcaggggtgggcgtgttgtttgctcaggaaacagggcagccaggcccccaaaactgtgtccccctggctgccctgtgtcccctccacccctgcctccctcctgcccctgctcccggggaggaaaggctaaagctgctggcccggggcccacaggaggggcttcgaggctggccctgccaggcagttttcccggcgttttaggatctgtacatagagaaatatttaaatttttagaagcaaaacttatacaacattaaaatgataccaagtcc

SEQ ID NO: 22483 - DNA, 4729 bp, Homo sapiens
  source 1..4729: mol_type = unassigned DNA
gcggctgcgtcagggattccttggtggccctggagggtggataggctggcctgggggccatcaggacagcaggtgacggtcaggccaatgccagccgggcctgggcacagccctgtgggggcttcggagggccctgaggaggaggaggaagaggcagaggagagaaggccccacggaggtcctgtcgccagcgctgccactgcctgacctccgctgcccgaaggccggtgggcctctgtggcctccgtgaagcaggcccggctgtcgtcaggccatgtctggtccatggccctcccccgacagccggaccaagggaacggtggcctggctggcggaggtactcctctgggttggagggagtgtggtgctgtcttcagagtggcagctcggccccctggtggagcggtgcatgggtgccatgcaagaggggatgcagatggtgaagctgcgtggcggctccaagggcctggtccgcttctactacctggacgagcaccgctcctgcatccgctggaggccctcacgcaagaacgagaaggccaagatctccatcgactccatccaggaggtgagtgaggggcggcagtcggaggtcttccagcgctaccctgacggcagcttcgaccccaactgctgcttcagcatctaccacggcagccaccgcgagtcgctggacctggtctccaccagcagcgaggtggcgcgcacctgggtcactggcctgcgctacctcatggccggcatcagcgacgaggacagcctggctcgccgccagcgcaccagggaccaatggctgaagcagacgtttgacgaggccgacaagaacggggatggcagcctgagcattggcgaggtcctgcagctgctgcacaagctcaacgtgaacctgccccggcagagggtgaagcagatgttcagggaagcggacacggatgaccaccaagggacgctgggttttgaagagttctgtgccttctacaagatgatgtccacccgccgggacctctacctgctcatgctgacctacagcaaccacaaggaccacctggatgccgccagcctgcagcgcttcctgcaggtggagcagaagatggcgggtgtgaccctcgagagctgccaggacatcatcgagcagtttgagccatgcccagaaaacaagagtaaggggctgctgggcattgatggcttcaccaactacaccaggagccctgctggtgacatcttcaaccctgagcaccaccatgtgcaccaggacatgacgcagccgctgagccactacttcatcacctcgtcccacaacacctacctcgtgggtgaccagctcatgtcccagtcacgggtggacatgtatgcttgggtcctgcaggctggctgccgctgcgtggaggtggactgctgggatgggcccgacggggagcccattgtgcaccatggctacactctgacttccaagatcctcttcaaagacgtcattgaaaccatcaacaaatatgccttcatcaagaatgagtacccagtgatcctgtccatcgaaaaccactgcagtgtcatccagcagaagaaaatggcccagtatctgactgacatccttggggacaagctggacctgtcatcagtgagcagtgaagatgccaccacactcccctctccacagatgctcaagggcaagatcctcgtgaaggggaagaagctcccagccaacatcagcgaggatgcggaggaaggcgaggtgtctgatgaggacagtgctgatgagattgacgatgactgcaagctcctcaatggggatgcatccaccaatcgaaagcgtgtagaaaacactgctaagaggaaactggattccctcatcaaagagtcgaagattcgggactgtgaggaccccaacaacttctccgtctccacactgtccccatctggaaagctcggacgcaagagcaaggctgaagaggacgtggagtctggggaggatgccggggccagcagacgcaatggccgcctcgtcgtgggaagcttctccaggcgcaagaagaagggcagcaagctgaagaaggcggccagcgtggaggagggagatgagggtcaggactccccgggaggccagagccgaggggcgacccggcagaagaagaccatgaagctgtcccgggccctctctgacctggtgaagtacaccaagtccgtggccacccacgacatagagatggaggcggcgtccagctggcaggtgtcgtccttcagcgagaccaaggcccaccagattctgcagcagaagccggcgcagtacctacgcttcaaccagcagcagctctcccgcatctacccctcctcctaccgtgtggactccagcaactacaacccgcagcccttctggaacgccggctgccaaatgggcgtgttcaaccccaactcggaggaccccctgcccgggcagctcaagaagcagctggtgctccggatcatcagtggccagcagcttcccaagccgcgcgactccatgctgggggaccgtggggagatcatcgacccctttgtggaggtggagatcattgggctccctgtggactgcagcagggagcagacccgcgtggtggacgacaacgggttcaaccccacctgggaggagaccctggttttcatggtgcacatgccggagatcgcgctggtccgcttcctcgtctgggaccacgatcccatcgggcgtgacttcattggccagaggacgctggccttcagcagcatgatgccaggctacagacacgtgtacctagaagggatggaagaggcctccatcttcgtgcatgtggctgtcagtgacatcagcggtaaggtcaagcaggctctgggcctaaaaggcctcttcctccgaggcccaaagcccggctcgctggacagtcatgctgctgggcggcccccggcccggccctccgttagccagcggatcctgcggcgcacggccagcgccccgaccaagagccagaagccgggccgcaggggcttcccggagctggtcctgggtacacgggacacaggctccaagggggtggcagacgatgtggtgccccccgggcccggacctgctccggaagccccagcccaggaggggcccggcagcggcagcccccgagacacccgccccctctccacgcagcggccactccccccactgtgcagcctggaaaccatcgctgaggagcccgccccaggccctggtcccccgccaccagcggctgtccccaccagctcttctcagggacggcccccataccccacaggacccggagccaatgtggcaagccccctagaggacactgaggagccccgagacagcaggcctcggccgtgcaacggcgagggcgccggcggggcatacgagagggcccccggcagccagacggacggcaggagccagccccggaccctgggccacctgcccgtgattagaagggtgaagagtgaggggcaggtgcccacggagcccctgggagggtggcggcccctggccgctccctttccagctcctgccgtgtactccgatgccacgggcagtgacccgctgtggcagcggctggagccatgtggccaccgagacagcgtttcctcctcctccagcatgtcatccagcgacactgtcattgacctctccctgcccagcctgggcctgggccgcagccgtgagaacctcgctggagcccacatgggacgcctgccccccaggccccactcggcttcggctgcccgcccagacctgccacctgtgaccaagagcaaatccaaccccaaccttcgggctacaggccagcggcctcccatacctgacgaactgcagcccaggtccctggccccaaggatggctggcctccccttccggcctccctggggctgcctttccctggtgggcgtgcaggactgccccgtggctgccaagtccaagagcctgggcgacctcactgctgatgactttgcccctagctttgagggcggctcccgcagactgagccacagcctgggcctcccgggagggacacggcgggtgtcggggccaggggtgagacgggacaccctgacagagcagctgcgctggctcactgtcttccagcaggcaggagacatcacgtcacccaccagcctgggcccggctggggagggggtggcagggggccctggttttgtgcggcgctcctcctcccgcagccacagccgcgtgcgtgccattgccagccgggcccgccaggcccaggagcggcagcagagactgcagggcctgggccggcagggacccccagaagaggagcggggcacccccgagggcgcctgctccgtgggccacgagggcagtgtggatgcaccagcaccctccaagggagccctcgggccagcatccgcggctgctgaaaacctggtcctgctccgcctctgaccgtcagtggtgggaacctgggcggctctggaggcccagggcaggggtgggcgtgttgtttgctcaggaaacagggcagccaggcccccaaaactgtgtccccctggctgccctgtgtcccctccacccctgcctccctcctgcccctgctcccggggaggaaaggctaaagctgctggcccggggcccacaggaggggcttcgaggctggccctgccaggcagttttcccggcgttttaggatctgtacatagagaaatatttaaatttttagaagcaaaacttatacaacattaaaatgataccaagtcc

SEQ ID NO: 22484 - DNA, 2449 bp, Homo sapiens
  source 1..2449: mol_type = unassigned DNA
ttgccctgaactaccagtcagaggggcggatgctgcagctgaaccgagccaagttcagcgccaacggtggctgcggctacgtactcaagcctgggtgcatgtgccagggcgtgttcaaccccaactcggaggaccccctgcccgggcagctcaagaagcagctggtgctccggatcatcagtggccagcagcttcccaagccgcgcgactccatgctgggggaccgtggggagatcatcgacccctttgtggaggtggagatcattgggctccctgtggactgcagcagggagcagacccgcgtggtggacgacaacgggttcaaccccacctgggaggagaccctggttttcatggtgcacatgccggagatcgcgctggtccgcttcctcgtctgggaccacgatcccatcgggcgtgacttcattggccagaggacgctggccttcagcagcatgatgccaggctacagacacgtgtacctagaagggatggaagaggcctccatcttcgtgcatgtggctgtcagtgacatcagcggtaaggtcaagcaggctctgggcctaaaaggcctcttcctccgaggcccaaagcccggctcgctggacagtcatgctgctgggcggcccccggcccggccctccgttagccagcggatcctgcggcgcacggccagcgccccgaccaagagccagaagccgggccgcaggggcttcccggagctggtcctgggtacacgggacacaggctccaagggggtggcagacgatgtggtgccccccgggcccggacctgctccggaagccccagcccaggaggggcccggcagcggcagcccccgagacacccgccccctctccacgcagcggccactccccccactgtgcagcctggaaaccatcgctgaggagcccgccccaggccctggtcccccgccaccagcggctgtccccaccagctcttctcagggacggcccccataccccacaggacccggagccaatgtggcaagccccctagaggacactgaggagccccgagacagcaggcctcggccgtgcaacggcgagggcgccggcggggcatacgagagggcccccggcagccagacggacggcaggagccagccccggaccctgggccacctgcccgtgattagaagggtgaagagtgaggggcaggtgcccacggagcccctgggagggtggcggcccctggccgctccctttccagctcctgccgtgtactccgatgccacgggcagtgacccgctgtggcagcggctggagccatgtggccaccgagacagcgtttcctcctcctccagcatgtcatccagcgacactgtcattgacctctccctgcccagcctgggcctgggccgcagccgtgagaacctcgctggagcccacatgggacgcctgccccccaggccccactcggcttcggctgcccgcccagacctgccacctgtgaccaagagcaaatccaaccccaaccttcgggctacaggccagcggcctcccatacctgacgaactgcagcccaggtccctggccccaaggatggctggcctccccttccggcctccctggggctgcctttccctggtgggcgtgcaggactgccccgtggctgccaagtccaagagcctgggcgacctcactgctgatgactttgcccctagctttgagggcggctcccgcagactgagccacagcctgggcctcccgggagggacacggcgggtgtcggggccaggggtgagacgggacaccctgacagagcagctgcgctggctcactgtcttccagcaggcaggagacatcacgtcacccaccagcctgggcccggctggggagggggtggcagggggccctggttttgtgcggcgctcctcctcccgcagccacagccgcgtgcgtgccattgccagccgggcccgccaggcccaggagcggcagcagagactgcagggcctgggccggcagggacccccagaagaggagcggggcacccccgagggcgcctgctccgtgggccacgagggcagtgtggatgcaccagcaccctccaagggagccctcgggccagcatccgcggctgctgaaaacctggtcctgctccgcctctgaccgtcagtggtgggaacctgggcggctctggaggcccagggcaggggtgggcgtgttgtttgctcaggaaacagggcagccaggcccccaaaactgtgtccccctggctgccctgtgtcccctccacccctgcctccctcctgcccctgctcccggggaggaaaggctaaagctgctggcccggggcccacaggaggggcttcgaggctggccctgccaggcagttttcccggcgttttaggatctgtacatagagaaatatttaaatttttagaagcaaaacttatacaacattaaaatgataccaagtccct

SEQ ID NO: 22485 - DNA, 5450 bp, Homo sapiens
  source 1..5450: mol_type = unassigned DNA
cacgggcgggcgcggcagggcagcgtgtggggctgcgatcggcatgggctctgcgcgcggggtgcccctgctcgggctggggctcaggggacgccgggggccagcacagggcccggtgtccctcgggccgtgccggtaactgggattggcacccgccggccatggaagagcctgggcccccaggtgggctcagccaagaccaagtggagcggtgcatgggtgccatgcaagaggggatgcagatggtgaagctgcgtggcggctccaagggcctggtccgcttctactacctggacgagcaccgctcctgcatccgctggaggccctcacgcaagaacgagaaggccaagatctccatcgactccatccaggaggtgagtgaggggcggcagtcggaggtcttccagcgctaccctgacggcagcttcgaccccaactgctgcttcagcatctaccacggcagccaccgcgagtcgctggacctggtctccaccagcagcgaggtggcgcgcacctgggtcactggcctgcgctacctcatggccggcatcagcgacgaggacagcctggctcgccgccagcgcaccagggaccaatggctgaagcagacgtttgacgaggccgacaagaacggggatggcagcctgagcattggcgaggtcctgcagctgctgcacaagctcaacgtgaacctgccccggcagagggtgaagcagatgttcagggaagcggacacggatgaccaccaagggacgctgggttttgaagagttctgtgccttctacaagatgatgtccacccgccgggacctctacctgctcatgctgacctacagcaaccacaaggaccacctggatgccgccagcctgcagcgcttcctgcaggtggagcagaagatggcgggtgtgaccctcgagagctgccaggacatcatcgagcagtttgagccatgcccagaaaacaagagtaaggggctgctgggcattgatggcttcaccaactacaccaggagccctgctggtgacatcttcaaccctgagcaccaccatgtgcaccaggacatgacgcagccgctgagccactacttcatcacctcgtcccacaacacctacctcgtgggtgaccagctcatgtcccagtcacgggtggacatgtatgcttgggtcctgcaggctggctgccgctgcgtggaggtggactgctgggatgggcccgacggggagcccattgtgcaccatggctacactctgacttccaagatcctcttcaaagacgtcattgaaaccatcaacaaatatgccttcatcaagaatgagtacccagtgatcctgtccatcgaaaaccactgcagtgtcatccagcagaagaaaatggcccagtatctgactgacatccttggggacaagctggacctgtcatcagtgagcagtgaagatgccaccacactcccctctccacagatgctcaagggcaagatcctcgtgaaggggaagaagctcccagccaacatcagcgaggatgcggaggaaggcgaggtgtctgatgaggacagtgctgatgagattgacgatgactgcaagctcctcaatggggatgcatccaccaatcgaaagcgtgtagaaaacactgctaagaggaaactggattccctcatcaaagagtcgaagattcgggactgtgaggaccccaacaacttctccgtctccacactgtccccatctggaaagctcggacgcaagagcaaggctgaagaggacgtggagtctggggaggatgccggggccagcagacgcaatggccgcctcgtcgtgggaagcttctccaggcgcaagaagaagggcagcaagctgaagaaggcggccagcgtggaggagggagatgagggtcaggactccccgggaggccagagccgaggggcgacccggcagaagaagaccatgaagctgtcccgggccctctctgacctggtgaagtacaccaagtccgtggccacccacgacatagagatggaggcggcgtccagctggcaggtgtcgtccttcagcgagaccaaggcccaccagattctgcagcagaagccggcgcagtacctacgcttcaaccagcagcagctctcccgcatctacccctcctcctaccgtgtggactccagcaactacaacccgcagcccttctggaacgccggctgccaaatggttgccctgaactaccagtcagaggggcggatgctgcagctgaaccgagccaagttcagcgccaacggtggctgcggctacgtactcaagcctgggtgcatgtgccagggcgtgttcaaccccaactcggaggaccccctgcccgggcagctcaagaagcagctggtgctccggatcatcagtggccagcagcttcccaagccgcgcgactccatgctgggggaccgtggggagatcatcgacccctttgtggaggtggagatcattgggctccctgtggactgcagcagggagcagacccgcgtggtggacgacaacgggttcaaccccacctgggaggagaccctggttttcatggtgcacatgccggagatcgcgctggtccgcttcctcgtctgggaccacgatcccatcgggcgtgacttcattggccagaggacgctggccttcagcagcatgatgccaggctacagacacgtgtacctagaagggatggaagaggcctccatcttcgtgcatgtggctgtcagtgacatcagcggtaaggtcaagcaggctctgggcctaaaaggcctcttcctccgaggcccaaagcccggctcgctggacagtcatgctgctgggcggcccccggcccggccctccgttagccagcggatcctgcggcgcacggccagcgccccgaccaagagccagaagccgggccgcaggggcttcccggagctggtcctgggtacacgggacacaggctccaagggggtggcagacgatgtggtgccccccgggcccggacctgctccggaagccccagcccaggaggggcccggcagcggcagcccccgaggtaaggcgccagctgcggtggcagagaagagccctgtgcgagtgcggcccccgcgtgtcctggacggccccgggcctgctgggatggccgccacatgcatgaagtgtgtggtgggatcctgcgccggcgtgaacaccgggggcctgcagagggagcggccacccagcccggggcctgcaagcaggcaggcagccattcgccagcagccccgggcccgggctgactcactgggggccccctgctgtggcctggaccctcacgctatcccggggagaagcagagaggcccccaagggtcctggggcctggaggcagggtccaggcggtagcggctccatgtcctcggactccagcagcccagacagcccgggcatccccgaaaggtccccccgctggcctgagggtgcctgcaggcaaccgggggccctgcagggagagatgagtgccttgtttgctcaaaagctggaggagatcaggagtaaatcccccatgttctccgccgttaggaactgagagcggcgagtgacaggtaacggggcccagccccggtgtcccgtgctgtcccagcccaaggagggccccgtgtgcggcacagggcgtggactgggccccagcagcagcagggtggggacaccgagtgtgccgcgcccgggggatgcctcggggtgggagctgggcctggcgaccctcggcacagggcaccggggacaccaccctgatccgactcctctccgcctctctccctgcctccctctctctcttctgcttctccctctggctctctctcactcccccacctccccacagacacccgccccctctccacgcagcggccactccccccactgtgcagcctggaaaccatcgctgaggagcccgccccaggccctggtcccccgccaccagcggctgtccccaccagctcttctcagggacggcccccataccccacaggacccggagccaatgtggcaagccccctagaggacactgaggagccccgagacagcaggcctcggccgtgcaacggcgagggcgccggcggggcatacgagagggcccccggcagccagacggacggcaggagccagccccggaccctgggccacctgcccgtgattagaagggtgaagagtgaggggcaggtgcccacggagcccctgggagggtggcggcccctggccgctccctttccagctcctgccgtgtactccgatgccacgggcagtgacccgctgtggcagcggctggagccatgtggccaccgagacagcgtttcctcctcctccagcatgtcatccagcgacactgtcattgacctctccctgcccagcctgggcctgggccgcagccgtgagaacctcgctggagcccacatgggacgcctgccccccaggccccactcggcttcggctgcccgcccagacctgccacctgtgaccaagagcaaatccaaccccaaccttcgggctacaggccagcggcctcccatacctgacgaactgcagcccaggtccctggccccaaggatggctggcctccccttccggcctccctggggctgcctttccctggtgggcgtgcaggactgccccgtggctgccaagtccaagagcctgggcgacctcactgctgatgactttgcccctagctttgagggcggctcccgcagactgagccacagcctgggcctcccgggagggacacggcgggtgtcggggccaggggtgagacgggacaccctgacagagcagctgcgctggctcactgtcttccagcaggcaggagacatcacgtcacccaccagcctgggcccggctggggagggggtggcagggggccctggttttgtgcggcgctcctcctcccgcagccacagccgcgtgcgtgccattgccagccgggcccgccaggcccaggagcggcagcagagactgcagggcctgggccggcagggacccccagaagaggagcggggcacccccgagggcgcctgctccgtgggccacgagggcagtgtggatgcaccagcaccctccaagggagccctcgggccagcatccgcggctgctgaaaacctggtcctgctccgcctctgaccgtcagtggtgggaacctgggcggctctggaggcccagggcaggggtgggcgtgttgtttgctcaggaaacagggcagccaggcccccaaaactgtgtccccctggctgccctgtgtcccctccacccctgcctccctcctgcccctgctcccggggaggaaaggctaaagctgctggcccggggcccacaggaggggcttcgaggctggccctgccaggcagttttcccggcgttttaggatctgtacatagagaaatatttaaatttttagaagcaaaacttatacaacattaaaatgataccaagtccc

SEQ ID NO: 22486 - DNA, 2148 bp, Homo sapiens
  source 1..2148: mol_type = unassigned DNA
acaatgggaattcagaccaaaaggaaaaaatgacagtcacctgacagtgtggtgcccagccaaccagctatacctcttttgaagattttaagaacttagcctcctgaacagtcttcttcgaaagtgaaaagtggtaacagctgatgagtatcaagaaattattttctgcaaaggggcagagttaattgtatttggaacccatgacagcacctactggggaaagacttctaagtgaggagaaacggctctacaggtcatgaaactatggaaatgagatggtttttgtcaaagattcaggatgacttcagaggtggaaaaattaacctagaaaaaactcagaggttacttgaaaaattagatattcggtgcagttatattcatgtgaaacagatttttaaggacaatgacaggctgaaacaaggaagaatcaccatagaagaatttagagcaatttatcgaattatcacgcacagagaagaaattattgagattttcaacacatattctgaaaaccggaaaattcttttagcaagtaatctggctcaatttctgacacaagaacaatatgcagctgagatgagtaaagctattgcttttgagatcattcagaaatacgagcctatcgaagaagttaggaaagcacaccaaatgtcattagaaggttttacaagatacatggattcacgtgaatgtctactgtttaaaaatgaatgtagaaaagtttatcaagatatgactcatccattaaatgattattttatttcatcttcacataacacatatttggtatctgatcaattattgggaccaagtgacctttggggatatgtaagtgcccttgtgaaaggatgccgttgtttggagattgactgctgggatggagcacaaaatgaacctgttgtatatcatggctacacactcacaagcaaacttctgtttaaaactgttatccaagctatacacaagtatgcattcatgacatctgactacccagtggtgctctctttagaaaatcactgctccactgcccaacaagaagtaatggcagacaatttgcaggctacttttggagagtccttgctttctgatatgcttgatgattttcctgatactctaccatcaccagaggcactaaaattcaaaatattagttaaaaataagaaaataggaaccttaaaggaaacccatgaaagaaaaggttctgataagcgtggagacaatcaagacaaggaaacaggggtaaaaaagttacctggagtaatgcttttcaagaaaaagaagaccaggaagctaaaaattgctctggccttatctgatcttgtcatttatacgaaagctgagaaattcaaaagctttcaacattcaagattatatcagcaatttaatgaaaataattctattggggagacacaagcccgaaaactttcaaaattgcgagtccatgagtttatttttcacaccaggaagttcattaccagaatatatcccaaagcaacaagagcagactcttctaattttaatccccaagaattttggaatataggttgtcaaatggtggctttaaatttccagacccctggtctgcccatggatctgcaaaatgggaaatttttggataatggtggttctggatatattttgaaaccacatttcttaagagagagtaaatcatactttaacccaagtaacataaaagagggtatgccaattacacttacaataaggctcatcagtggtatccagttgcctcttactcattcatcatctaacaaaggtgattcattagtaattatagaagtttttggtgttccaaatgatcaaatgaagcagcagactcgtgtaattaaaaaaaatgcttttagtccaagatggaatgaaacattcacatttattattcatgtcccagaattggcattgatacgttttgttgttgaaggtcaaggtttaatagcaggaaatgaatttcttgggcaatatactttgccacttctatgcatgaacaaaggttatcgtcgtattcctctgttttccagaatgggtgagagccttgagcctgcttcactgtttgtttatgtttggtacgtcagataacagctaatgataaatgacatatcattagctatgcatcgcaataaaacagccaaaatg

SEQ ID NO: 22487 - DNA, 1569 bp, Homo sapiens
  source 1..1569: mol_type = unassigned DNA
acaatgggaattcagaccaaaaggaaaaaatgacagtcacctgacagtgtggtgcccagccaaccagctatacctcttttgaagattttaagaacttagcctcctgaacagtcttcttcgaaagtgaaaagtggtaacagctgatgagtatcaagaaattattttctgcaaaggggcagagttaattgtatttggaacccatgacagcacctactggggaaagacttctaagtgaggagaaacggctctacaggtcatgaaactatggaaatgagatggtttttgtcaaagattcaggatgacttcagaggtggaaaaattaacctagaaaaaactcagaggttacttgaaaaattagatattcggtgcagttatattcatgtgaaacagatttttaagacatctgactacccagtggtgctctctttagaaaatcactgctccactgcccaacaagaagtaatggcagacaatttgcaggctacttttggagagtccttgctttctgatatgcttgatgattttcctgatactctaccatcaccagaggcactaaaattcaaaatattagttaaaaataagaaaataggaaccttaaaggaaacccatgaaagaaaaggttctgataagcgtggagacaatcaagacaaggaaacaggggtaaaaaagttacctggagtaatgcttttcaagaaaaagaagaccaggaagctaaaaattgctctggccttatctgatcttgtcatttatacgaaagctgagaaattcaaaagctttcaacattcaagattatatcagcaatttaatgaaaataattctattggggagacacaagcccgaaaactttcaaaattgcgagtccatgagtttatttttcacaccaggaagttcattaccagaatatatcccaaagcaacaagagcagactcttctaattttaatccccaagaattttggaatataggttgtcaaatggtggctttaaatttccagacccctggtctgcccatggatctgcaaaatgggaaatttttggataatggtggttctggatatattttgaaaccacatttcttaagagagagtaaatcatactttaacccaagtaacataaaagagggtatgccaattacacttacaataaggctcatcagtggtatccagttgcctcttactcattcatcatctaacaaaggtgattcattagtaattatagaagtttttggtgttccaaatgatcaaatgaagcagcagactcgtgtaattaaaaaaaatgcttttagtccaagatggaatgaaacattcacatttattattcatgtcccagaattggcattgatacgttttgttgttgaaggtcaaggtttaatagcaggaaatgaatttcttgggcaatatactttgccacttctatgcatgaacaaaggttatcgtcgtattcctctgttttccagaatgggtgagagccttgagcctgcttcactgtttgtttatgtttggtacgtcagataacagctaatgataaatgacatatcattagctatgcatcgcaataaaacagccaaaatg

SEQ ID NO: 22488 - DNA, 2148 bp, Homo sapiens; identical to SEQ ID NO: 22486
  source 1..2148: mol_type = unassigned DNA

SEQ ID NO: 22489 - DNA, 1398 bp, Homo sapiens
  source 1..1398: mol_type = unassigned DNA
tgcaaaggggcagagttaattgtatttggaacccatgacagcacctactggggaaagacttctaagtgaggagaaacggctctacaggtcatgaaactatggaaatgagatggtttttgtcaaagattcaggatgacttcagaggtggaaaaattaacctagaaaaaactcagaggttacttgaaaaattagatattcggtgcagttatattcatgtgaaacagatttttaagacatctgactacccagtggtgctctctttagaaaatcactgctccactgcccaacaagaagtaatggcagacaatttgcaggctacttttggagagtccttgctttctgatatgcttgatgattttcctgatactctaccatcaccagaggcactaaaattcaaaatattagttaaaaataagaaaataggaaccttaaaggaaacccatgaaagaaaaggttctgataagcgtggagacaatcaagacaaggaaacaggggtaaaaaagttacctggagtaatgcttttcaagaaaaagaagaccaggaagctaaaaattgctctggccttatctgatcttgtcatttatacgaaagctgagaaattcaaaagctttcaacattcaagattatatcagcaatttaatgaaaataattctattggggagacacaagcccgaaaactttcaaaattgcgagtccatgagtttatttttcacaccaggaagttcattaccagaatatatcccaaagcaacaagagcagactcttctaattttaatccccaagaattttggaatataggttgtcaaatggtggctttaaatttccagacccctggtctgcccatggatctgcaaaatgggaaatttttggataatggtggttctggatatattttgaaaccacatttcttaagagagagtaaatcatactttaacccaagtaacataaaagagggtatgccaattacacttacaataaggctcatcagtggtatccagttgcctcttactcattcatcatctaacaaaggtgattcattagtaattatagaagtttttggtgttccaaatgatcaaatgaagcagcagactcgtgtaattaaaaaaaatgcttttagtccaagatggaatgaaacattcacatttattattcatgtcccagaattggcattgatacgttttgttgttgaaggtcaaggtttaatagcaggaaatgaatttcttgggcaatatactttgccacttctatgcatgaacaaaggttatcgtcgtattcctctgttttccagaatgggtgagagccttgagcctgcttcactgtttgtttatgtttggtacgtcagataacagctaatgataaatgacatatcattagctatgcatcgcaataaaacagcca

SEQ ID NO: 22490 - DNA, 1667 bp, Homo sapiens
  source 1..1667: mol_type = unassigned DNA
gtcattagaaggttttacaagatacatggattcacgtgaatgtctactgtttaaaaatgaatgtagaaaagtttatcaagatatgactcatccattaaatgattattttatttcatcttcacataacacatatttggtatctgatcaattattgggaccaagtgacctttggggatatgtaagtgcccttgtgaaaggatgccgttgtttggagattgactgctgggatggagcacaaaatgaacctgttgtatatcatggctacacactcacaagcaaacttctgtttaaaactgttatccaagctatacacaagtatgcattcatgacatctgactacccagtggtgctctctttagaaaatcactgctccactgcccaacaagaagtaatggcagacaatttgcaggctacttttggagagtccttgctttctgatatgcttgatgattttcctgatactctaccatcaccagaggcactaaaattcaaaatattagttaaaaataagaaaataggaaccttaaaggaaacccatgaaagaaaaggttctgataagcgtggagacaatcaagacaaggaaacaggggtaaaaaagttacctggagtaatgcttttcaagaaaaagaagaccaggaagctaaaaattgctctggccttatctgatcttgtcatttatacgaaagctgagaaattcaaaagctttcaacattcaagattatatcagcaatttaatgaaaataattctattggggagacacaagcccgaaaactttcaaaattgcgagtccatgagtttatttttcacaccaggaagttcattaccagaatatatcccaaagcaacaagagcagactcttctaattttaatccccaagaattttggaatataggttgtcaaatggtggctttaaatttccagacccctggtctgcccatggatctgcaaaatgggaaatttttggataatggtggttctggatatattttgaaaccacatttcttaagagagagtaaatcatactttaacccaagtaacataaaagagggtatgccaattacacttacaataaggctcatcagtggtatccagttgcctcttactcattcatcatctaacaaaggtgattcattagtaattatagaagtttttggtgttccaaatgatcaaatgaagcagcagactcgtgtaattaaaaaaaatggtcaaggtaatatggtcattattccagcatgagccaattagtttactatttctgtgggcatagactgcaccctagattgctatgtggtaaatgtgctcttgtgaccacaggtgaaccatagaaaacatagatatagtataattagaaattcatcagtgcttctggaaatcttttagtccaagatggaatgaaacattcacatttattattcatgtcccagaattggcattgatacgttttgttgttgaaggtcaaggtttaatagcaggaaatgaatttcttgggcaatatactttgccacttctatgcatgaacaaaggttatcgtcgtattcctctgttttccagaatgggtgagagccttgagcctgcttcactgtttgtttatgtttggtacgtcagataacagctaatgataaatgacatatcattagctatgcatcgcaataaaacagccaaaatg

SEQ ID NO: 22491 - DNA, 4160 bp, Homo sapiens
  source 1..4160: mol_type = unassigned DNA
ccgcgcgcggcggcccgaggcggcggcggggacgcgggggcgcgaggacgcggctttgtgcaggcgggtctgctggggcgcccatggctgattgcgtgcgtgggtgggctgccgtcggcggggccctgcccacctccccgggcccgtccctcggtgccaagggcgccctgaaagccggagtgggggaagacggtgtcgggggaggtcgcctcgtccacgggcgggcgcgctatgacagcggcggggtttccaacggagactgcagcctcggcgtgtccggggacgaagcccgggctagccctaccaggggaccccgcggcgttgcgctcgccccgacccccagcgcggtcgtctgtaccctcccccgggagagcaagccgggcggcctgccccgccggagcagcatcatcaaggatggtacaaaacagaagagggaacggaaaaagacagtctcattcagcagcatgccaacagagaagaagatcagcagtgcaagtgattgtattaattcaatggttgagggttcagaactcaaaaaggttcgctccaactctagaatttatcataggtactttttactggatgctgacatgcagagcctaaggtgggagccatctaagaaggattctgagaaagccaagattgacattaaatccatcaaggaagtgagaacaggaaaaaacacagacatattccgcagcaatggcatttctgaccagatatctgaagattgtgcgttttccgtcatatatggagagaattatgagtcactggatttggttgccaactccgcagatgttgcaaacatctgggttacaggactgcggtacctaatttcttatggaaaacatacacttgatatgttagaaagtagccaagataacatgaggacttcttgggtttcacaaatgtttagtgaaattgatgtagataaccttggacatataactctgtgtaatgctgtgcaatgtatcagaaacctcaatcctggtttaaaaacgagcaaaattgagcttaagttcaaagaattgcataaatcaaaggacaaagctggtaccgaggtcacaaaggaagaatttattgaggtttttcatgagctttgtactagacctgaaatttatttccttttagttcagttttcaagcaataaagaattccttgataccaaggaccttatgatgtttcttgaggcagaacagggtgtggcacatataaatgaggaaataagccttgaaattattcacaaatatgaaccatccaaagagggtcaggaaaagggctggctctccatagacgggttcactaattaccttatgtcacctgactgttatatattcgatccagaacataagaaggtctgtcaggatatgaagcaacctctgtctcattactttataaactcatctcataatacatacttaatagaggatcagttccgaggtccctccgacatcacaggatatattcgagctcttaaaatgggttgccggagtgttgaattagatgtatgggatgggccggacaatgaacctgtaatttacacaggccacaccatgacctctcagatagttttccgcagtgtcattgatattattaacaagtatgcattctttgcttcagagtatcctcttatcttgtgtttagaaaaccactgttccattaaacaacagaaggtaatggttcagcacatgaagaaacttttaggagacaagctctatacaacatcacccaatgttgaggaatcttatctaccatccccagatgtcctgaaagggaaaatactaattaaagcaaagaagctgtcctcaaattgctctggggtagaaggagatgttactgacgaagatgaaggagcagaaatgtctcagaggatgggaaaagagaacatggagcaacccaataatgtgcctgtgaagcgatttcagctttgtaaagaactgtctgaactggtcagcatctgcaaatcagttcagttcaaagaatttcaggtgtcgtttcaggttcagaagtactgggaagtctgttcctttaatgaagtgcttgccagcaagtacgccaatgaaaatccaggggactttgtaaattacaacaaacgttttcttgctagggtttttcccagtccaatgagaattgattccagtaacatgaatcctcaagatttttggaaatgtggttgccaaattgtagccatgaactttcagacaccaggactgatgatggacctgaatattggctggtttaggcagaacggaaactgtggctatgtcctccggccagccatcatgagggaggaggtctccttcttcagcgccaatacaaaagactctgtcccaggggtctcacctcaacttcttcacattaaaatcatcagtgggcagaactttcccaagcccaaaggatcaggtgccaaaggtgatgtggtagatccttatgtctatgttgaaatccatggaatccctgctgattgtgcagaacaaaggacaaaaacagtgcaccagaatggagacgctcccatttttgatgaaagctttgaatttcaaatcaacctgcctgaactggccatggtgcgctttgtagtgctggatgatgactacattggggatgaattcatcggccagtacacaattccctttgaatgtttacagacgggctaccgccatgtccccctgcagtccttaactggagaggtccttgcacatgcttctttatttgtccacgtggctattactaaccgaagaggaggaggaaagcctcataaaaggggcctttctgtgagaaaagggaagaaatccagggaatatgcatctttgagaacactgtggattaaaaccgtggatgaggtattcaagaatgcccagccccctatacgggatgccacagatctgagagaaaacatgcagaatgcggtggtgtcattcaaggagctgtgtggcctctcctctgtggccaatctcatgcagtgcatgttggcggtgtctccccgctttctggggcccgataacacacccctagtggtcctaaatctcagcgagcagtaccccacaatggagctgcagggaattgtgccggaggttctgaagaagatcgtaacaacttatgacatgatgattcagtccctcaaggcgttgattgaaaatgcagatgctgtatatgaaaagatcgtacattgtcagaaggcagccatggaattccatgaacacttgcacagcataggcaccaaggaaggtttgaaggaaagaaaactacaaaaagcagtggagagctttacctggaatattaccatcttaaagggacaagcagatcttttgaaatatgctaagaatgagacattggagaacctgaaacaaatccattttgctgctgtttcatgtggactgaataaaccaggcaccgaaaatgctgatgtccagaagccacgccggagcttggaagtcatacccgaaaaagcaaacgatgaaactggagaatgaggaaacttacaataaaccattatggagtttataactctaggaccaattgtagtcagatgggacatttgctttgcactcactaatgagaataatattcgggattttaaagcacaactggaatagctaattacagtctattaaaactgtgaatgtatgtagcaatcctgcgtgtgaaggcaaataaactctttaacaggcaattatattgctggccaaaatatgctatatttgtatacaaagacattctaactcagttccagtatgaagaaagattattcactctagctccactgagaaacattttcctaagtgaaaacaatttcttaagatggaaatggattggattgtcaaattattatttattggagaaaaaaacctgatctacacatttttacttatatggggttgccagagtctctgggttctagatgattttggtggcatgcttgctgagccataattactaaagagaatgtaagtggacgggttccctgaatccccggggtccttggagagccatcgaggagaatgtgcaattggactgaagctccctggctgaagatacatgccgagtcagcacatgggtagagatgatgtaaaagcagccaatctggaaacaatacattgtaaatagtttttcattgtatgaagtagtgttcacattaaaaagatgttttatgatatttctcc

SEQ ID NO: 22492 - DNA, 3348 bp, Homo sapiens
  source 1..3348: mol_type = unassigned DNA
ccgcgcgcggcggcccgaggcggcggcggggacgcgggggcgcgaggacgcggctttgtgcaggcgggtctgctggggcgcccatggctggattgcgtgcgtgggtgggctgccgtcggcggggccctgcccacctccccgggcccgtccctcggtgccaagggcgccctgaaagccggagtgggggaagacggtgtcgggggaggtcgcctcgtccacgggcgggcgcgctatgacagcggcggggtttccaacggagactgcagcctcggcgtgtccggggacgaagcccgggctagccctaccaggggaccccgcggcgttgcgctcgccccgacccccagcgcggtcgtctgtaccctcccccgggagagcaagccgggcggcctgccccgccggagcagcatcatcaaggatggtacaaaacagaagagggaacggaaaaagacagtctcattcagcagcatgccaacagagaagaagatcagcagtgcaagtgattgtattaattcaatggttgagggttcagaactcaaaaaggttcgctccaactctagaatttatcataggtactttttactggatgctgacatgcagagcctaaggtgggagccatctaagaaggattctgagaaagccaagattgacattaaatccatcaaggaagtgagaacaggaaaaaacacagacatattccgcagcaatggcatttctgaccagatatctgaagattgtgcgttttccgtcatatatggagagaattatgagtcactggatttggttgccaactccgcagatgttgcaaacatctgggttacaggactgcggtacctaatttcttatggaaaacatacacttgatatgttagaaagtagccaagataacatgaggacttcttgggtttcacaaatgtttagtgaaattgatgtagataaccttggacatataactctgtgtaatgctgtgcaatgtatcagaaacctcaatcctggtttaaaaacgagcaaaattgagcttaagttcaaagaattgcataaatcaaaggacaaagctggtaccgaggtcacaaaggaagaatttattgaggtttttcatgagctttgtactagacctgaaatttatttccttttagttcagttttcaagcaataaagaattccttgataccaaggaccttatgatgtttcttgaggcagaacagggtgtggcacatataaatgaggaaataagccttgaaattattcacaaatatgaaccatccaaagagggtcaggaaaagggctggctctccatagacgggttcactaattaccttatgtcacctgactgttatatattcgatccagaacataagaaggtctgtcaggatatgaagcaacctctgtctcattactttataaactcatctcataatacatacttaatagaggatcagttccgaggtccctccgacatcacaggatatattcgagctcttaaaatgggttgccggagtgttgaattagatgtatgggatgggccggacaatgaacctgtaatttacacaggccacaccatgacctctcagatagttttccgcagtgtcattgatattattaacaagtatgcattctttgcttcagagtatcctcttatcttgtgtttagaaaaccactgttccattaaacaacagaaggtaatggttcagcacatgaagaaacttttaggagacaagctctatacaacatcacccaatgttgaggaatcttatctaccatccccagatgtcctgaaagggaaaatactaattaaagcaaagaagctgtcctcaaattgctctggggtagaaggagatgttactgacgaagatgaaggagcagaaatgtctcagaggatgggaaaagagaacatggagcaacccaataatgtgcctgtgaagcgatttcagctttgtaaagaactgtctgaactggtcagcatctgcaaatcagttcagttcaaagaatttcaggtgtcgtttcaggttcagaagtactgggaagtctgttcctttaatgaagtgcttgccagcaagtacgccaatgaaaatccaggggactttgtaaattacaacaaacgttttcttgctagggtttttcccagtccaatgagaattgattccagtaacatgaatcctcaagatttttggaaatgtggttgccaaattgtagccatgaactttcagacaccaggactgatgatggacctgaatattggctggtttaggcagaacggaaactgtggctatgtcctccggccagccatcatgagggaggaggtctccttcttcagcgccaatacaaaagactctgtcccaggggtctcacctcaacttcttcacattaaaatcatcagtgggcagaactttcccaagcccaaaggatcaggtgccaaaggtgatgtggtagatccttatgtctatgttgaaatccatggaatccctgctgattgtgcagaacaaaggacaaaaacagtgcaccagaatggagacgctcccatttttgatgaaagctttgaatttcaaatcaacctgcctgaactggccatggtgcgctttgtagtgctggatgatgactacattggggatgaattcatcggccagtacacaattccctttgaatgtttacagacgggctaccgccatgtccccctgcagtccttaactggagaggtccttgcacatgcttctttatttgtccacgtggctattactaaccgaagaggaggaggaaagcctcataaaaggggcctttctgtgagaaaagggaagaaatccagggaatatgcatctttgagaacactgtggattaaaaccgtggatgaggtattcaagaatgcccagccccctatacgggatgccacagatctgagagaaaacatgcagaatgcggtggtgtcattcaaggagctgtgtggcctctcctctgtggccaatctcatgcagtgcatgttggcggtgtctccccgctttctggggcccgataacacacccctagtggtcctaaatctcagcgagcagtaccccacaatggagctgcagggaattgtgccggaggttctgaagaagatcgtaacaacttatgacatgatgattcagtccctcaaggcgttgattgaaaatgcagatgctgtatatgaaaagatcgtacattgtcagaaggcagccatggaattccatgaacacttgcacagcataggcaccaaggaaggtttgaaggaaagaaaactacaaaaagcagtggagagctttacctggaatattaccatcttaaagataagaaagacaggaaggaggagtatttttgtgcctcagactcccataatggtatga

SEQ ID NO: 22493 - DNA, 4153 bp, Homo sapiens
  source 1..4153: mol_type = unassigned DNA
ccgcgcgcggcggcccgaggcggcggcggggacgcgggggcgcgaggacgcggctttgtgcaggcgggtctgctggggcgcccatggctggattgcgtgcgtgggtgggctgccgtcggcggggccctgcccacctccccgggcccgtccctcggtgccaagggcgccctgaaagccggagtgggggaagacggtgtcgggggaggtcgcctcgtccacgggcgggcgcgctatgacagcggcggggtttccaacggagactgcagcctcggcgtgtccggggacgaagcccgggctagccctaccaggggaccccgcggcgttgcgctcgccccgacccccagcgcggtcgtctgtaccctcccccgggagagcaagccgggcggcctgccccgccggagcagcatcatcaaggatggtacaaaacagaagagggaacggaaaaagacagtctcattcagcagcatgccaacagagaagaagatcagcagtgcaagtgattgtattaattcaatggttgagggttcagaactcaaaaaggttcgctccaactctagaatttatcataggtactttttactggatgctgacatgcagagcctaaggtgggagccatctaagaaggattctgagaaagccaagattgacattaaatccatcaaggaagtgagaacaggaaaaaacacagacatattccgcagcaatggcatttctgaccagatatctgaagattgtgcgttttccgtcatatatggagagaattatgagtcactggatttggttgccaactccgcagatgttgcaaacatctgggttacaggactgcggtacctaatttcttatggaaaacatacacttgatatgttagaaagtagccaagataacatgaggacttcttgggtttcacaaatgtttagtgaaattgatgtagataaccttggacatataactctgtgtaatgctgtgcaatgtatcagaaacctcaatcctggtttaaaaacgagcaaaattgagcttaagttcaaagaattgcataaatcaaaggacaaagctggtaccgaggtcacaaaggaagaatttattgaggtttttcatgagctttgtactagacctgaaatttatttccttttagttcagttttcaagcaataaagaattccttgataccaaggaccttatgatgtttcttgaggcagaacagggtgtggcacatataaatgaggaaataagccttgaaattattcacaaatatgaaccatccaaagagggtcaggaaaagggctggctctccatagacgggttcactaattaccttatgtcacctgactgttatatattcgatccagaacataagaaggtctgtcaggatatgaagcaacctctgtctcattactttataaactcatctcataatacatacttaatagaggatcagttccgaggtccctccgacatcacaggatatattcgagctcttaaaatgggttgccggagtgttgaattagatgtatgggatgggccggacaatgaacctgtaatttacacaggccacaccatgacctctcagatagttttccgcagtgtcattgatattattaacaagtatgcattctttgcttcagagtatcctcttatcttgtgtttagaaaaccactgttccattaaacaacagaaggtaatggttcagcacatgaagaaacttttaggagacaagctctatacaacatcacccaatgttgaggaatcttatctaccatccccagatgtcctgaaagggaaaatactaattaaagcaaagaagctgtcctcaaattgctctggggtagaaggagatgttactgacgaagatgaaggagcagaaatgtctcagaggatgggaaaagagaacatggagcaacccaataatgtgcctgtgaagcgatttcagctttgtaaagaactgtctgaactggtcagcatctgcaaatcagttcagttcaaagaatttcaggtgtcgtttcaggttcagaagtactgggaagtctgttcctttaatgaagtgcttgccagcaagtacgccaatgaaaatccaggggactttgtaaattacaacaaacgttttcttgctagggtttttcccagtccaatgagaattgattccagtaacatgaatcctcaagatttttggaaatgtggttgccaaattgtagccatgaactttcagacaccaggactgatgatggacctgaatattggctggtttaggcagaacggaaactgtggctatgtcctccggccagccatcatgagggaggaggtctccttcttcagcgccaatacaaaagactctgtcccaggggtctcacctcaacttcttcacattaaaatcatcagtgggcagaactttcccaagcccaaaggatcaggtgccaaaggtgatgtggtagatccttatgtctatgttgaaatccatggaatccctgctgattgtgcagaacaaaggacaaaaacagtgcaccagaatggagacgctcccatttttgatgaaagctttgaatttcaaatcaacctgcctgaactggccatggtgcgctttgtagtgctggatgatgactacattggggatgaattcatcggccagtacacaattccctttgaatgtttacagacgggctaccgccatgtccccctgcagtccttaactggagaggtccttgcacatgcttctttatttgtccacgtggctattactaaccgaagaggaggaggaaagcctcataaaaggggcctttctgtgagaaaagggaagaaatccagggaatatgcatctttgagaacactgtggattaaaaccgtggatgaggtattcaagaatgcccagccccctatacgggatgccacagatctgagagaaaacatgcagaatgcggtggtgtcattcaaggagctgtgtggcctctcctctgtggccaatctcatgcagtgcatgttggcggtgtctccccgctttctggggcccgataacacacccctagtggtcctaaatctcagcgagcagtaccccacaatggagctgcagggaattgtgccggaggttctgaagaagatcgtaacaacttatgacatgatgattcagtccctcaaggcgttgattgaaaatgcagatgctgtatatgaaaagatcgtacattgtcagaaggcagccatggaattccatgaacacttgcacagcataggcaccaaggaaggtttgaaggaaagaaaactacaaaaagcagtggagagctttacctggaatattaccatcttaaagggacaagcagatcttttgaaatatgctaagaatgagacattggagaacctgaaacaaatccattttgctgctgtttcatgtggactgaataaaccaggcaccgaaaatgctgatgtccagaagccacgccggagcttggaagtcatacccgaaaaagcaaacgatgaaactggagaatgaggaaacttacaataaaccattatggagtttataactctaggaccaattgtagtcagatgggacatttgctttgcactcactaatgagaataatattcgggattttaaagcacaactggaatagctaattacagtctattaaaactgtgaatgtatgtagcaatcctgcgtgtgaaggcaaataaactctttaacaggcaattatattgctggccaaaatatgctatatttgtatacaaagacattctaactcagttccagtatgaagaaagattattcactctagctccactgagaaacattttcctaagtgaaaacaatttcttaagatggaaatggattggattgtcaaattattatttattggagaaaaaaacctgatctacacatttttacttatatggggttgccagagtctctgggttctagatgattttggtggcatgcttgctgagccataattactaaagagaatgtaagtggacgggttccctgaatccccggggtccttggagagccatcgaggagaatgtgcaattggactgaagctccctggctgaagatacatgccgagtcagcacatgggtagagatgatgtaaaagcagccaatctggaaacaatacattgtaaatagtttttcattgtatgaagtagtgttcacattaaaaagatgttttatgat

SEQ ID NO: 22494 - DNA, 3940 bp, Homo sapiens
  source 1..3940: mol_type = unassigned DNA
gaaacgtacctaagtattattggacagccggagtattttacagtggttgctgctcaggaaatttgagtgaaggactgcaaaagaggagcaaagcagacccgagagagaaggcagcagtgctcccctgtgacgtgctccatcaccgggcagggaagacaccgctgccacctctccacagccttgttcaagagcactggaaattgatggtacaaaacagaagagggaacggaaaaagacagtctcattcagcagcatgccaacagagaagaagatcagcagtgcaagtgattgtattaattcaatggttgagggttcagaactcaaaaaggttcgctccaactctagaatttatcataggtactttttactggatgctgacatgcagagcctaaggtgggagccatctaagaaggattctgagaaagccaagattgacattaaatccatcaaggaagtgagaacaggaaaaaacacagacatattccgcagcaatggcatttctgaccagatatctgaagattgtgcgttttccgtcatatatggagagaattatgagtcactggatttggttgccaactccgcagatgttgcaaacatctgggttacaggactgcggtacctaatttcttatggaaaacatacacttgatatgttagaaagtagccaagataacatgaggacttcttgggtttcacaaatgtttagtgaaattgatgtagataaccttggacatataactctgtgtaatgctgtgcaatgtatcagaaacctcaatcctggtttaaaaacgagcaaaattgagcttaagttcaaagaattgcataaatcaaaggacaaagctggtaccgaggtcacaaaggaagaatttattgaggtttttcatgagctttgtactagacctgaaatttatttccttttagttcagttttcaagcaataaagaattccttgataccaaggaccttatgatgtttcttgaggcagaacagggtgtggcacatataaatgaggaaataagccttgaaattattcacaaatatgaaccatccaaagagggtcaggaaaagggctggctctccatagacgggttcactaattaccttatgtcacctgactgttatatattcgatccagaacataagaaggtctgtcaggatatgaagcaacctctgtctcattactttataaactcatctcataatacatacttaatagaggatcagttccgaggtccctccgacatcacaggatatattcgagctcttaaaatgggttgccggagtgttgaattagatgtatgggatgggccggacaatgaacctgtaatttacacaggccacaccatgacctctcagatagttttccgcagtgtcattgatattattaacaagtatgcattctttgcttcagagtatcctcttatcttgtgtttagaaaaccactgttccattaaacaacagaaggtaatggttcagcacatgaagaaacttttaggagacaagctctatacaacatcacccaatgttgaggaatcttatctaccatccccagatgtcctgaaagggaaaatactaattaaagcaaagaagctgtcctcaaattgctctggggtagaaggagatgttactgacgaagatgaaggagcagaaatgtctcagaggatgggaaaagagaacatggagcaacccaataatgtgcctgtgaagcgatttcagctttgtaaagaactgtctgaactggtcagcatctgcaaatcagttcagttcaaagaatttcaggtgtcgtttcaggttcagaagtactgggaagtctgttcctttaatgaagtgcttgccagcaagtacgccaatgaaaatccaggggactttgtaaattacaacaaacgttttcttgctagggtttttcccagtccaatgagaattgattccagtaacatgaatcctcaagatttttggaaatgtggttgccaaattgtagccatgaactttcagacaccaggactgatgatggacctgaatattggctggtttaggcagaacggaaactgtggctatgtcctccggccagccatcatgagggaggaggtctccttcttcagcgccaatacaaaagactctgtcccaggggtctcacctcaacttcttcacattaaaatcatcagtgggcagaactttcccaagcccaaaggatcaggtgccaaaggtgatgtggtagatccttatgtctatgttgaaatccatggaatccctgctgattgtgcagaacaaaggacaaaaacagtgcaccagaatggagacgctcccatttttgatgaaagctttgaatttcaaatcaacctgcctgaactggccatggtgcgctttgtagtgctggatgatgactacattggggatgaattcatcggccagtacacaattccctttgaatgtttacagacgggctaccgccatgtccccctgcagtccttaactggagaggtccttgcacatgcttctttatttgtccacgtggctattactaaccgaagaggaggaggaaagcctcataaaaggggcctttctgtgagaaaagggaagaaatccagggaatatgcatctttgagaacactgtggattaaaaccgtggatgaggtattcaagaatgcccagccccctatacgggatgccacagatctgagagaaaacatgcagaatgcggtggtgtcattcaaggagctgtgtggcctctcctctgtggccaatctcatgcagtgcatgttggcggtgtctccccgctttctggggcccgataacacacccctagtggtcctaaatctcagcgagcagtaccccacaatggagctgcagggaattgtgccggaggttctgaagaagatcgtaacaacttatgacatgatgattcagtccctcaaggcgttgattgaaaatgcagatgctgtatatgaaaagatcgtacattgtcagaaggcagccatggaattccatgaacacttgcacagcataggcaccaaggaaggtttgaaggaaagaaaactacaaaaagcagtggagagctttacctggaatattaccatcttaaagggacaagcagatcttttgaaatatgctaagaatgagacattggagaacctgaaacaaatccattttgctgctgtttcatgtggactgaataaaccaggcaccgaaaatgctgatgtccagaagccacgccggagcttggaagtcatacccgaaaaagcaaacgatgaaactggagaatgaggaaacttacaataaaccattatggagtttataactctaggaccaattgtagtcagatgggacatttgctttgcactcactaatgagaataatattcgggattttaaagcacaactggaatagctaattacagtctattaaaactgtgaatgtatgtagcaatcctgcgtgtgaaggcaaataaactctttaacaggcaattatattgctggccaaaatatgctatatttgtatacaaagacattctaactcagttccagtatgaagaaagattattcactctagctccactgagaaacattttcctaagtgaaaacaatttcttaagatggaaatggattggattgtcaaattattatttattggagaaaaaaacctgatctacacatttttacttatatggggttgccagagtctctgggttctagatgattttggtggcatgcttgctgagccataattactaaagagaatgtaagtggacgggttccctgaatccccggggtccttggagagccatcgaggagaatgtgcaattggactgaagctccctggctgaagatacatgccgagtcagcacatgggtagagatgatgtaaaagcagccaatctggaaacaatacattgtaaatagtttttcattgtatgaagtagtgttcacattaaaaagatgttttatga

SEQ ID NO: 22495 - DNA, 3501 bp, Homo sapiens
  source 1..3501: mol_type = unassigned DNA
cgagggcaggccctgagccccggccccgcctcggccggccccgcctcggccggggcgtgggctccggctgcagctccggtctgctctcttggctccggaacccccgcgggcgctggctccgtctgccagggatgacggcgacccctgagagcctcttccccactggggacgaactggactccagccagctccagatggagtccgatgaggtggacaccctgaaggagggagaggacccagccgaccggatgcacccgtttctggccatctatgagcttcagtctctgaaagtgcaccccttggtgttcgcacctggggtccctgtcacagcccaggtggtgggcaccgaaagatataccagcggatccaaggtgggaacctgcactctgtattctgtccgcttgactcacggcgacttttcctggacaaccaagaagaaataccgtcattttcaggagctgcatcgggacctcctgagacacaaagtcttgatgagtctgctccctctggctcgatttgccgttgcctattctccagcccgagatgcaggcaacagagagatgccctctctaccccgggcaggtcctgagggctccaccagacatgcagccagcaaacagaaatacctggagaattacctcaaccgtctcttgaccatgtctttctatcgcaactaccatgccatgacagagttcctggaagtcagtcagctgtcctttatcccggacttgggccgcaaaggactggaggggatgatccggaagcgctcaggtggccaccgtgttcctggcctcacctgctgtggccgagaccaagtttgttatcgctggtccaagaggtggctggtggtgaaggactccttcctgctgtacatgtgcctcgagacaggtgccatctcatttgttcagctctttgaccctggctttgaggtgcaagtggggaaaaggagcacggaggcacggcacggcgtgcggatcgatacctcccacaggtccttgattctcaagtgcagcagctaccggcaggcacggtggtgggcccaagagatcactgagctggcacagggcccaggcagagacttcctacagctgcaccggcatgacagctacgccccaccccggcctgggaccttggcccggtggtttgtgaatggggcaggttactttgctgctgtggcagatgccatccttcgagctcaagaggagattttcatcacagactggtggttgagtcctgaggtttacctgaagcgtccggcccattcagatgactggagactggacattatgctcaagaggaaggcggaggagggtgtccgtgtgtctattctgctgtttaaagaagtggaattggccttgggcatcaacagtggctatagcaagagggcgctgatgctgctgcaccccaacataaaggtgatgcgtcacccagaccaagtgacgttgtgggcccatcatgagaagctcctggtggtggaccaagtggtagcattcctggggggactggaccttgcctatggccgctgggatgacctgcactaccgactgactgaccttggagactcctctgaatcagctgcctcccagcctcccaccccgcgcccagactcaccagccaccccagacctctctcacaaccaattcttctggctgggcaaggactacagcaatcttatcaccaaggactgggtgcagctggaccggcctttcgaagatttcattgacagggagacgacccctcggatgccatggcgggacgttggggtggtcgtccatggcctaccggcccgggaccttgcccggcacttcatccagcgctggaacttcaccaagaccaccaaggccaagtacaagactcccacatacccctacctgcttcccaagtctaccagcacggccaatcagctccccttcacacttccaggagggcagtgcaccaccgtacaggtcttgcgatcagtggaccgctggtcagcagggactctggagaactccatcctcaatgcctacctgcacaccatcagggagagccagcacttcctctacattgagaatcagttcttcattagctgctcagatgggcggacggttctgaacaaggtgggcgatgagattgtggacagaatcctgaaggcccacaaacaggggtggtgttaccgagtctacgtgcttttgcccttactccctggcttcgagggtgacatctccacgggcggtggcaactccatccaggccattctgcactttacttacaggaccctgtgtcgtggggagtattcaatcctgcatcgccttaaagcagccatggggacagcatggcgggactatatttccatctgcgggcttcgtacacacggagagctgggcgggcaccccgtctcggagctcatctacatccacagcaaggtgctcatcgcagatgaccggacagtcatcattggttctgcaaacatcaatgaccggagcttgctggggaagcgggacagtgagctggccgtgctgatcgaggacacagagacggaaccatccctcatgaatggggcagagtatcaggcgggcaggtttgccttgagtctgcggaagcactgcttcggtgtgattcttggagcaaatacccggccagacttggatctccgagaccccatctgtgatgacttcttccagttgtggcaagacatggctgagagcaacgccaatatctatgagcagatcttccgctgcctgccatccaatgccacgcgttccctgcggactctccgggagtacgtggccgtggagcccttggccacggtcagtccccccttggctcggtctgagctcacccaggtccagggccacctggtccacttccccctcaagttcctagaggatgagtctttgctgcccccgctgggtagcaaggagggcatgatccccctagaagtgtggacatagttgaggcccccgtcagggagaggtcaccagctgctgtgccccaccacgtctggctccctgccccttaaccccaaggactgagggcagtgccctttgagatctggggaggcaggcattcctgaagggaactagaggtgttacagaggacccttacgtgagaaatagctgaaaagggcactcccaaccctgggctggggaggaggagagagtcccagagctcatcccccctgctgcccagtgcaaaccacttctccatgctgcaaaggagaagcacagctcctgccagggtgagcagggtcaagcctcttattccaggagaagggggctctgccccaggccctactacccattgttcccttcctcttcctgcccttgaaccccctccctgtcccagggccctcccagcccattgctgccaaggtggagggaaggataaagccacttctggcttcagcccccaccaggggaaggaaggagggcacattaactccctccaccagcctgctgacagacactaactttgtatccgttcaataagcatttcataaataaaggtgtagaaaaggtt

SEQ ID NO: 22496 - DNA, 3391 bp, Homo sapiens
  source 1..3391: mol_type = unassigned DNA
ctccggtctgctctcttggctccggaacccccgcgggcgctggctccgtctgccagggatgacggcgacccctgagagcctcttccccactggggacgaactggactccagccagctccagatggagtccgatgaggtggacaccctgaaggagggagaggacccagccgaccggatgcacccgtttctggccatctatgagcttcagtctctgaaagtgcaccccttggtgttcgcacctggggtccctgtcacagcccaggtggtgggcaccgaaagatataccagcggatccaaggtgggaacctgcactctgtattctgtccgcttgactcacggcgacttttcctggacaaccaagaagaaataccgtcattttcaggagctgcatcgggacctcctgagacacaaagtcttgatgagtctgctccctctggctcgatttgccgttgcctattctccagcccgagatgcaggcaacagagagatgccctctctaccccgggcaggtcctgagggctccaccagacatgcagccagcaaacagaaatacctggagaattacctcaaccgtctcttgaccatgtctttctatcgcaactaccatgccatgacagagttcctggaagtcagtcagctgtcctttatcccggacttgggccgcaaaggactggaggggatgatccggaagcgctcaggtggccaccgtgttcctggcctcacctgctgtggccgagaccaagtttgttatcgctggtccaagaggtggctggtggtgaaggactccttcctgctgtacatgtgcctcgagacaggtgccatctcatttgttcagctctttgaccctggctttgaggtgcaagtggggaaaaggagcacggaggcacggcacggcgtgcggatcgatacctcccacaggtccttgattctcaagtgcagcagctaccggcaggcacggtggtgggcccaagagatcactgagctggcacagggcccaggcagagacttcctacagctgcaccggcatgacagctacgccccaccccggcctgggaccttggcccggtggtttgtgaatggggcaggttactttgctgctgtggcagatgccatccttcgagctcaagaggagattttcatcacagactggtggttgagtcctgaggtttacctgaagcgtccggcccattcagatgactggagactggacattatgctcaagaggaaggcggaggagggtgtccgtgtgtctattctgctgtttaaagaagtggaattggccttgggcatcaacagtggctatagcaagagggcgctgatgctgctgcaccccaacataaaggtgatgcgtcacccagaccaagtgacgttgtgggcccatcatgagaagctcctggtggtggaccaagtggtagcattcctggggggactggaccttgcctatggccgctgggatgacctgcactaccgactgactgaccttggagactcctctgaatcagctgcctcccagcctcccaccccgcgcccagactcaccagccaccccagacctctctcacaaccaattcttctggctgggcaaggactacagcaatcttatcaccaaggactgggtgcagctggaccggcctttcgaagatttcattgacagggagacgacccctcggatgccatggcgggacgttggggtggtcgtccatggcctaccggcccgggaccttgcccggcacttcatccagcgctggaacttcaccaagaccaccaaggccaagtacaagactcccacatacccctacctgcttcccaagtctaccagcacggccaatcagctccccttcacacttccaggagggcagtgcaccaccgtacaggtcttgcgatcagtggaccgctggtcagcagggactctggagaactccatcctcaatgcctacctgcacaccatcagggagagccagcacttcctctacattgagaatcagttcttcattagctgctcagatgggcggacggttctgaacaaggtgggcgatgagattgtggacagaatcctgaaggcccacaaacaggggtggtgttaccgagtctacgtgcttttgcccttactccctggcttcgagggtgacatctccacgggcggtggcaactccatccaggccattctgcactttacttacaggaccctgtgtcgtggggagtattcaatcctgcatcgccttaaagcagccatggggacagcatggcgggactatatttccatctgcgggcttcgtacacacggagagctgggcgggcaccccgtctcggagctcatctacatccacagcaaggtgctcatcgcagatgaccggacagtcatcattggttctgcaaacatcaatgaccggagcttgctggggaagcgggacagtgagctggccgtgctgatcgaggacacagagacggaaccatccctcatgaatggggcagagtatcaggcgggcagtgtgattcttggagcaaatacccggccagacttggatctccgagaccccatctgtgatgacttcttccagttgtggcaagacatggctgagagcaacgccaatatctatgagcagatcttccgctgcctgccatccaatgccacgcgttccctgcggactctccgggagtacgtggccgtggagcccttggccacggtcagtccccccttggctcggtctgagctcacccaggtccagggccacctggtccacttccccctcaagttcctagaggatgagtctttgctgcccccgctgggtagcaaggagggcatgatccccctagaagtgtggacatagttgaggcccccgtcagggagaggtcaccagctgctgtgccccaccacgtctggctccctgccccttaaccccaaggactgagggcagtgccctttgagatctggggaggcaggcattcctgaagggaactagaggtgttacagaggacccttacgtgagaaatagctgaaaagggcactcccaaccctgggctggggaggaggagagagtcccagagctcatcccccctgctgcccagtgcaaaccacttctccatgctgcaaaggagaagcacagctcctgccagggtgagcagggtcaagcctcttattccaggagaagggggctctgccccaggccctactacccattgttcccttcctcttcctgcccttgaaccccctccctgtcccagggccctcccagcccattgctgccaaggtggagggaaggataaagccacttctggcttcagcccccaccaggggaaggaaggagggcacattaactccctccaccagcctgctgacagacactaactttgtatccgttcaataagcatttcataaataaaggtgtagaaaa

SEQ ID NO: 22497 - DNA, 2233 bp, Homo sapiens
  source 1..2233: mol_type = unassigned DNA
gagtcccagttcctctccttaaccaccggacaaacgtctctggagtctctccaatgagcaagaaagcaagtcgggggtaggggaggggcctcacaccagggggtgggcgcagtccctcctccagctccttcaccctccagtagtctcgtgggtccccgagcgccagcgcgggaaccgggaaaaggaaaccgtgttgtgtacgtaagattcaggaaacgaaaccaggagccgcgggtgttggcgcaaaggttactcccagacccttttccggctgacttctgagaaggttgcgcagcagctgtgcccggcagtctagaggcgcagaagaggaagccatcgcctggccccggctctctggaccttgtctcgctcgggagcggaaacagcggcagccagagaactgttttaatcatggacaaacaaaactcacagatgaatgcttctcacccggaaacaaacttgccagttgggtatcctcctcagtatccaccgacagcattccaaggacctccaggatatagtggctaccctgggccccaggtcagctacccacccccaccagccggccattcaggtcctggcccagctggctttcctgtcccaaatcagccagtgtataatcagccagtatataatcagccagttggagctgcaggggtaccatggatgccagcgccacagcctccattaaactgtccacctggattagaatatttaagtcagatagatcagatactgattcatcagcaaattgaacttctggaagttttaacaggttttgaaactaataacaaatatgaaattaagaacagctttggacagagggtttactttgcagcggaagatactgattgctgtacccgaaattgctgtgggccatctagaccttttaccttgaggattattgataatatgggtcaagaagtcataactctggagagaccactaagatgtagcagctgttgttgtccctgctgccttcaggagatagaaatccaagctcctcctggtgtaccaataggttatgttattcagacttggcacccatgtctaccaaagtttacaattcaaaatgagaaaagagaggatgtactaaaaataagtggtccatgtgttgtgtgcagctgttgtggagatgttgattttgagattaaatctcttgatgaacagtgtgtggttggcaaaatttccaagcactggactggaattttgagagaggcatttacagacgctgataactttggaatccagttccctttagaccttgatgttaaaatgaaagctgtaatgattggtgcctgtttcctcattgacttcatgttttttgaaagcactggcagccaggaacaaaaatcaggagtgtggtagtggattagtgaaagtctcctcaggaaatctgaagtctgtatattgattgagactatctaaactcatacctgtatgaattaagctgtaaggcctgtagctctggttgtatacttttgcttttcaaattatagtttatcttctgtataactgatttataaaggtttttgtacattttttaatactcattgtcaatttgagaaaaaggacatatgagtttttgcatttattaatgaaacttcctttgaaaaactgctttgaattatgatctctgattcattgtccattttactaccaaatattaactaaggccttattaatttttatataaattatatcttgtcctattaaatctagttacaatttatttcatgcataagagctaatgttattttgcaaatgccatatattcaaaaaagctcaaagataattttctttactattatgttcaaataatattcaatatgcatattatctttaaaaagttaaatgtttttttaatcttcaagaaatcatgctacacttaacttctcctagaagctaatctataccataatattttcatattcacaagatattaaattaccaattttcaaattattgttagtaaagaacaaaatgattctctcccaaagaaagacacattttaaatactccttcactctaaaactctggtattataacttttgaaagttaatatttctacatgaaatgtttagctcttacactctatccttcctagaaaatggtaattgagattactcagatattaattaaatacaatatcatatatatattcacagagtataaacctaaataatgatctattagattcaaatatttgaaataaaaacttgatttttttgta

SEQ ID NO: 22498 - DNA, 1384 bp, Homo sapiens
  source 1..1384: mol_type = unassigned DNA
gccccggctctctggaccttgtctcgctcgggagcggaaacagcggcagccagagcataaaatacacaagaggatttttatggaatggctccttgttacaaggaccacataaacccattttgaattattcaaccattgctgaacttcttgaaactgttttaatcatggacaaacaaaactcacagatgaatgcttctcacccggaaacaaacttgccagttgggtatcctcctcagtatccaccgacagcattccaagatagatcagatactgattcatcagcaaattgaacttctggaagattaaatctcttgatgaacagtgtgtggttggcaaaatttccaagcactggactggaattttgagagaggcatttacagacgctgataactttggaatccagttccctttagaccttgatgttaaaatgaaagctgtaatgattggtgcctgtttcctcattgacttcatgttttttgaaagcactggcagccaggaacaaaaatcaggagtgtggtagtggattagtgaaagtctcctcaggaaatctgaagtctgtatattgattgagactatctaaactcatacctgtatgaattaagctgtaaggcctgtagctctggttgtatacttttgcttttcaaattatagtttatcttctgtataactgatttataaaggtttttgtacattttttaatactcattgtcaatttgagaaaaaggacatatgagtttttgcatttattaatgaaacttcctttgaaaaactgctttgaattatgatctctgattcattgtccattttactaccaaatattaactaaggccttattaatttttatataaattatatcttgtcctattaaatctagttacaatttatttcatgcataagagctaatgttattttgcaaatgccatatattcaaaaaagctcaaagataattttctttactattatgttcaaataatattcaatatgcatattatctttaaaaagttaaatgtttttttaatcttcaagaaatcatgctacacttaacttctcctagaagctaatctataccataatattttcatattcacaagatattaaattaccaattttcaaattattgttagtaaagaacaaaatgattctctcccaaagaaagacacattttaaatactccttcactctaaaactctggtattataacttttgaaagttaatatttctacatgaaatgtttagctcttacactctatccttcctagaaaatggtaattgagattactcagatattaattaaatacaatatcatatatatattcacagagtataaacctaaataatgatctattagattcaaatatttgaaataaaaacttgatttttttgt

SEQ ID NO: 22499 - DNA, 1198 bp, Homo sapiens
  source 1..1198: mol_type = unassigned DNA
gttcctctccttaaccaccggacaaacgtctctggagtctctccaatgagcaagaaagcaagtcgggggtaggggaggggcctcacaccagggggtgggcgcagtccctcctccagctccttcaccctccagtagtctcgtgggtccccgagcgccagcgcgggaaccgggaaaaggaaaccgtgttgtgtacgtaagattcaggaaacgaaaccaggagccgcgggtgttggcgcaaaggttactcccagacccttttccggctgacttctgagaaggttgcgcagcagctgtgcccggcagtctagaggcgcagaagaggaagccatcgcctggccccggctctctggaccttgtctcgctcgggagcggaaacagcggcagccagagcataaaatacacaagaggatttttatggaatggctccttgttacaagaactgttttaatcatggacaaacaaaactcacagatgaatgcttctcacccggaaacaaacttgccagttgggtatcctcctcagtatccaccgacagcattccaaggacctccaggatatagtggctaccctgggccccaggtcagctacccacccccaccagccggccattcaggtcctggcccagctggctttcctgtcccaaatcagccagtgtataatcagccagtatataatcagccagttggagctgcaggggtaccatggatgccagcgccacagcctccattaaactgtccacctggattagaatatttaagtcagatagatcagatactgattcatcagcaaattgaacttctggaagttttaacaggttttgaaactaataacaaatatgaaattaagaacagctttggacagagggtttactttgcagcggaagatactgattgctgtacccgaaattgctgtgggccatctagaccttttaccttgaggattattgataatatgggtcaagaagtcataactctggagagaccactaagatgtagcagctgttgttgtccctgctgccttcaggagatagaaatccaagctcctcctggtgtaccaataggttatgttattcagacttggcacccatgtctaccaaagtttacaattcaaaatgagaaaagagaggatgtactaaaaataagtggtccatgtgttgtgtgcagctgttgtggagatgttgattttgagattaaatctc

SEQ ID NO: 22500 - DNA, 1265 bp, Homo sapiens
  source 1..1265: mol_type = unassigned DNA
ggccgaatggagaatgaagccttttcaaattcacctcccagtgaaccaccctcaaaatagaagtgaatgtgaaaccacagatatttcattaaaacatatctgaagataaaaacatacctcaagcttcacagatataggacttctgagctgagaggacctcccggacatattgtctaccctaagcaccaggctggacacactgggaaacaggctgaccacctgggctcccaggccttctacccaggacgtcagcatgactacctagtcccacctgctggcacagctggcattcctgttcaaaatcagccaggtagacctgaaggggtaccatggatgccagcaccaccaccaccattaaactgtccgccaggattggaatacttaagtcagatagatatgatactaattcatcagcaaattgaacttctggaagttctattcagttttgaaagtagtaacatgtatgaaatcaagaacagctttgggcagaggatttattttgcagcagaagatactaatttctgtatccgaaattgctgtgggcggtctagaccttttaccttgaggattactgataatgtgggtcgagaagtcataactctggaaagaccactaagatgtaactgttgttgttgcccctgctgccttcaggagatagaaatccaagctcctcctggtgtaccagtaggttatgttactcagacctggcacccatgtctaacaaagtttacaattaaaaatcagaaaagagaggatgtactaaaaattagtggtccatgtatcgtgtgcagctgtattgcgggtgttgattttgagattacatctcttgatgaacaaattgtggttggcaggatttctaagcactggtctgggtttttaagagaggcatttactgatgctgacaactttggaatccaattccctagagaccttgatgttaaaatgaaagccgtgatgattggtgcctgtttcctcattgactacatgttttttgaaagaactaggtaatgactggaatgtcagagtgtgggagtggattaatgattccggatctttggctaggcaaaatgaaactataactgatctaaacggttccttccttcttctactgtgcaaggaagatgtaaggaaaaactcgcacactatctgtggaactcatttaaattcaaatactagataaacatttcgcattgaatatttacatggagaaaaatcatcaaacatcaacaattatcaagttaattaataaaaatactaggtattgc

SEQ ID NO: 22501 - DNA, 759 bp, Homo sapiens
  source 1..759: mol_type = unassigned DNA
gtatctgcccatcttagattcttcctagcaataattctgagagactctggattgtgggccgaatggagaatgaagccttttcaaattcacctcccaggacctcccggacatattgtctaccctaagcaccaggctggacacactgggaaacaggctgaccacctgggctcccaggccttctacccaggacgtcagcatgactacctagtcccacctgctggcacagctggcattcctgttcaaaatcagccaggtagacctgaaggggtaccatggatgccagcaccaccaccaccattaaactgtccgccaggattggaatacttaagtcagatagatatgatactaattcatcagcaaattgaacttctggaagttctattcagttttgaaagtagtaacatgtatgaaatcaagaacagctttgggcagaggatttattttgcagcagaagatactaatttctgtatccgaaattgctgtgggcggtctagaccttttaccttgaggattactgataatgtgggtcgagaagtcataactctggaaagaccactaagatgtaactgttgttgttgcccctgctgccttcaggagatagaaatccaagctcctcctggtgtaccagtaggttatgttactcagacctggcacccatgtctaacaaagtttacaattaaaaatcagaaaagagaggatgtactaaaaattagtggtccatgtatcgtgtgcagctgtattgcgggtgttgattttgag

SEQ ID NO: 22502 - DNA, 1441 bp, Homo sapiens
  source 1..1441: mol_type = unassigned DNA
acaccagaaccgttcgaatgacaaggggtgtcctgcctgaaaacgccttgcggggctcagcttccccttagctacactgctttacaggtagagagcggccctgaatcctgggcagagtctgggctcaggagcatgtgccagcatagtggggctattagaagggacggttaatacagcctgcaagctgtcatttatcaggccaaataaacccacttggaattattcaacctttgctgaacttcttgagtagatgtaactaagaggtgactataattggagaattcttaagagtttcactatattatgaaaatgtgtgcttaaagttggtaatcataaaaaataattttgaaatggcagcttatgaaaggatattatttgtagctgtgttttcccttgtaaattccagtactgggcactcctgaaaacttcgcaagatatatatgagatcatggaactcactcttctgcttaaattcctccagacctcccggacatattgtctaccctaagcaccaggctggacacactgggaaacaggctgaccacctgggctcccaggccttctacccaggacgtcagcatgactacctagtcccacctgctggcacagctggcattcctgttcaaaatcagccaggtagacctgaaggggtaccatggatgccagcaccaccaccaccattaaactgtccgccaggattggaatacttaagtcagatagatatgatactaattcatcagcaaattgaacttctggaagttctattcagttttgaaagtagtaacatgtatgaaatcaagaacagctttgggcagaggatttattttgcagcagaagatactaatttctgtatccgaaattgctgtgggcggtctagaccttttaccttgaggattactgataatgtgggtcgagaagtcataactctggaaagaccactaagatgtaactgttgttgttgcccctgctgccttcaggagatagaaatccaagctcctcctggtgtaccagtaggttatgttactcagacctggcacccatgtctaacaaagtttacaattaaaaatcagaaaagagaggatgtactaaaaattagtggtccatgtatcgtgtgcagctgtattgcgggtgttgattttgagattacatctcttgatgaacaaattgtggttggcaggatttctaagcactggtctgggtttttaagagaggcatttactgatgctgacaactttggaatccaattccctagagaccttgatgttaaaatgaaagccgtgatgattggtgcctgtttcctcattgactacatgttttttgaaagaactaggtaatgactggaatgtcagagtgtgggagtggattaatgattccggatctttggctaggcaaaatgaaactataactgatctaaacggttccttccttcttctactgtgca

SEQ ID NO: 22503 - DNA, 1208 bp, Homo sapiens
  source 1..1208: mol_type = unassigned DNA
gtatctgcccatcttagattcttcctagcaataattctgagagactctggattgtgggccgaatggagaatgaagccttttcaaattcacctcccaggacctcccggacatattgtctaccctaagcaccaggctggacacactgggaaacaggctgaccacctgggctcccaggccttctacccaggacgtcagcatgactacctagtcccacctgctggcacagctggcattcctgttcaaaatcagccaggtagacctgaaggggtaccatggatgccagcaccaccaccaccattaaactgtccgccaggattggaatacttaagtcagatagatatgatactaattcatcagcaaattgaacttctggaagttctattcagttttgaaagtagtaacatgtatgaaatcaagaacagctttgggcagaggatttattttgcagcagaagatactaatttctgtatccgaaattgctgtgggcggtctagaccttttaccttgaggattactgataatgtgggtcgagaagtcataactctggaaagaccactaagatgtaactgttgttgttgcccctgctgccttcaggagatagaaatccaagctcctcctggtgtaccagtaggttatgttactcagacctggcacccatgtctaacaaagtttacaattaaaaatcagaaaagagaggatgtactaaaaattagtggtccatgtatcgtgtgcagctgtattgcgggtgttgattttgagattacatctcttgatgaacaaattgtggttggcaggatttctaagcactggtctgggtttttaagagaggcatttactgatgctgacaactttggaatccaattccctagagaccttgatgttaaaatgaaagccgtgatgattggtgcctgtttcctcattgactacatgttttttgaaagaactaggtaatgactggaatgtcagagtgtgggagtggattaatgattccggatctttggctaggcaaaatgaaactataactgatctaaacggttccttccttcttctactgtgcaaggaagatgtaaggaaaaactcgcacactatctgtggaactcatttaaattcaaatactagataaacatttcgcattgaatatttacatggagaaaaatcatcaaacatcaacaattatcaagttaattaataaaaatactaggtattgc

SEQ ID NO: 22504 - DNA, 1746 bp, Homo sapiens
  source 1..1746: mol_type = unassigned DNA
ctgtgagctgccgagtgctaggcacccgggctcttctgggggctccagtcagaggcgccgcccaagagaccctgggccggcgccgggcgcagctgcctctccgtctttgtgtctgtctctgtgtctgtctggctatctccgagtttgcctccgcttccagaactaagccacccagacaccatcatctcgaaaaccccagcccttctcccatggcaggctacttgccccccaaaggctacgccccttcgcccccacctccctaccctgtcacccctgggtacccggagccggcgctacatcctgggcccgggcaggcgccagtgcccgcccaggtacctgccccagctcccggcttcgccctcttcccctcgcctggccccgtggccttggggtctgctgcccccttcttgccactgccaggggtgccttctggcctcgaattcctggtgcagattgatcagattttgattcaccagaaggctgagcgagtggaaacgttcctaggctgggagacctgtaatcggtatgaactgcgctctggggccgggcagcccctgggtcaggcggccgaggagagcaactgctgcgcccgtctgtgctgtggcgcccgccggccgctgcgtgtccgcctggccgaccccggggaccgtgaggtgctgcgtttgctccgcccgctgcactgtggctgcagctgctgcccctgtggcctccaggagatggaagtacaggctccaccaggcaccaccattggccacgtgctacagacctggcatcccttcctccccaagttctccatccaggatgccgatcgccagacagtcttgcgagtggtggggccctgctggacctgtggctgtggcacagacaccaactttgaggtgaagactcgggatgaatcccgcagtgtgggccgcatcagcaagcagtgggggggcctggtccgagaagccctcacagatgcagatgactttggcctacagttcccgctggacctggatgtgagggtgaaggctgtgctgctgggagccacattcctcattgactacatgttctttgagaagcgaggaggcgctgggccctctgccgtcaccagttagaggccaccatggtgtgaggagaccatcacctcgaccagaactccagatggtcacctgccctggcccctcctctgggcagcccctttcctccatgtacactgcaggggacagaaggggggccccatccctaccctactccctggccgcctgcccctgtggttcccaaggaggggtatgtatgagagccgctctcctgctacctcccaccactgtcccagcagtccctcggcacacaggcatatcagctttcacactttccccatgcactctctcccacccccttccagggcctctgctccaaaggaggcctctggaacccaggactctggggttttacaagagggctggggtgtggaagggcaagctgcaccaaagacggtggatatagccaccgcccccccgccgctgcctagcatctgcttggccaattagttcagcctcagaccatggcactttgagggggtctctacctccccatcaacagctgcagggggaccccagtgccaacttcctctcccactagggccctgccttcagctggtgcttgctgcgattcctgtgccttatgtaactgcccttccttcccttgccctaggaaaaaggctgcatctttatatgttacattcatataaactttgtaactttttgg

SEQ ID NO: 22505 - DNA, 1734 bp, Homo sapiens
  source 1..1734: mol_type = unassigned DNA
cgagtgctaggcacccgggctcttctgggggctccagtcagaggcgccgcccaagagaccctgggccggcgccgggcgcagctgcctctccgtctttgtgtctgtctctgtgtctgtctggctatctccgagtttgcctccgcttccagaactaagccacccagacaccatcatctcgaaaaccccagcccttctcccatggcaggctacttgccccccaaaggctacgccccttcgcccccacctccctaccctgtcacccctgggtacccggagccggcgctacatcctgggcccgggcaggcgccagtgcccgcccaggtacctgccccagctcccggcttcgccctcttcccctcgcctggccccgtggccttggggtctgctgcccccttcttgccactgccaggggtgccttctggcctcgaattcctggtgcagattgatcagattttgattcaccagaaggctgagcgagtggaaacgttcctaggctggagacctgtaatcggtatgaactgcgctctggggccgggcagcccctgggtcaggcggccgaggagagcaactgctgcgcccgtctgtgctgtggcgcccgccggccgctgcgtgtccgcctggccgaccccggggaccgtgaggtgctgcgtttgctccgcccgctgcactgtggctgcagctgctgcccctgtggcctccaggagatggaagtacaggctccaccaggcaccaccattggccacgtgctacagacctggcatcccttcctccccaagttctccatccaggatgccgatcgccagacagtcttgcgagtggtggggccctgctggacctgtggctgtggcacagacaccaactttgaggtgaagactcgggatgaatcccgcagtgtgggccgcatcagcaagcagtgggggggcctggtccgagaagccctcacagatgcagatgactttggcctacagttcccgctggacctggatgtgagggtgaaggctgtgctgctgggagccacattcctcattgactacatgttctttgagaagcgaggaggcgctgggccctctgccgtcaccagttagaggccaccatggtgtgaggagaccatcacctcgaccagaactccagatggtcacctgccctggcccctcctctgggcagcccctttcctccatgtacactgcaggggacagaaggggggccccatccctaccctactccctggccgcctgcccctgtggttcccaaggaggggtatgtatgagagccgctctcctgctacctcccaccactgtcccagcagtccctcggcacacaggcatatcagctttcacactttccccatgcactctctcccacccccttccagggcctctgctccaaaggaggcctctggaacccaggactctggggttttacaagagggctggggtgtggaagggcaagctgcaccaaagacggtggatatagccaccgcccccccgccgctgcctagcatctgcttggccaattagttcagcctcagaccatggcactttgagggggtctctacctccccatcaacagctgcagggggaccccagtgccaacttcctctcccactagggccctgccttcagctggtgcttgctgcgattcctgtgccttatgtaactgcccttccttcccttgccctaggaaaaaggctgcatctttatatgttacattcatataaactttgtaactttttgg

SEQ ID NO: 22506 - DNA, 2557 bp, Homo sapiens
  source 1..2557: mol_type = unassigned DNA
ctgttctacagctatggccgggccagctgcagctttccgccgcttgggcgccttgtccggagctgcggccttaggcttcgcttcctacggggcgcacggcgcccaattcccagatgcctacgggaaggagctgtttgacaaggccaacaaacaccacttcttacacagcctggccctgttaggggtgccccattgcagaaagccactctgggcggcctgagcacgctcactgacaccgtttggcggcctgtcacccgcgtggctggggcacctgcagaaactgctgtcgctgcgaggtgcccgtgtgggtcaccgctgtgccagggagagaagacggcgaggtcgcccctgggaggcagaaggcgagccaggagccagtcctggaagccaatgagcgctcctactctctgggcatctgcagtccgagcggaaggggcgggaacgtcggcgacgccgaggagcaaagcccacgatcggcttcccggggcagcggacggctgccttcctcccggcgcaaacgcaccgcccaggagggggcgggctcggcgggtcggggggcggggccggggtccgagctcgggcccgcctccgcctccgccagctcctgtgagctgccgagtgctaggcacccgggctcttctgggggctccaggtgagcgggggcacagaggggtcagggagaccgcccttggggtggggctgtcggtctgaccgcgggtccatctgtcctgccgtcggcccacagcctcctccgcaggatgggagaacaaagggagggggcggttctggggcccccgagggaatccagggtcccaggtacccggtcccgcccactgacacttgggtttctccccgagtcagaggcgccgcccaagagaccctgggccggcgccgggcgcagctgcctctccgtctttgtgtctgtctctgtgtctgtctggctatctccgagtttgcctccgcttccagaactaagccacccagacaccatcatctcgaaaaccccagcccttctcccatggcaggctacttgccccccaaaggctacgccccttcgcccccacctccctaccctgtcacccctgggtacccggagccggcgctacatcctgggcccgggcaggcgccagtgcccgcccaggtacctgccccagctcccggcttcgccctcttcccctcgcctggccccgtggccttggggtctgctgcccccttcttgccactgccaggggtgccttctggcctcgaattcctggtgcagattgatcagattttgattcaccagaaggctgagcgagtggaaacgttcctaggctgggagacctgtaatcggtatgaactgcgctctggggccgggcagcccctgggtcaggcggccgaggagagcaactgctgcgcccgtctgtgctgtggcgcccgccggccgctgcgtgtccgcctggccgaccccggggaccgtgaggtgctgcgtttgctccgcccgctgcactgtggctgcagctgctgcccctgtggcctccaggagatggaagtacaggctccaccaggcaccaccattggccacgtgctacagacctggcatcccttcctccccaagttctccatccaggatgccgatcgccagacagtcttgcgagtggtggggccctgctggacctgtggctgtggcacagacaccaactttgaggtgaagactcgggatgaatcccgcagtgtgggccgcatcagcaagcagtgggggggcctggtccgagaagccctcacagatgcagatgactttggcctacagttcccgctggacctggatgtgagggtgaaggctgtgctgctgggagccacattcctcattgactacatgttctttgagaagcgaggaggcgctgggccctctgccgtcaccagttagaggccaccatggtgtgaggagaccatcacctcgaccagaactccagatggtcacctgccctggcccctcctctgggcagcccctttcctccatgtacactgcaggggacagaaggggggccccatccctaccctactccctggccgcctgcccctgtggttcccaaggaggggtatgtatgagagccgctctcctgctacctcccaccactgtcccagcagtccctcggcacacaggcatatcagctttcacactttccccatgcactctctcccacccccttccagggcctctgctccaaaggaggcctctggaacccaggactctggggttttacaagagggctggggtgtggaagggcaagctgcaccaaagacggtggatatagccaccgcccccccgccgctgcctagcatctgcttggccaattagttcagcctcagaccatggcactttgagggggtctctacctccccatcaacagctgcagggggaccccagtgccaacttcctctcccactagggccctgccttcagctggtgcttgctgcgattcctgtgccttatgtaactgcccttccttcccttgccctaggaaaaaggctgcatctttatatgttacattcatataaactttgtaactttttggac

SEQ ID NO: 22507 - DNA, 2032 bp, Homo sapiens
  source 1..2032: mol_type = unassigned DNA
cagggcgctgagcacgcacgccgccggcctggcggcgttcgcggggcccgggaccagccgccgccttctccaggcgctcctactctctgggcatctgcagtccgagcggaaggggcgggaacgtcggcgacgccgaggagcaaagcccacgatcggcttcccggggcagcggacggctgccttcctcccggcgcaaacgcaccgcccaggagggggcgggctcggcgggtcggggggcggggccggggtccgagctcgggcccgcctccgcctccgccagctcctgtgagctgccgagtgctaggcacccgggctcttctgggggctccagtcagaggcgccgcccaagagaccctgggccggcgccgggcgcagctgcctctccgtctttgtgtctgtctctgtgtctgtctggctatctccgagtttgcctccgcttccagaactaagccacccagacaccatcatctcgaaaaccccagcccttctcccatggcaggctacttgccccccaaaggctacgccccttcgcccccacctccctaccctgtcacccctgggtacccggagccggcgctacatcctgggcccgggcaggcgccagtgcccgcccaggtacctgccccagctcccggcttcgccctcttcccctcgcctggccccgtggccttggggtctgctgcccccttcttgccactgccaggggtgccttctggcctcgaattcctggtgcagattgatcagattttgattcaccagaaggctgagcgagtggaaacgttcctaggctgggagacctgtaatcggtatgaactgcgctctggggccgggcagcccctgggtcaggcggccgaggagagcaactgctgcgcccgtctgtgctgtggcgcccgccggccgctgcgtgtccgcctggccgaccccggggaccgtgaggtgctgcgtttgctccgcccgctgcactgtggctgcagctgctgcccctgtggcctccaggagatggaagtacaggctccaccaggcaccaccattggccacgtgctacagacctggcatcccttcctccccaagttctccatccaggatgccgatcgccagacagtcttgcgagtggtggggccctgctggacctgtggctgtggcacagacaccaactttgaggtgaagactcgggatgaatcccgcagtgtgggccgcatcagcaagcagtgggggggcctggtccgagaagccctcacagatgcagatgactttggcctacagttcccgctggacctggatgtgagggtgaaggctgtgctgctgggagccacattcctcattgactacatgttctttgagaagcgaggaggcgctgggccctctgccgtcaccagttagaggccaccatggtgtgaggagaccatcacctcgaccagaactccagatggtcacctgccctggcccctcctctgggcagcccctttcctccatgtacactgcaggggacagaaggggggccccatccctaccctactccctggccgcctgcccctgtggttcccaaggaggggtatgtatgagagccgctctcctgctacctcccaccactgtcccagcagtccctcggcacacaggcatatcagctttcacactttccccatgcactctctcccacccccttccagggcctctgctccaaaggaggcctctggaacccaggactctggggttttacaagagggctggggtgtggaagggcaagctgcaccaaagacggtggatatagccaccgcccccccgccgctgcctagcatctgcttggccaattagttcagcctcagaccatggcactttgagggggtctctacctccccatcaacagctgcagggggaccccagtgccaacttcctctcccactagggccctgccttcagctggtgcttgctgcgattcctgtgccttatgtaactgcccttccttcccttgccctaggaaaaaggctgcatctttatatgttacattcatataaactttgtaactttttggaca

SEQ ID NO: 22508 - DNA, 3303 bp, Homo sapiens
  source 1..3303: mol_type = unassigned DNA
cgagacggggaagccgcgcgcggggaaggagggtccaggcgtgccggacccgcccccagaacccgcgcctagccctcccttccgcgcgcttactttgtttataacttgaaaaatcctctccgtctcccttccctgcctcctttcctttccctttcctctgccagtacaactagacccggcgtctggcgtccccggtgcccagcattctgcggggcaggcggattaattggaattcttcaaaatgtcaggtgtggtacccacagcccctgaacagcctgcaggtgaaatggaaaatcaaacaaaaccaccagatccaaggcctgatgctcctcctgaatacaattctcattttttaccaggaccccctggaacagctgtccctccacctactggctacccaggaggcttgcctatgggatactacagtccacagcaacccagtaccttccctttgtaccagccagttggtggtatccatcctgtccggtatcagcctggcaaatatcctatgccaaatcagtctgttccaataacatggatgccagggccaactcctatggcaaactgccctcctggtctggaatacttagttcagttggacaacatacatgttcttcagcattttgagcctctggaaatgatgacatgttttgaaactaataatagatatgatattaaaaacaactcagaccagatggtttacattgtaaccgaagacacagatgactttaccaggaatgcctatcggacactaaggcccttcgtcctccgggtcactgattgtatgggccgagaaatcatgacaatgcagagacccttcagatgcacctgctgttgcttctgttgcccctctgccagacaagagctggaggtgcagtgtcctcctggtgtcaccattggctttgttgcggaacattggaacctgtgcagggcggtgtacagcatccaaaatgagaagaaagaaaatgtgatgagagttcgtgggccatgctcaacctatggctgtggttcagattctgtttttgaggtcaaatcccttgatggcatatccaacatcggcagtattatccggaagtggaatggtttgttatcagcaatggcagatgctgaccattttgacattcacttcccactagacctggatgtgaagatgaaagccatgatttttggagcttgcttcctcattgacttcatgtattttgaaagatctccaccacaacgttcaagatagagagacacagcaagccatcaactatggttaattttgaaaaatggaaaagttggattgggcttacagtcagcactcagttatttgcaagtgtatttctttgctttgtagagtatttttattgggtgttaactttgacagctgagagtgggcttgcaagaacacaatctaaaagtgtgtttcaattgagtatctctctagtagaataggagttcatcctgaaaagctgtgactcattaacccagtaaacatatacaaagtaagcttaaaacactataaacatgagataagggaaaatgaatccagagttctcatattaataggtagtgaaacaataaggctttttagagcagactttgttggcataaaataacctggcttctatccctaaccctttcctacctttcctctccgtcaacatgtcctcatactgaagacaaacttgtttcaatgatagtcttcatttttaaaaacaaaaaggcaggcagacagaaataatgatgttttcttgcactaagaaggtactacttgtacacatatatcaaaacctcattctgcaaagtttttgaaggtttcaatgggaaatttgattttattacaaaataaaacattttttaatgttaaagtttatatattccatgcttgttttctcattcactggcatggatgatcaggagctgcctatatatgaaggcagaatcagactatcaggaaaggagctggccagggccacagccagtcaagatctctgagcaacttagagacattggtgtcattatatgaagcttgcatttaatacatttatacataatacatttgtacatttaattcataacgtctcttggtcacagatgccttatatataaaataagttgccagatctctaagattgcctagtacacctttgtatctcatttgatgtgatacccagaagagatcattgttttttgtttttgtttttgtttttttcaagaagatccttcgtgatcaccatgctgttctcatggtaagaactggagttatgtttttaaatttggaaatatgacattttatgtagcactttataaaaagtgaaagcgacaaattccaccgctgcttaatactgctttgcttctttttattgacatgatagataaatatgtatctacacagagtaataataataaaacacagtaaacattctatttctctatggtctacagcatgccagtaaataatatgtaggaccaataataaattatcaattacacatttttgtgttaactaattaaaagcatagtgtataagtgagtacactctaattaacttgcttctgttgcactttagttttctacctgcatatggactgcattttttttttttaacacagtcagtatgtagaatgggatgtattcttctgctgctgcttattaaataaagaaagcctgagtgttcttagatggggttattctgagatgagggtcttagcctacagttctttttgaaatgaaaggtgctttgttttttaattatattcatcttttcagggtaaatttgtttttctgagtttctcgtaatgctcatttttacatgctgctactagcttttttttttaaaaaaagtaaaagttgctgctttctaaaatattaattgccttatatttgaaagtgccattgcaatcgtaagtagactatgtatttcctataatgatgtctgatatttaaataggaaatcagacaaacaatattcagaaagtttaagcatataaactttttatttttaacttgcctaaatccctgtattccaaaacctgctgcatcataataaatatatctatatatatttagcataagacgtgatatttttaatttcttttttaaaaaattatatttgtctcttagagttaaaattttctttatataatattgtcatatgtcatagttttaatacaattcacatgatttctatgtttcttaatgatattttgttgtgtaaaattgatcggattgattaaaaaacaaattctctggaatttgtgcgttcatgctttttcgtattctttatggcttttaaataaatatacaatggttaatagt

SEQ ID NO: 22509 - DNA, 3033 bp, Homo sapiens
  source 1..3033: mol_type = unassigned DNA
cgagacggggaagccgcgcgcggggaaggagggtccaggcgtgccggacccgcccccagaacccgcgcctagccctcccttccgcgcgcttactttgtttataacttgaaaaatcctctccgtctcccttccctgcctcctttcctttccctttcctctgccagtacaactagacccggcgtctggcgtccccggtgcccagcattctgcggggcaggcggattaattggaattcttcaaaatgtcaggtgtggtacccacagcccctgaacagcctgcaggtgaaatggaaaatcaaacaaaaccaccagatccaaggcctgatgctcctcctgaatacaattctcattttttaccaggaccccctggaacagctgtccctccacctactggctacccaggaggcttgcctatgggatactacagtccacagcaacccagtaccttccctttgtaccagccagttggtggtatccatcctgtccggtatcagcctggcaaatatcctatgccaaatcagtctgttccaataacatggatgccagggccaactcctatggcaaactgccctcctggtctggaatacttagttcagctggaggtgcagtgtcctcctggtgtcaccattggctttgttgcggaacattggaacctgtgcagggcggtgtacagcatccaaaatgagaagaaagaaaatgtgatgagagttcgtgggccatgctcaacctatggctgtggttcagattctgtttttgaggtcaaatcccttgatggcatatccaacatcggcagtattatccggaagtggaatggtttgttatcagcaatggcagatgctgaccattttgacattcacttcccactagacctggatgtgaagatgaaagccatgatttttggagcttgcttcctcattgacttcatgtattttgaaagatctccaccacaacgttcaagatagagagacacagcaagccatcaactatggttaattttgaaaaatggaaaagttggattgggcttacagtcagcactcagttatttgcaagtgtatttctttgctttgtagagtatttttattgggtgttaactttgacagctgagagtgggcttgcaagaacacaatctaaaagtgtgtttcaattgagtatctctctagtagaataggagttcatcctgaaaagctgtgactcattaacccagtaaacatatacaaagtaagcttaaaacactataaacatgagataagggaaaatgaatccagagttctcatattaataggtagtgaaacaataaggctttttagagcagactttgttggcataaaataacctggcttctatccctaaccctttcctacctttcctctccgtcaacatgtcctcatactgaagacaaacttgtttcaatgatagtcttcatttttaaaaacaaaaaggcaggcagacagaaataatgatgttttcttgcactaagaaggtactacttgtacacatatatcaaaacctcattctgcaaagtttttgaaggtttcaatgggaaatttgattttattacaaaataaaacattttttaatgttaaagtttatatattccatgcttgttttctcattcactggcatggatgatcaggagctgcctatatatgaaggcagaatcagactatcaggaaaggagctggccagggccacagccagtcaagatctctgagcaacttagagacattggtgtcattatatgaagcttgcatttaatacatttatacataatacatttgtacatttaattcataacgtctcttggtcacagatgccttatatataaaataagttgccagatctctaagattgcctagtacacctttgtatctcatttgatgtgatacccagaagagatcattgttttttgtttttgtttttgtttttttcaagaagatccttcgtgatcaccatgctgttctcatggtaagaactggagttatgtttttaaatttggaaatatgacattttatgtagcactttataaaaagtgaaagcgacaaattccaccgctgcttaatactgctttgcttctttttattgacatgatagataaatatgtatctacacagagtaataataataaaacacagtaaacattctatttctctatggtctacagcatgccagtaaataatatgtaggaccaataataaattatcaattacacatttttgtgttaactaattaaaagcatagtgtataagtgagtacactctaattaacttgcttctgttgcactttagttttctacctgcatatggactgcattttttttttttaacacagtcagtatgtagaatgggatgtattcttctgctgctgcttattaaataaagaaagcctgagtgttcttagatggggttattctgagatgagggtcttagcctacagttctttttgaaatgaaaggtgctttgttttttaattatattcatcttttcagggtaaatttgtttttctgagtttctcgtaatgctcatttttacatgctgctactagcttttttttttaaaaaaagtaaaagttgctgctttctaaaatattaattgccttatatttgaaagtgccattgcaatcgtaagtagactatgtatttcctataatgatgtctgatatttaaataggaaatcagacaaacaatattcagaaagtttaagcatataaactttttatttttaacttgcctaaatccctgtattccaaaacctgctgcatcataataaatatatctatatatatttagcataagacgtgatatttttaatttcttttttaaaaaattatatttgtctcttagagttaaaattttctttatataatattgtcatatgtcatagttttaatacaattcacatgatttctatgtttcttaatgatattttgttgtgtaaaattgatcggattgattaaaaaacaaattctctggaatttgtgcgttcatgctttttcgtattctttatggcttttaaataaatatacaatggttaatagt

SEQ ID NO: 22510 - DNA, 1442 bp, Homo sapiens
  source 1..1442: mol_type = unassigned DNA
ggccgcggtgcctgcgggcaggcgcggaggttgcgcggcgtcctgcgctagcagttcccggacactgcgctcgcgtcgcatcctcaggtggttgcagaagttccgtggtgtcgggcgcgcgtctgcactgcagacgcagagggtttgggagcgagcagtttcctgcccagggatgggggtcctggctgcacttcacgggggcggccctttcgtttcgctctgcgtgacaggtctcgcttgattgggtttctcatgggtctctggcgtttctacggcgcggctctcacggactcaggccaggccactcgcaggattaattggaattcttcaaaatgtcaggtgtggtacccacagcccctgaacagcctgcaggtgaaatggaaaatcaaacaaaaccaccagatccaaggcctgatgctcctcctgaatacaattctcattttttaccaggaccccctggaacagctgtccctccacctactggctacccaggaggcttgcctatgggatactacagtccacagcaacccagtaccttccctttgtaccagccagttggtggtatccatcctgtccggtatcagcctggcaaatatcctatgccaaatcagtctgttccaataacatggatgccagggccaactcctatggcaaactgccctcctggtctggaatacttagttcagttggacaacatacatgttcttcagcattttgagcctctggaaatgatgacatgttttgaaactaataatagatatgatattaaaaacaactcagaccagatggtttacattgtaaccgaagacacagatgactttaccaggaatgcctatcggacactaaggcccttcgtcctccgggtcactgattgtatgggccgagaaatcatgacaatgcagagacccttcagatgcacctgctgttgcttctgttgcccctctgccagacaagagctggaggtgcagtgtcctcctggtgtcaccattggctttgttgcggaacattggaacctgtgcagggcggtgtacagcatccaaaatgagaagaaagaaaatgtgatgagagttcgtgggccatgctcaacctatggctgtggttcagattctgtttttgaggtcaaatcccttgatggcatatccaacatcggcagtattatccggaagtggaatggtttgttatcagcaatggcagatgctgaccattttgacattcacttcccactagacctggatgtgaagatgaaagccatgatttttggagcttgcttcctcattgacttcatgtattttgaaagatctccaccacaacgttcaagatagagagacacagcaagccatcaactatggttaattttgaaaaatggaaaagttggattgggcttacagtcagcactcagttatttgcaagtgtatttctttgctttgtagagtatttttatt

SEQ ID NO: 22511 - DNA, 1054 bp, Homo sapiens
  source 1..1054: mol_type = unassigned DNA
cccagaacccgcgcctagccctcccttccgcgcgcttactttgtttataacttgaaaaatcctctccgtctcccttccctgcctcctttcctttccctttcctctgccagtacaactagacccggcgtctggcgtccccggtgcccagcattctgcggggcaggcggtctcgcttgattgggtttctcatgggtctctggcgtttctacggcgcggctctcacggactcaggccaggccactcgcaggattaattggaattcttcaaaatgtcaggtgtggtacccacagcccctgaacagcctgcaggtgaaatggaaaatcaaacaaaaccaccagatccaaggcctgatgctcctcctgaatacaattctcattttttaccaggaccccctggaacagctgtccctccacctactggctacccaggaggcttgcctatgggatactacagtccacagcaacccagtaccttccctttgtaccagccagttggtggtatccatcctgtccggtatcagcctggcaaatatcctatgccaaatcagtctgttccaataacatggatgccagggccaactcctatggcaaactgccctcctggtctggaatacttagttcagttggacaacatacatgttcttcagcattttgagcctctggaaatgatgacatgttttgaaactaataatagatatgatattaaaaacaactcagaccagatggtttacattgtaaccgaagacacagatgactttaccaggaatgcctatcggacactaaggcccttcgtcctccgggtcactgattgtatgggccgagaaatcatgacaatgcagagacccttcagatgcacctgctgttgcttctgttgcccctctgccagacaagagctggaggtgcagtgtcctcctggtgtcaccattggctttgttgcggaacattggaacctgtgcagggcggtgtacagcatccaaaatgagaagaaagaaaatgtgatgagagttcgtgggccatgctcaacctatggctgtggttcagattctgtttttgag

SEQ ID NO: 22512 - DNA, 814 bp, Homo sapiens
  source 1..814: mol_type = unassigned DNA
gtttataacttgaaaaatcctctccgtctcccttccctgcctcctttcctttccctttcctctgccagtacaactagacccggcgtctggcgtccccggtgcccagcattctgcggggcaggcgcttggagacacatagggcaccgtacaacaaactccagctccagaggattaattggaattcttcaaaatgtcaggtgtggtacccacagcccctgaacagcctgcaggtgaaatggaaaatcaaacaaaaccaccagatccaaggcctgatgctcctcctgaatacaattctcattttttaccaggaccccctggaacagctgtccctccacctactggctacccaggaggcttgcctatgggatactacagtccacagcaacccagtaccttccctttgtaccagccagttggtggtatccatcctgtccggtatcagcctggcaaatatcctatgccaaatcagtctgttccaataacatggatgccagggccaactcctatggcaaactgccctcctggtctggaatacttagttcagttggacaacatacatgttcttcagcattttgagcctctggaaatgatgacatgttttgaaactaataatagatatgatattaaaaacaactcagaccagatggtttacattgtaaccgaagacacagatgactttaccaggaatgcctatcggacactaaggcccttcgtcctccgggtcactgattgtatgggccgagaaatcatgacaatgcagagacccttcagatgcacctgctgttgcttctgttgcccctctgccagacaagag

SEQ ID NO: 22513 - DNA, 683 bp, Homo sapiens
  source 1..683: mol_type = unassigned DNA
gtgtttctcttaagcttgttacattgttttcctcataactgtactatctaacgttaaactttaacatttcttgactttttttaaatctcattctactacaatataaactgcagcacagtaggtggcagagtgtctgtctgcttcattgctgtactctcaacatctgtattagtgcctcgtacataataggtgctcaataagtatttttttaattaatgaagggacaaatgtaaggattaattggaattcttcaaaatgtcaggtgtggtacccacagcccctgaacagcctgcaggtgaaatggaaaatcaaacaaaaccaccagatccaaggcctgatgctcctcctgaatacaattctcattttttaccaggaccccctggaacagctgtccctccacctactggctacccaggaggcttgcctatgggatactacagtccacagcaacccagtaccttccctttgtaccagccagttggtggtatccatcctgtccggtatcagcctggcaaatatcctatgccaaatcagtctgttccaataacatggatgccagggccaactcctatggcaaactgccctcctggtctggaatacttagttcagttggacaacatacatgttcttcagcattttgagcctctggaaatgatgacatgttttgaaactaataatagata

SEQ ID NO: 22514 - DNA, 1375 bp, Homo sapiens
  source 1..1375: mol_type = unassigned DNA
aggcgtgccggacccgcccccagaacccgcgcctagccctcccttccgcgcgcttactttgtttataacttgaaaaatcctctccgtctcccttccctgcctcctttcctttccctttcctctgccagtacaactagacccggcgtctggcgtccccggtgcccagcattctgcggggcaggcggtctcgcttgattgggtttctcatgggtctctggcgtttctacggcgcggctctcacggactcaggccaggccactcgcagcttggagacacatagggcaccgtacaacaaactccagctccagaggattaattggaattcttcaaaatgtcaggtgtggtacccacagcccctgaacagcctgcaggtgaaatggaaaatcaaacaaaaccaccagatccaaggcctgatgctcctcctgaatacaattctcattttttaccaggaccccctggaacagctgtccctccacctactggctacccaggaggcttgcctatgggatactacagtccacagcaacccagtaccttccctttgtaccagccagttggtggtatccatcctgtccggtatcagcctggcaaatatcctatgccaaatcagtctgttccaataacatggatgccagggccaactcctatggcaaactgccctcctggtctggaatacttagttcagttggacaacatacatgttcttcagcattttgagcctctggaaatgatgacatgttttgaaactaataatagatatgatattaaaaacaactcagaccagatggtttacattgtaaccgaagacacagatgactttaccaggaatgcctatcggacactaaggcccttcgtcctccgggtcactgattgtatgggccgagaaatcatgacaatgcagagacccttcagatgcacctgctgttgcttctgttgcccctctgccagacaagagctggaggtgcagtgtcctcctggtgtcaccattggctttgttgcggaacattggaacctgtgcagggcggtgtacagcatccaaaatgagaagaaagaaaatgtgatgagagttcgtgggccatgctcaacctatggctgtggttcagattctgtttttgaggtcaaatcccttgatggcatatccaacatcggcagtattatccggaagtggaatggtttgttatcagcaatggcagatgctgaccattttgacattcacttcccactagacctggatgtgaagatgaaagccatgatttttggagcttgcttcctcattgacttcatgtattttgaaagatctccaccacaacgttcaagatagagagacacagcaagccatcaactatggttaattttgaaaaatggaaaagttgga

SEQ ID NO: 22515 - DNA, 593 bp, Homo sapiens
  source 1..593: mol_type = unassigned DNA
aacatttcttgactttttttaaatctcattctactacaatataaactgcagcacagtaggtggcagagtgtctgtctgcttcattgctgtactctcaacatctgtattagtgcctcgtacataataggtgctcaataagtatttttttaattaatgaagggacaaatgtaaggtaactggaggttaaaaaaattacagaaatccttacctgtgttactgagtagcaatactatttattatgtatgtattttaaaggcattaacattttttatttttcaggattaattggaattcttcaaaatgtcaggtgtggtacccacagcccctgaacagcctgcaggtgaaatggaaaatcaaacaaaaccaccagatccaaggcctgatgctcctcctgaatacaattctcattttttaccaggaccccctggaacagctgtccctccacctactggctacccaggaggcttgcctatgggatactacagtccacagcaacccagtaccttccctttgtaccagccagttggtggtatccatcctgtccggtatcagcctggcaaatatcctatgccaaatcagtctgttccaataac

SEQ ID NO: 22516 - DNA, 2839 bp, Homo sapiens
  source 1..2839: mol_type = unassigned DNA
ataacttgaaaaatcctctccgtctcccttccctgcctcctttcctttccctttcctctgccagtacaactagacccggcgtctggcgtccccggtgcccagcattctgcggggcaggcggtgtggtacccacagcccctgaacagcctgcaggtgaaatggaaaatcaaacaaaaccaccagatccaaggcctgatgctcctcctgaatacaattctcattttttaccaggaccccctggaacagctgtccctccacctactggctacccaggaggcttgcctatgggatactacagtccacagcaacccagtaccttccctttgtaccagccagttggtggtatccatcctgtccggtatcagcctggcaaatatcctatgccaaatcagtctgttccaataacatggatgccagggccaactcctatggcaaactgccctcctggtctggaatacttagttcagctggaggtgcagtgtcctcctggtgtcaccattggctttgttgcggaacattggaacctgtgcagggcggtgtacagcatccaaaatgagaagaaagaaaatgtgatgagagttcgtgggccatgctcaacctatggctgtggttcagattctgtttttgaggtcaaatcccttgatggcatatccaacatcggcagtattatccggaagtggaatggtttgttatcagcaatggcagatgctgaccattttgacattcacttcccactagacctggatgtgaagatgaaagccatgatttttggagcttgcttcctcattgacttcatgtattttgaaagatctccaccacaacgttcaagatagagagacacagcaagccatcaactatggttaattttgaaaaatggaaaagttggattgggcttacagtcagcactcagttatttgcaagtgtatttctttgctttgtagagtatttttattgggtgttaactttgacagctgagagtgggcttgcaagaacacaatctaaaagtgtgtttcaattgagtatctctctagtagaataggagttcatcctgaaaagctgtgactcattaacccagtaaacatatacaaagtaagcttaaaacactataaacatgagataagggaaaatgaatccagagttctcatattaataggtagtgaaacaataaggctttttagagcagactttgttggcataaaataacctggcttctatccctaaccctttcctacctttcctctccgtcaacatgtcctcatactgaagacaaacttgtttcaatgatagtcttcatttttaaaaacaaaaaggcaggcagacagaaataatgatgttttcttgcactaagaaggtactacttgtacacatatatcaaaacctcattctgcaaagtttttgaaggtttcaatgggaaatttgattttattacaaaataaaacattttttaatgttaaagtttatatattccatgcttgttttctcattcactggcatggatgatcaggagctgcctatatatgaaggcagaatcagactatcaggaaaggagctggccagggccacagccagtcaagatctctgagcaacttagagacattggtgtcattatatgaagcttgcatttaatacatttatacataatacatttgtacatttaattcataacgtctcttggtcacagatgccttatatataaaataagttgccagatctctaagattgcctagtacacctttgtatctcatttgatgtgatacccagaagagatcattgttttttgtttttgtttttgtttttttcaagaagatccttcgtgatcaccatgctgttctcatggtaagaactggagttatgtttttaaatttggaaatatgacattttatgtagcactttataaaaagtgaaagcgacaaattccaccgctgcttaatactgctttgcttctttttattgacatgatagataaatatgtatctacacagagtaataataataaaacacagtaaacattctatttctctatggtctacagcatgccagtaaataatatgtaggaccaataataaattatcaattacacatttttgtgttaactaattaaaagcatagtgtataagtgagtacactctaattaacttgcttctgttgcactttagttttctacctgcatatggactgcattttttttttttaacacagtcagtatgtagaatgggatgtattcttctgctgctgcttattaaataaagaaagcctgagtgttcttagatggggttattctgagatgagggtcttagcctacagttctttttgaaatgaaaggtgctttgttttttaattatattcatcttttcagggtaaatttgtttttctgagtttctcgtaatgctcatttttacatgctgctactagcttttttttttaaaaaaagtaaaagttgctgctttctaaaatattaattgccttatatttgaaagtgccattgcaatcgtaagtagactatgtatttcctataatgatgtctgatatttaaataggaaatcagacaaacaatattcagaaagtttaagcatataaactttttatttttaacttgcctaaatccctgtattccaaaacctgctgcatcataataaatatatctatatatatttagcataagacgtgatatttttaatttcttttttaaaaaattatatttgtctcttagagttaaaattttctttatataatattgtcatatgtcatagttttaatacaattcacatgatttctatgtttcttaatgatattttgttgtgtaaaattgatcggattgattaaaaaacaaattctctgg

SEQ ID NO: 22517 - DNA, 1592 bp, Homo sapiens
  source 1..1592: mol_type = unassigned DNA
agaccccgtcgcccggatcccctgagctgcccgccatcccacgtgaccgcgccgccccccagctccaccgctgagcccgctcgccatggccctcttcggggccctcttcctagcgctgctggcaggcgcacatgcagagttcccaggctgcaagatccgcgtcacctccaaggcgctggagctggtgaagcaggaggggctgcgctttctggagcaagagctggagactatcaccattccggacctgcggggcaaagaaggccacttctactacaacatctctgaggtgaaggtcacagagctgcaactgacatcttccgagctcgatttccagccacagcaggagctgatgcttcaaatcaccaatgcctccttggggctgcgcttccggagacagctgctctactggttcttgaaggtgtatgattttctctccacgttcatcacctcagggatgcgcttcctcctcaaccagcagatctgccctgtcctctaccacgcagggacggtcctgctcaactccctcctggacaccgtgcctgtgcgcagttctgtggacgagcttgttggcattgactattccctcatgaaggatcctgtggcttccaccagcaacctggacatggacttccggggggccttcttccccctgactgagaggaactggagcctccccaaccgggcagtggagccccagctgcaggaggaagagcggatggtgtatgtggccttctctgagttcttcttcgactctgccatggagagctacttccgggcgggggccctgcagctgttgctggtgggggacaaggtgccccacgacctggacatgctgctgagggccacctactttgggagcattgtcctgctgagcccagcagtgattgactccccattgaagctggagctgcgggtcctggccccaccgcgctgcaccatcaagccctctggcaccaccatctctgtcactgctagcgtcaccattgccctggtcccaccagaccagcctgaggtccagctgtccagcatgactatggacgcccgtctcagcgccaagatggctctccgggggaaggccctgcgcacgcagctggacctgcgcaggttccgaatctattccaaccattctgcactggagtcgctggctctgatcccattacaggcccctctgaagaccatgctgcagattggggtgatgcccatgctcaatgagcggacctggcgtggggtgcagatcccactacctgagggcatcaactttgtgcatgaggtggtgacgaaccatgcgggattcctcaccatcggggctgatctccactttgccaaagggctgcgagaggtgattgagaagaaccggcctgctgatgtcagggcgtccactgcccccacaccgtccacagcagctgtctgagccctcaatccccaagctggcagctgtcattcaggaccccaacccctctcagcccctcttttcccacattcatagcctgtagtgccccctctaacccccagtgccacagagaagacgggatttgaagctgtacccaatttaattccataatcaatctatcaattacagtccgtccaccacc

SEQ ID NO: 22518 - DNA, 1743 bp, Homo sapiens
  source 1..1743: mol_type = unassigned DNA
ccgtcgcccggatcccctgagctgcccgccatcccacgtgaccgcgccgccccccagctccaccgctgagcccgctcgccatggccctcttcggggccctcttcctagcgctgctggcaggcgcacatgcagagttcccaggctgcaagatccgcgtcacctccaaggcgctggagctggtgaagcaggaggggctgcgctttctggagcaagagctggagactatcaccattccggacctgcggggcaaagaaggccacttctactacaacatctctgaggtgaaggtcacagagctgcaactgacatcttccgagctcgatttccagccacagcaggagctgatgcttcaaatcaccaatgcctccttggggctgcgcttccggagacagctgctctactggttcttctatgatgggggctacatcaacgcctcagctgagggtgtgtccatccgcactggtctggagctctcccgggatcccgctggacggatgaaagtgtccaatgtctcctgccaggcctctgtctccagaatgcacgcggccttcgggggaaccttcaagaaggtgtatgattttctctccacgttcatcacctcagggatgcgcttcctcctcaaccagcagatctgccctgtcctctaccacgcagggacggtcctgctcaactccctcctggacaccgtgcctgtgcgcagttctgtggacgagcttgttggcattgactattccctcatgaaggatcctgtggcttccaccagcaacctggacatggacttccggggggccttcttccccctgactgagaggaactggagcctccccaaccgggcagtggagccccagctgcaggaggaagagcggatggtgtatgtggccttctctgagttcttcttcgactctgccatggagagctacttccgggcgggggccctgcagctgttgctggtgggggacaaggtgccccacgacctggacatgctgctgagggccacctactttgggagcattgtcctgctgagcccagcagtgattgactccccattgaagctggagctgcgggtcctggccccaccgcgctgcaccatcaagccctctggcaccaccatctctgtcactgctagcgtcaccattgccctggtcccaccagaccagcctgaggtccagctgtccagcatgactatggacgcccgtctcagcgccaagatggctctccgggggaaggccctgcgcacgcagctggacctgcgcaggttccgaatctattccaaccattctgcactggagtcgctggctctgatcccattacaggcccctctgaagaccatgctgcagattggggtgatgcccatgctcaatgagcggacctggcgtggggtgcagatcccactacctgagggcatcaactttgtgcatgaggtggtgacgaaccatgcgggattcctcaccatcggggctgatctccactttgccaaagggctgcgagaggtgattgagaagaaccggcctgctgatgtcagggcgtccactgcccccacaccgtccacagcagctgtctgagccctcaatccccaagctggcagctgtcattcaggaccccaacccctctcagcccctcttttcccacattcatagcctgtagtgccccctctaacccccagtgccacagagaagacgggatttgaagctgtacccaatttaattccataatcaatctatcaattacagtccgtccaccacc

SEQ ID NO: 22519 - DNA, 2255 bp, Homo sapiens
  source 1..2255: mol_type = unassigned DNA
agtccctcgccgagccgcgtggtgcactgaagccggcgtggggaggagagccgatgaaggagaacgctaacatgggggctccaggcagaatctctaatgggagagatttaggacctgagggagccgggagacccgggagcccacggtctggtcggccacctcctctcctccccgggcgcgaggcctatgagaccgcaagccaccctccaagaatgcgcgtgcagtcgttgccgtggcaacgtgcaagcctgcatgggcccaccgctaaaggaaaggggaggttgttgggggtgtgggggctggtcccctggaggtccaaactcatcacgcggcggtagcacgagggaactgggaacgtcccctcccccgtgtcccaaatcctctgggagccagaacgcaagtcgcatcgcctctctgagcctcagtttccacatctgccatatggaggcaagattattggttccaagttccccgaagagttatctggagggtaacgatccaggctagttcccacttatggttggacgtccaaggaatgggtttaagcggctcagataactcctgcgaccccaccccacccccaggcccgctcgccatggccctcttcggggccctcttcctagcgctgctggcaggcgcacatgcagagttcccaggctgcaagatccgcgtcacctccaaggcgctggagctggtgaagcaggaggggctgcgctttctggagcaagagctggagactatcaccattccggacctgcggggcaaagaaggccacttctactacaacatctctgaggtgaaggtcacagagctgcaactgacatcttccgagctcgatttccagccacagcaggagctgatgcttcaaatcaccaatgcctccttggggctgcgcttccggagacagctgctctactggttcttctatgatgggggctacatcaacgcctcagctgagggtgtgtccatccgcactggtctggagctctcccgggatcccgctggacggatgaaagtgtccaatgtctcctgccaggcctctgtctccagaatgcacgcggccttcgggggaaccttcaagaaggtgtatgattttctctccacgttcatcacctcagggatgcgcttcctcctcaaccagcagatctgccctgtcctctaccacgcagggacggtcctgctcaactccctcctggacaccgtgcctgtgcgcagttctgtggacgagcttgttggcattgactattccctcatgaaggatcctgtggcttccaccagcaacctggacatggacttccggggggccttcttccccctgactgagaggaactggagcctccccaaccgggcagtggagccccagctgcaggaggaagagcggatggtgtatgtggccttctctgagttcttcttcgactctgccatggagagctacttccgggcgggggccctgcagctgttgctggtgggggacaaggtgccccacgacctggacatgctgctgagggccacctactttgggagcattgtcctgctgagcccagcagtgattgactccccattgaagctggagctgcgggtcctggccccaccgcgctgcaccatcaagccctctggcaccaccatctctgtcactgctagcgtcaccattgccctggtcccaccagaccagcctgaggtccagctgtccagcatgactatggacgcccgtctcagcgccaagatggctctccgggggaaggccctgcgcacgcagctggacctgcgcaggttccgaatctattccaaccattctgcactggagtcgctggctctgatcccattacaggcccctctgaagaccatgctgcagattggggtgatgcccatgctcaatgagcggacctggcgtggggtgcagatcccactacctgagggcatcaactttgtgcatgaggtggtgacgaaccatgcgggattcctcaccatcggggctgatctccactttgccaaagggctgcgagaggtgattgagaagaaccggcctgctgatgtcagggcgtccactgcccccacaccgtccacagcagctgtctgagccctcaatccccaagctggcagctgtcattcaggaccccaacccctctcagcccctcttttcccacattcatagcctgtagtgccccctctaacccccagtgccacagagaagacgggatttgaagctgtacccaatttaattccataatcaatctatcaattacagtccgtccacc

SEQ ID NO: 22520 - DNA, 2255 bp, Homo sapiens; identical to SEQ ID NO: 22519
  source 1..2255: mol_type = unassigned DNA

SEQ ID NO: 22521 - DNA, 1530 bp, Homo sapiens
  source 1..1530: mol_type = unassigned DNA
atgtagagggggccaagaaggaagcaggaccagtggatgtgaggcgtggtcgaagaacaacagaaagggtgaaggtcacagagctgcaactgacatcttccgagctcgatttccagccacagcaggagctgatgcttcaaatcaccaatgcctccttggggctgcgcttccggagacagctgctctactggttcttctatgatgggggctacatcaacgcctcagctgagggtgtgtccatccgcactggtctggagctctcccgggatcccgctggacggatgaaagtgtccaatgtctcctgccaggcctctgtctccagaatgcacgcggccttcgggggaaccttcaagaaggtgtatgattttctctccacgttcatcacctcagggatgcgcttcctcctcaaccagcagatctgccctgtcctctaccacgcagggacggtcctgctcaactccctcctggacaccgtgcctgtgcgcagttctgtggacgagcttgttggcattgactattccctcatgaaggatcctgtggcttccaccagcaacctggacatggacttccggggggccttcttccccctgactgagaggaactggagcctccccaaccgggcagtggagccccagctgcaggaggaagagcggatggtgtatgtggccttctctgagttcttcttcgactctgccatggagagctacttccgggcgggggccctgcagctgttgctggtgggggacaaggtgccccacgacctggacatgctgctgagggccacctactttgggagcattgtcctgctgagcccagcagtgattgactccccattgaagctggagctgcgggtcctggccccaccgcgctgcaccatcaagccctctggcaccaccatctctgtcactgctagcgtcaccattgccctggtcccaccagaccagcctgaggtccagctgtccagcatgactatggacgcccgtctcagcgccaagatggctctccgggggaaggccctgcgcacgcagctggacctgcgcaggttccgaatctattccaaccattctgcactggagtcgctggctctgatcccattacaggcccctctgaagaccatgctgcagattggggtgatgcccatgctcaatgagcggacctggcgtggggtgcagatcccactacctgagggcatcaactttgtgcatgaggtggtgacgaaccatgcgggattcctcaccatcggggctgatctccactttgccaaagggctgcgagaggtgattgagaagaaccggcctgctgatgtcagggcgtccactgcccccacaccgtccacagcagctgtctgagccctcaatccccaagctggcagctgtcattcaggaccccaacccctctcagcccctcttttcccacattcatagcctgtagtgccccctctaacccccagtgccacagagaagacgggatttgaagctgtacccaatttaattccataatcaatctatcaattacagtccgtccaccacc

SEQ ID NO: 22522 - DNA, 1420 bp, Homo sapiens
  source 1..1420: mol_type = unassigned DNA
gccagaccccgtcgcccggatcccctgagctgcccgccatcccacgtgaccgcgccgccccccagctccaccgctgagcccgctcgccatggccctcttcggggccctcttcctagcgctgctggcaggcgcacatgcagagttcccaggctgcaagatccgcgtcacctccaaggcgctggagctggtgaagcaggaggggctgcgctttctggagcaagagctggagactatcaccattccggacctgcggggcaaagaaggccacttctactacaacatctctgagaaggtgtatgattttctctccacgttcatcacctcagggatgcgcttcctcctcaaccagcagatctgccctgtcctctaccacgcagggacggtcctgctcaactccctcctggacaccgtgcctgtgcgcagttctgtggacgagcttgttggcattgactattccctcatgaaggatcctgtggcttccaccagcaacctggacatggacttccggggggccttcttccccctgactgagaggaactggagcctccccaaccgggcagtggagccccagctgcaggaggaagagcggatggtgtatgtggccttctctgagttcttcttcgactctgccatggagagctacttccgggcgggggccctgcagctgttgctggtgggggacaaggtgccccacgacctggacatgctgctgagggccacctactttgggagcattgtcctgctgagcccagcagtgattgactccccattgaagctggagctgcgggtcctggccccaccgcgctgcaccatcaagccctctggcaccaccatctctgtcactgctagcgtcaccattgccctggtcccaccagaccagcctgaggtccagctgtccagcatgactatggacgcccgtctcagcgccaagatggctctccgggggaaggccctgcgcacgcagctggacctgcgcaggttccgaatctattccaaccattctgcactggagtcgctggctctgatcccattacaggcccctctgaagaccatgctgcagattggggtgatgcccatgctcaatgagcggacctggcgtggggtgcagatcccactacctgagggcatcaactttgtgcatgaggtggtgacgaaccatgcgggattcctcaccatcggggctgatctccactttgccaaagggctgcgagaggtgattgagaagaaccggcctgctgatgtcagggcgtccactgcccccacaccgtccacagcagctgtctgagccctcaatccccaagctggcagctgtcattcaggaccccaacccctctcagcccctcttttcccacattcatagcctgtagtgccccctctaacccccagtgccacagagaagacgggatttgaagctgtaccc

SEQ ID NO: 22523 - DNA, 1298 bp, Homo sapiens
  source 1..1298: mol_type = unassigned DNA
aatgccccgccccgtcagcacttatccctgagctgcttctgccgttgcatcttcgggactccgccccgcgcgcggacctgcagccatggcagtcaccgcccaggcagcccgcaggaaggagcgcgtcctctgcctgtttgacgtggacgggaccctcacgccggctcgccagaaaattgaccctgaggtggccgccttcctgcagaagctacgaagtagagtgcagatcggtgtggtgggcggctctgactactgtaagatcgctgagcagctgggtgacggggatgaagtcattgagaagtttgattatgtgtttgccgagaacgggacggtgcagtataagcacggacgactgctctccaagcagaccatccagaaccacctgggggaggagctgctgcaggacttgatcaacttctgcctcagctacatggccctgctcaggctgcccaagaagcgtggaaccttcatcgagttccggaatggcatgctgaacatctcgcccatcggccggagctgcaccctggaggagaggatcgagttctccgaactggacaagaaagagaagatccgggagaagttcgtggaagccctgaaaacagagtttgctggcaaagggctgaggttctctcgaggaggcatgatcagctttgacgtcttccccgagggctgggacaagcgctactgcctggatagcctggaccaggacagcttcgacaccatccacttctttgggaacgagactagccctggtgggaacgactttgagatctttgccgacccccggactgttggccacagcgtggtgtctcctcaggacacggtgcagcgatgccgggagattttcttcccagagacagctcatgaggcgtgaccggggcccacatctgtgtgtcgtgacttctgaagagtttggcctaggcctaaagagaggtcctggtgttggatagatgccagggcccctcctctggcccaggacgcctgctgcaagcccacccagatggggccagagtctgtgtggacaaccgtccccagccagtctgctcctagtggcactggcttcgtcctcccagggcccagagtgttccccatgctccacctggtggcccaggccacagctgctgcttgtatttcggtacagaagaggtttctttctgcaccaggaggaggcgtgctcaagtatcggtacgagatctagcctgccctgcctgcctgccctgggcgatgaggtacggtggggaaggtgcctattttagagaactttgtcacagtattaaagttcccagaacaaagtaggt

SEQ ID NO: 22524 - DNA, 2313 bp, Homo sapiens
  source 1..2313: mol_type = unassigned DNA
ccggaagttccgggccgagttcctcgtgccaacgtgtcttgtaaggtgcggctagaaactggggacatggcagcgcctggcccagcgctctgcctcttcgacgtggatgggaccctcaccgccccgcggcagaaaattaccaaagaaatggatgacttcctacaaaaattgaggcagaagatcaaaatcggagtggtaggcggatcggactttgagaaagtgcaggagcaactgggaaatgatgtggttgaaaaatacgattatgtgtttccagaaaatggcttggtagcatacaaagatgggaaactcttgtgtagacagaatattcaaagtcatctgggtgaggccctaatccaagatttaatcaactactgtctgagctacattgcgaaaattaaactcccgaagaagaggggtactttcattgaattccgaaatgggatgttaaacgtgtcccctattggaagaagctgcagccaagaagaacgcattgagttctacgaactcgataaaaaagaaaatataagacaaaagtttgtagcagatctacggaaagagtttgctggaaaaggcctcacgttttccataggaggccagatcagctttgatgtctttcctgatggatgggacaagagatactgtctgcgacatgtggaaaatgacggttataagaccatttatttctttggagacaaaactatgccaggtggcaatgaccatgagatcttcacagaccccagaaccatgggctactccgtgacagcgcctgaggacacgcgcaggatctgtgaactgctgttctcctaacgtgggagcgggaggggcggggtcccggctgacaagccagcatagggcattcggtggccagagccgagggtcctcccacacgtgctcacccacccgcagcctaggcaggctctgcatgctatgccaggcatgtgcagtctggacttccacctccagtgccagaaacttccagaaggaaggagaaaactcttgtcaagaatggcccagaggaatgcctcgcacaaaaggtcttccccacccacccccagccccctagtctaatacccaccctgatacgtgcaatcatgtagttttggcggaaatttccccatcattctaggatgatacagaaagaaaaactgtgcctggaccctccctcttggtgggtctgtggaaacataagcggtttttttaatgggcccctgcatcaataccaaacatgggggtttggtaatgagaaaccaggacaggccatctgcagtgacccagcccaggacgaagtttacaaacacctcctggaacgaagctcccgcctgcatgtcaccttgatgggggctgtgagtggggcagtgtgatacccagtgactagacgcactctgcgttttcccgtgtttggggctgaggcctgctggacagatggctggccaagtgggagcagaccctagggagtttgcacctcggctgggccggattcggaccggctctgtgttcactacactcagaatagcctggctgcttctctgtctccgagaccggaggtagtgggaaccaacagctgggctggagagttggtgctggcaaaacagtccttgccctggggccggttcttacccaggtccagagaaaccaacgcgggatgtcagacttcaccaaaaggactttctggttgcccctggctggcttcctggaggcgttcgcctctagtttctcagggatggagcgagagcccagccagagaacagtaagaggagctgctctcctatctgcactcacccaggccttcacccagactttaccacggaggcggctgagtgcagctacagctaggtccgcgtccctcactcttttcatcttctgcacgttcttcgtgaaactggaaggatcccgggtctcagctagaacacggtggaagagaactttcctaggaaacggttcatgtgtcacttttcaggatgtggaaacactgagccatacaccctccattgcttggtgctggggttgtgtggcctccactgggcacttgccgacctgagtctggggccaggggagcccaggctgccctgcactcctgcctcccagcccacagccaggtgctttcatcacagctaaacctggttccctccaaacctcccagccactcgggcttgtaactgtctgagccccggatccggtggggtgaaagcagccagctcatcccagtgactcacaggacacagccatccagcggcatctttccttgtcgaatgatactgtaatgaccttccaaagtgaagagtagcacattaaagtgattttattgtttcctgt

SEQ ID NO: 22525 - DNA, 793 bp, Homo sapiens
  source 1..793: mol_type = unassigned DNA
gctagaaactggggacatggcagcgcctggcccagcgctctgcctcttcgacgtggatgggaccctcaccgccccgcggcagaaaattaccaaagaaatggatgacttcctacaaaaattgaggcagaagatcaaaatcggagtggtaggcggatcggactttgagaaagtgcaggagcaactgggaaatgatggggtactttcattgaattccgaaatgggatgttaaacgtgtcccctattggaagaagctgcagccaagaagaacgcattgagttctacgaactcgataaaaaagaaaatataagacaaaagtttgtagcagatctacggaaagagtttgctggaaaaggcctcacgttttccataggaggccagatcagctttgatgtctttcctgatggatgggacaagagatactgtctgcgacatgtggaaaatgacggttataagaccatttatttctttggagacaaaactatgccaggtggcaatgaccatgagatcttcacagaccccagaaccatgggctactccgtgacagcgcctgaggacacgcgcaggatctgtgaactgctgttctcctaacgtgggagcgggaggggcggggtcccggctgacaagccagcatagggcattcggtggccagagccgagggtcctcccacacgtgctcacccacccgcagcctaggcaggctctgcatgctatgccaggcatgtgcagtctggacttccacctccagtgccagaaacttccagaaggaaggagaaaactcttgtcaagaatggccc

SEQ ID NO: 22526 - DNA, 931 bp, Homo sapiens
  source 1..931: mol_type = unassigned DNA
gtgccaacgtgtcttgtaaggtgcggctagaaactggggacatggcagcgcctggcccagcgctctgcctcttcgacgtggatgggaccctcaccgccccgcggcagaaaattaccaaagaaatggatgacttcctacaaaaattgaggcagaagatcaaaatcggagtggtaggcggatcggactttgagaaagtgcaggagcaactgggaaatgatgaatattcaaagtcatctgggtgaggccctaatccaagatttaatcaactactgtctgagctacattgcgaaaattaaactcccgaagaagaggggtactttcattgaattccgaaatgggatgttaaacgtgtcccctattggaagaagctgcagccaagaagaacgcattgagttctacgaactcgataaaaaagaaaatataagacaaaagtttgtagcagatctacggaaagagtttgctggaaaaggcctcacgttttccataggaggccagatcagctttgatgtctttcctgatggatgggacaagagatactgtctgcgacatgtggaaaatgacggttataagaccatttatttctttggagacaaaactatgccaggtggcaatgaccatgagatcttcacagaccccagaaccatgggctactccgtgacagcgcctgaggacacgcgcaggatctgtgaactgctgttctcctaacgtgggagcgggaggggcggggtcccggctgacaagccagcatagggcattcggtggccagagccgagggtcctcccacacgtgctcacccacccgcagcctaggcaggctctgcatgctatgccaggcatgtgcagtctggacttccacctccagtgccagaaacttccagaaggaaggagaaaactcttgtcaagaatggcccagaggaatgcctcgcacaaaa

SEQ ID NO: 22527 - DNA, 1280 bp, Homo sapiens
  source 1..1280: mol_type = unassigned DNA
gaaggttctgggcggggctggactgttctaagtgagttcgggtgggggagcttcacgaggggaggctgctctgtgaaggaaccgcctttctctccgcgtgtctcacccttttctccccatatctgtttggacatgagctgagggcacggtcgcgggcggtcagccctgttcgcagctacggcgaggaggggcgcgattgttccttgttgccgctccgcttagtggccgcgtccattccgcgcggtgtcccgattttaggggtagggagaagtgtcagcttcaggcatcgcgaggcgtggcggccccatggccccgctgggaggcgccccgcggctggtactgctgttcagcggcaagaggaaatccgggaaggacttcgtgaccgaggcgctgcagagcagacttggagctgatgtctgtgctgtcctccggctctctggtccactcaaggaacagtatgctcaggagcatggcttgaacttccagagactcctggacaccagcacctacaaggaggcctttcggaaggacatgatccgctggggagaggagaaacgccaggctgacccaggcttcttttgcaggaagattgtggagggcatctcccagcccatctggctggtgagtgacacacggagagtgtctgacatccagtggtttcgggaggcctatggggccgtgacgcagacggtccgcgttgtagcgttggagcagagccgacagcagcggggctgggtgttcacgccaggggtggacgatgctgagtcagaatgtggcctggacaacttcggggactttgactgggtcatcgagaaccatggagttgaacagcgcctggaggagcagttggagaacctgatagaatttatccgctccagactttagtcactaggttctaggagtgagctggggcctgctgaggtgggggtggggctgactctgcaaaatgggggtgtcccccgatcctggccgaggtgaggaacagacagggggggtctagattctgagggggttggtggatattgggcaaggcaggaaacctctggagacctcattttctccatggggaagacagccatgctcttcaggaggagactccaagggcaaaggagggtgtcttggctgtgcttgaaggcgaaaccctgccatatccccagtgccagtcccctcagcctgtggtggccttgcatcctgactggatgttctcagccccttgttctgggcaagaacccagagctccccagtgtggatactaataaacctcttggagcacactctca

SEQ ID NO: 22528 - DNA, 2250 bp, Homo sapiens
  source 1..2250: mol_type = unassigned DNA
agtcagattccgcgggagagcggcagagataccgcgatatttgggagcggccccgagacgcgcctggcgcggatcctaaatcccgacagctttatagagcccaggcctggcaggctcccagaacttgaagccaccagaccccacatggaaccaaaggcctcctgtccagctgctgcacccttgatggagagaaaattccatgttcttgtgggtgtcacggggagtgtcgcagccctgaagttgcctcttctggtgtcaaagcttttggacattcctgggctggaagtagcagtggtcacaactgagagagccaaacatttctacagcccccaggacattcctgtcaccctctacagcgacgctgatgaatgggagatatggaagagccgctctgacccagttctgcacattgacctgcggaggtgggcagacctcctgctggtggctcctcttgatgccaacactctggggaaggtggccagtggcatctgtgacaacttgcttacctgcgtcatgcgggcctgggaccgcagcaagcccctgctcttctgcccggccatgaacaccgccatgtgggagcacccgatcacagcgcagcaggtagaccagctcaaggcctttggctatgtcgagatcccctgtgtggccaagaagctggtgtgcggagatgaaggtctcggggccatggctgaagtggggaccatcgtggacaaagtgaaagaagtcctcttccagcacagtggcttccagcagagttgacctgggatttctgtcatgggtgtccctctgtactcagaatgggttcaggccaagtcggtgaagatggatgttggcaaaataggaggataccctcatttgctgaatgggggacctgctctgagcctgcccaggggccaggcctgctccaggttaaactggacggaaggcccaggtctcagtttctttcaaccaggagaggccgctgcctagagcccctccccaccttttcctggatgggtgaggcaagccaggagagcaagcagtgttgtcctcacgggaggaggactgagcgactgggaaaactcggctctacatctcacccagaacggcttttagaaacaccacagctggagagtcctggctgagccttgggagtttcagctctttggcggggtgcccaggtgccatgcgatcagcgaagcctgcgagttggcaggactctgaggtttcctgcagaccatgccatgagattgaaggtgcggggaaataaagaaaaatcaccatttaggagactccattctttccctacaacccagctgtggtcccagagatcagggggtgttgccaggtgtggctggggaagggtctgggttcacaactcaccggcactctttagtccccgtataacatggtggttaaggataaagatctgaagccagacagcccctagttccaatcccagctctgccgcttactagcagtggcagtttggttcaggacttagccttcctgaccttcacttacctcagctatcttgttatcctaccctcagggagttgttgagaggattcagtgaaattttgtgtgcagaatacccatgccactgagtgcctggaacgtagtaaatgtcaaatcaatggaagttaaaactaggcatgcatatatgccagagagctttcctagcatttactgcaatgccctgtctcattttgggaaaaaggaaatcctggatgctaagttgacacatccctttatgcaagtgacaggtaagcagccaggagggttgaccctgccctgggtcccaggcctcttgcctgcttcttggtttcctctgttctcatcctttcagctttgctggacctgaggcaggggcctgggtgtctgtgcctccctaccccccagtacacatgaccaagggaagtagatccagagacaccatgcactctggcccagaaaccctctgctacccagcttttgacttaattgccatttggtgtggctgcagcggggagggcttgtctgcgtatttggagctgaggctgaggctggcttcctgccctctggcttccaggccaggtgtgagggacatcccatgtgggctctgagagcactgagagtagaggtgccttgaggggaccaggaagcctactggctggaatcagtgctccagcagcctccacagcctttatctcaacagcacttgacttcaccaggtgaccctttgggataaaattgccttagggtatgaaataaactataactaaaatggta

SEQ ID NO: 22529 - DNA, 984 bp, Homo sapiens
  source 1..984: mol_type = unassigned DNA
tgcagatggcggaaatggatccggtagccgagttcccccagcctcccggtgctgcgcgctgggctgaggcccttctgcgatgttttacctggctgcggctgtgtcagatttctatgttcctgtctctgaaatgcctgaacacaagatccagtcatctgggggcccactgcagataacaatgaagatggtgccaaaactgctttctcctttggttaaagattgggctcccaaagcatttataatttcctttaagttggagactgaccccgccattgtaattaatcgagctcggaaggctttggaaatttatcagcatcaagtggtggtggctaatatccttgagtcacgacagtcctttgtgtttattgtaaccaaagactcggaaaccaagttattgctatcagaggaagaaatagaaaaaggcgtagagatagaagagaagatagtggataatcttcagtctcgacacacagcttttataggtgacagaaactgaagtaaaaagcccttataggatcaaaaattgttcagggctcttagagatggtgaaaactacaaaaaaaaccatggctttcatatggacagataaaatgaaagaaagggaaaaggcagtggtgtgtaggcaaatatggtttggcatttgtcttttaatgacacctgatatgatgtcattttgattttgaaattgaacactagaactgttaatcacctttaaaaagaagagcttattgggaattatatattccttaaaatatacatgggggcctgaatgtcagccatctttatactatagaaaaaggattatggatgcatgaatggtcatgctttggagatcaaatattggttgaatgcctatgtatgtcaggccctgtgctgagccatgaggattaaaaagatgaataaacatatcttgtttaggaaatggatgtataaaaaaatcaagtgcaataaagtgtgtgtccaaaagctgacacaatggaaagg

SEQ ID NO: 22530 - DNA, 793 bp, Homo sapiens
  source 1..793: mol_type = unassigned DNA
gcgcaggcgccggccgctgcgctgcagatggcggaaatggatccggtagccgagttcccccagcctcccggtgctgcgcgctgggctgaggttatggctcgcttcgcggccaggctgggcgcgcagggccggcgggtggtgttggttacgtcaggcggcaccaaggtcccactggaagcgcggccggtgcgcttcctggacaacttcagcagcgggcggcgcggtgcaacctcggccgaggccttcctagccgccggctacggggtcctgttcttgtatcgcgctcgctctgccttcccctatgcccaccgcttcccaccccagacttggctgtccgctctgcggccttcgggcccagccctttcgggcttgctgagcctggaggccgaggagaatgcacttccgggttttgctgaggctctgaggagctaccaggaggctgcggctgcaggcaccttcctggcagtagagttcaccactttggcggactatttgcatctgttgcaggctgcggcccaggcactcaatccgctaggcccttctgcgatgttttacctggctgcggctgtgtcagatttctatgttcctgtctctgaaatgcctgaacacaagatccagtcatctgggggcccactgcaggtgatgggcgcttctcttccagagatctaatcccatataaccaatcttgggttaatttcctcttgatctggagatggcctttctgcatctgtattcgctaggcacaggggatacagagatgaataagacaccgccctccctcatggacctcaca

SEQ ID NO: 22531 - DNA, 1431 bp, Homo sapiens
  source 1..1431: mol_type = unassigned DNA
gctgcagatggcggaaatggatccggtagccgagttcccccagcctcccggtgctgcgcgctgggctgaggttatggctcgcttcgcggccaggctgggcgcgcagggccggcgggtggtgttggttacgtcaggcggcaccaaggtcccactggaagcgcggccggtgcgcttcctggacaacttcagcagcgggcggcgcggtgcaacctcggccgaggccttcctagccgccggctacggggtcctgttcttgtatcgcgctcgctctgccttcccctatgcccaccgcttcccaccccagacttggctgtccgctctgcggccttcgggcccagccctttcgggcttgctgagcctggaggccgaggagaatgcacttccgggttttgctgaggctctgaggagctaccaggaggctgcggctgcaggcaccttcctggcagtagagttcaccactttggcggactatttgcatctgttgcaggctgcggcccaggcactcaatccgctaggcccttctgcgatgttttacctggctgcggctgtgtcagatttctatgttcctgtctctgaaatgcctgaacacaagatccagtcatctgggggcccactgcagataacaatgaagatggtgccaaaactgctttctcctttggttaaagattgggctcccaaagcatttataatttcctttaagttggagactgaccccgccattgtaattaatcgagctcggaaggctttggaaatttatcagcatcaagtggtggtggctaatatccttgagtcacgacagtcctttgtgtttattgtaaccaaagactcggaaaccaagttattgctatcagaggaagaaatagaaaaaggcgtagagatagaagagaagatagtggataatcttcagtctcgacacacagcttttataggtgacagaaactgaagtaaaaagcccttataggatcaaaaattgttcagggctcttagagatggtgaaaactacaaaaaaaaccatggctttcatatggacagataaaatgaaagaaagggaaaaggcagtggtgtgtaggcaaatatggtttggcatttgtcttttaatgacacctgatatgatgtcattttgattttgaaattgaacactagaactgttaatcacctttaaaaagaagagcttattgggaattatatattccttaaaatatacatgggggcctgaatgtcagccatctttatactatagaaaaaggattatggatgcatgaatggtcatgctttggagatcaaatattggttgaatgcctatgtatgtcaggccctgtgctgagccatgaggattaaaaagatgaataaacatatcttgtttaggaaatggatgtataaaaaaatcaagtgcaataaagtgtgtgtccaaaagctgacacaatggaaagg

SEQ ID NO: 22532 - DNA, 966 bp, Homo sapiens
  source 1..966: mol_type = unassigned DNA
gggacgtgactcgactaacatctgggtgtattgctgaagttggaaaaggggaagaaagaaagaaaaagcagcacaaaacccacaagtcccacgggtcaaatggccgagaaacgactcccaaggagtccaagtccagaaaggcccgtacagtggccggtaagggtcaaacatggccagttcttcacccaggctaggaaacgaacgtgagggaacgtgaccctaccagatgcccacccagccggggatccccctcgttgcagtgtcactttcgctgggctctggggcagaacaactacgcatttccagacttggcgagatcgggacctagtgtcaaaagaagggtagtgaaccgcccactcagtacggcgcggcgcgtacaccaggcccttctgcgatgttttacctggctgcggctgtgtcagatttctatgttcctgtctctgaaatgcctgaacacaagatccagtcatctgggggcccactgcagataacaatgaagatggtgccaaaactgctttctcctttggttaaagattgggctcccaaagcatttataatttcctttaagttggagactgaccccgccattgtaattaatcgagctcggaaggctttggaaatttatcagcatcaagtggtggtggctaatatccttgagtcacgacagtcctttgtgtttattgtaaccaaagactcggaaaccaagttattgctatcagaggaagaaatagaaaaaggcgtagagatagaagagaagatagtggataatcttcagtctcgacacacagcttttataggtgacagaaactgaagtaaaaagcccttataggatcaaaaattgttcagggctcttagagatggtgaaaactacaaaaaaaaccatggctttcatatggacagataaaatgaaagaaagggaaaaggcagtggtgtgtaggcaaatatggtttggcatttgtcttttaa

SEQ ID NO: 22533 - DNA, 1044 bp, Homo sapiens
  source 1..1044: mol_type = unassigned DNA
aggcgagaaggggcgtggcgcggcggccgcgaaacgtgcgcaggcgccggccgctgcgctgcagatggcggaaatggatccggtagccgagttcccccagcctcccggtgctgcgcgctgggctgaggcccttctgcgatgttttacctggctgcggctgtgtcagatttctatgttcctgtctctgaaatgcctgaacacaagatccagtcatctgggggcccactgcagataacaatgaagatggtgccaaaactgctttctcctttggttaaagattgggctcccaaagcatttataatttcctttaagttggagactgaccccgccattgtaattaatcgagctcggaaggctttggaaatttatcagcatcaagtggtggtggctaatatccttgagtcacgacagtcctttgtgtttattgtaaccaaagactcggaaaccaagttattgctatcagaggaagaaatagaaaaaggcgtagagatagaagagaagatagtggataatcttcagtctcgacacacagcttttataggtgacagaaactgaagtaaaaagcccttataggatcaaaaattgttcagggctcttagagatggtgaaaactacaaaaaaaaccatggctttcatatggacagataaaatgaaagaaagggaaaaggcagtggtgtgtaggcaaatatggtttggcatttgtcttttaatgacacctgatatgatgtcattttgattttgaaattgaacactagaactgttaatcacctttaaaaagaagagcttattgggaattatatattccttaaaatatacatgggggcctgaatgtcagccatctttatactatagaaaaaggattatggatgcatgaatggtcatgctttggagatcaaatattggttgaatgcctatgtatgtcaggccctgtgctgagccatgaggattaaaaagatgaataaacatatcttgtttaggaaatggatgtataaaaaaatcaagtgcaataaagtgtgtgtccaaaagctgacacaatggaaagga

SEQ ID NO: 22534 - DNA, 2471 bp, Homo sapiens
  source 1..2471: mol_type = unassigned DNA
catcaccggccagccgggtggagtgagcggcgctgggctcgggctccggctccgcgggcggaagaggcggcggcggcggcagaagcggcggcggcggcggcgggagccgaggaggaggttccggacgctgcttaggaaccggggactcaggagtgcccgcgccctgagcgctcagctccagaggcgtcatggctgagtacgggaccctcctgcaagacctgaccaacaacatcacccttgaagatctagaacagctcaagtcggcctgcaaggaagacatccccagcgaaaagagtgaggagatcactactggcagtgcctggtttagcttcctggagagccacaacaagctggacaaagacaacctctcctacattgagcacatctttgagatctcccgccgtcctgacctactcactatggtggttgactacagaacccgtgtgctgaagatctctgaggaggatgagctggacaccaagctaacccgtatccccagtgccaagaagtacaaagacattatccggcagccctctgaggaagagatcatcaaattggctcccccaccgaagaaggcctgagcaagggggaggaagaggaggaaggttggaccttcatcagaccactcccttcccccatcctccaggagagggggcaagggcaacccaccatctacccacttactaacctggtcctaacccccttactgtgcgcgtgtgtgtgcgtgtgcgcacgctctggctgtttgtctatatgtctagctcatctagttcctcttcttaaggggatgggggtcaggggctaggggagggggctgagtttccccactttaggaggaggtgggggctatttctatgcaaatagaaatcagcacattcctcctacttccctttcctccactccccccatatctttaaagtgtggaagcagaaaggacctgcattttcctacattgaggagctgacataggggtaaggtatgggagaggtaggtggatccagggaaaagcagtggggacggaaggcaaagagaccactcaacccccacctggaaggggcaaagaaaagccagagttccatgtttgtactcctgtgctggactgtttcctgagtaccagcaggtccctttttgtctctcatgggcctagcataggtatgagccagggatcctttcctggtccctaagatcaaaccccatggagcagccagcgttagatgcccccacccacctgtactctggagagactgtgctgggaacatgtaccactgagcctgagatggggatgagggcagagagaggggagccccctcttccactcagttgttcctactcagactgttgcactctaaacctagggaggttgaagaatgagacccttaggttttaacacgaatcctgacaccaccatctatagggtcccaacttggttattgtaggcaaccttccctctctccttggtgaagaacatcccaagccagaaagaagttaactacagtgttttcctttgcaccgatccccaccccaattcaatcccggaagggacttacttaggaaacccttctttactagatatcctggccccctgggcttgtgaacacctcctagccacatcactacagtacagtgagtgaccccagcctcctgcctaccccaagatgcccctccccaccctgaccgtgctaactgtgtgtacatatatattctacatatatgtatattaaaactgcactgccatgtctgcccttttttgtggtgtctagcattaacttattgtctaggccagagcgggggtgggaggggaatgccacagtgaagggagtggcagaatcaaattgctacatagtccaaacaaaaaagaaggctttttcaaaaaacattaaattcacatgcagtctcagagactatttagacaaagttcaagttaggagcttttaggatgtgggagtaaaactttaatgggaggggagggctggctgctggaagaaggaagaagccagactggttagacagtactcttaactcctagcccagcctagcgtgccctgcccctctggccactgctgcagacacctgccttaacacacacacctctaggactccacagttttgccttaaaggaccttcccaagtctccctttccctgtctggcttctcccttaagaagagagagatacttgtagaattgggtggggggaatgagcatgaactgtccttccatttgggatatgttacattagagtgagagagagaataaggagcctttcttatggaagaaatgggagaagagagacagggttcttttcagcagagtctagtagtttctctgtaaggcaaaataatctaaaaagactaacctgcccacccactccttatattgctgtgagattgcccctatcttgtgctcttctgtctgcagtgtgcacggccttgttctaacccggaataaaggtgattgattgtattgcaactaa

SEQ ID NO: 22535 - DNA, 2694 bp, Homo sapiens
  source 1..2694: mol_type = unassigned DNA
gcggcggcggcggcggcgggagccgaggaggaggttccggacgctgcttaggaaccggggactcaggagtgcccgcgccctgagcgctcagctccagaggcgggatgctcaccccttcctaattgcagctccgaatattcagatggggacagtgaagcacagatctcaggagtcctaagtattcatggctaccactaagttggatagaatggcctccgcccagactgcctggtgatccctgagcagctctctgcactgctccagaaatcaggaggatttttcagagcccagagagcagatttctccacgagccctaaggaaatctgaatctctggtgaggaaagtgacatggaggatgaaggaaacaagctctgccaagccccaccatggccaggccagaccagcccagtcatggctgagtacgggaccctcctgcaagacctgaccaacaacatcacccttgaagatctagaacagctcaagtcggcctgcaaggaagacatccccagcgaaaagagtgaggagatcactactggcagtgcctggtttagcttcctggagagccacaacaagctggacaaagacaacctctcctacattgagcacatctttgagatctcccgccgtcctgacctactcactatggtggttgactacagaacccgtgtgctgaagatctctgaggaggatgagctggacaccaagctaacccgtatccccagtgccaagaagtacaaagacattatccggcagccctctgaggaagagatcatcaaattggctcccccaccgaagaaggcctgagcaagggggaggaagaggaggaaggttggaccttcatcagaccactcccttcccccatcctccaggagagggggcaagggcaacccaccatctacccacttactaacctggtcctaacccccttactgtgcgcgtgtgtgtgcgtgtgcgcacgctctggctgtttgtctatatgtctagctcatctagttcctcttcttaaggggatgggggtcaggggctaggggagggggctgagtttccccactttaggaggaggtgggggctatttctatgcaaatagaaatcagcacattcctcctacttccctttcctccactccccccatatctttaaagtgtggaagcagaaaggacctgcattttcctacattgaggagctgacataggggtaaggtatgggagaggtaggtggatccagggaaaagcagtggggacggaaggcaaagagaccactcaacccccacctggaaggggcaaagaaaagccagagttccatgtttgtactcctgtgctggactgtttcctgagtaccagcaggtccctttttgtctctcatgggcctagcataggtatgagccagggatcctttcctggtccctaagatcaaaccccatggagcagccagcgttagatgcccccacccacctgtactctggagagactgtgctgggaacatgtaccactgagcctgagatggggatgagggcagagagaggggagccccctcttccactcagttgttcctactcagactgttgcactctaaacctagggaggttgaagaatgagacccttaggttttaacacgaatcctgacaccaccatctatagggtcccaacttggttattgtaggcaaccttccctctctccttggtgaagaacatcccaagccagaaagaagttaactacagtgttttcctttgcaccgatccccaccccaattcaatcccggaagggacttacttaggaaacccttctttactagatatcctggccccctgggcttgtgaacacctcctagccacatcactacagtacagtgagtgaccccagcctcctgcctaccccaagatgcccctccccaccctgaccgtgctaactgtgtgtacatatatattctacatatatgtatattaaaactgcactgccatgtctgcccttttttgtggtgtctagcattaacttattgtctaggccagagcgggggtgggaggggaatgccacagtgaagggagtggcagaatcaaattgctacatagtccaaacaaaaaagaaggctttttcaaaaaacattaaattcacatgcagtctcagagactatttagacaaagttcaagttaggagcttttaggatgtgggagtaaaactttaatgggaggggagggctggctgctggaagaaggaagaagccagactggttagacagtactcttaactcctagcccagcctagcgtgccctgcccctctggccactgctgcagacacctgccttaacacacacacctctaggactccacagttttgccttaaaggaccttcccaagtctccctttccctgtctggcttctcccttaagaagagagagatacttgtagaattgggtggggggaatgagcatgaactgtccttccatttgggatatgttacattagagtgagagagagaataaggagcctttcttatggaagaaatgggagaagagagacagggttcttttcagcagagtctagtagtttctctgtaaggcaaaataatctaaaaagactaacctgcccacccactccttatattgctgtgagattgcccctatcttgtgctcttctgtctgcagtgtgcacggccttgttctaacccggaataaaggtgattgattgtattgcaactaa

SEQ ID NO: 22536 - DNA, 1021 bp, Homo sapiens
  source 1..1021: mol_type = unassigned DNA
ctccggctccgcgggcggaagaggcggcggcggcggcagaagcggcggcggcggcggcgggagccgaggaggaggttccggacgctgcttaggaaccggggactcaggagtgcccgcgccctgagcgctcagctccagaggcgtcatggctgagtacgggaccctcctgcaagacctgaccaacaacatcacccttgaagatctagaacagctcaagtcggcctgcaaggaagacatccccagcgaaaagaacaacctctcctacattgagcacatctttgagatctcccgccgtcctgacctactcactatggtggttgactacagaacccgtgtgctgaagatctctgaggaggatgagctggacaccaagctaacccgtatccccagtgccaagaagtacaaagacattatccggcagccctctgaggaagagatcatcaaattggctcccccaccgaagaaggcctgagcaagggggaggaagaggaggaaggttggaccttcatcagaccactcccttcccccatcctccaggagagggggcaagggcaacccaccatctacccacttactaacctggtcctaacccccttactgtgcgcgtgtgtgtgcgtgtgcgcacgctctggctgtttgtctatatgtctagctcatctagttcctcttcttaaggggatgggggtcaggggctaggggagggggctgagtttccccactttaggaggaggtgggggctatttctatgcaaatagaaatcagcacattcctcctacttccctttcctccactccccccatatctttaaagtgtggaagcagaaaggacctgcattttcctacattgaggagctgacataggggtaaggtatgggagaggtaggtggatccagggaaaagcagtggggacggaaggcaaagagaccactcaacccccacctggaaggggcaaagaaaagccagagttccatgtttgtactcctgtgctggactgtttcctgagtaccagcaggtcccttttt

SEQ ID NO: 22537 - DNA, 3682 bp, Homo sapiens
  source 1..3682: mol_type = unassigned DNA
agtagctggggccaccctcgggaaggaagagcctgtcgcgagcgcgagcttctgagctcgacgggccgagctggcagctggttggtgcttacaccttggccgcagcggcaggtccttccacgtgctttcggcggcgacatggagctggaggagttggggatccgagaggaatgtggcgtgttcgggtgcatcgcctcaggagagtggcccacgcagctggatgtaccgcatgtgatcactctgggactcgtggggctgcagcaccggggtcaggagagtgctggtattgtgactagtgatgggagttcggtgccaacattcaaatcacacaagggaatgggtcttgtaaatcacgtctttactgaagacaatttgaaaaaattatatgtttcaaatcttggaattggacacaccaggtatgccaccacaggaaaatgtgaactagaaaattgtcagcccttcgttgttgaaacacttcatgggaagatagctgtggcacataatggcgaattggtaaatgctgctcgattaaggaaaaagcttctgcgtcatggtattggtctgtctacaagttctgatagtgaaatgattacccagttactggcgtatacccctcctcaggaacaagatgacaccccagactgggtagccaggattaaaaacttgatgaaggaagcacccacagcatactccctgcttataatgcacagagatgttatttatgcagtacgagatccttatggaaatcgtcccttatgcattggtcgtcttattccagtgtctgatataaatgacaaagagaaaaaaacatcagaaacagaaggatgggtggtgtcttcagaatcttgtagcttcttatctattggtgcaagatattaccgtgaagtcttgcctggagaaattgtggaaatatccagacacaatgtccaaactcttgatattatatcaaggtctgaaggaaacccagtggctttttgtatctttgaatatgtttattttgcaagaccagacagtatgttcgaagaccaaatggtttatacagtaagataccgttgtggccagcagctagcgattgaagcacctgtggatgcagatttggttagcactgttccagaatctgctacgcctgctgctcttgcttacgcaggaaagtgtggacttccatatgtggaggtgctgtgtaaaaaccggtatgtagggagaaccttcattcagccaaacatgaggttaagacaacttggtgttgcaaaaaaatttggagtattgtcagacaactttaaaggcaaaagaattgttcttgtagatgattcaattgtcagaggcaataccatctcacctataataaaactgctcaaagaatctggtgcaaaagaggtacacattcgagtagcttcaccaccaattaaatatccatgcttcatgggaataaacattcctacaaaagaagagctcattgccaataaaccagaatttgatcaccttgcagaatatctaggagcaaacagtgttgtgtatctgtcagtagaaggactggtttcatctgtacaagaagggataaagtttaaaaaacagaaagagaaaaagcacgatattatgatccaagaaaatggaaatggtctggaatgttttgaaaagagtggtcattgtacagcttgtctcactggaaaatatcctgtagaattagaatggtagctggtagggttggatgtgtgtagtttcaagatagaaagttggtcaagaagttatagtggtcacacctcatctatttactgttactcagttggtacaatgtaaaatgccatgcttatgtttataagttttgagattttttttttttctgaaaaggataccaaagtgcgataactgaacatttccaattgcatataatacaacaatatgtggtgttcttttttttacacaagcattggctagcctttttaacctggtcagagaaggcaggtggtcactgacatttcccaagtccatgctttaaagggtttgcaagaagttagggttaaggagaggtgatgccaacaagacaggtgagttaaatataccatttcacacaaagtttgaatagaatacattatacctcataggtgtctagcctctacagttctggctgtagttatgaccttggcttccctgtctaactgtagacaaatctttaaaaaaaaataataataatctggtgcctcagtttccccacatgtgcaatgggatacttattaaataattaataagaatgtgaataagtgtcatacttttgtgatttgagccatcatttcacttctgattttaagacaactcatgattgttagctttcagaaagctaatgattgttaactttttgaaattagtttacaattaattaagatttcattatgatggaaggagacataattggcagatctttgccatctctctttgagatgtcctaaaaagggttgtaaaaatctgtgaaaaagtttttcctacatttgactagaaaatgtgatccatagtatttagtgccctgatactataagctcagcaagtaacctggtacatttgaaataaaaaccaaatttttagattcaaacaatccctttatccttaatttaattaattatcatatgctttttttaatgaagtgcttgatcacttgcaaacatatatacatgtagatgtacatatacatgtacacatacacataaatattattgcaattaagtgatcaagtacagacacaataggggccagttttgtttaaggatcaaagagacaaccactttggggaattagtatcaacttacaatccaagtccaagtatcatcttataatcacttttttctactatattaagatctaatgaatttgatttcttttttgaagttttttcttgtaacatctgagattagaagtttaagatgacttgaccccaaacctttgtttatgtaagaatttttaaacataaaagtgtttgtttctgttatgttaccataatttgatgtatatagtgtccagatccatttagaaatttaatatttattaataactgaaactgtttgtcttcctttggtatatagtctcgcatattatattatagcaggccaagataaaattttgacagctctttaagcccacatgcagcagtgggtcagataaccctgtggcagtgacacgggcaaattggcatttgaataaagccctgggaccacctcaacatgcgtagcctcttgtcttaaatgtactccccatggcagcatggaggaggcaagacctgtgggtcaattttgaactggccttactttgatttttaaaacaagagactcagggaaagtactaaaccaaaatctctgattttactttgcgttttctgtagtttttgttttactgagatgcttttgtaaaggaaaataatactgtgacagtttagtaattctacagattcttaatatttctccatcatggccttttacttcacaattttctgaagtctgaattcaattacaatttttttttaccaatttaatctcaaatgttgtttaactgctttaaattcatatacgtagagtattataaactgcagagatgaaaaatgtgttttcacgggatttatattgtgaactaaactaagcctactttttgtgacttatttgtgatgccttgttgataaatatgtgtaataagtatgtttaaa

SEQ ID NO: 22538 - DNA, 942 bp, Homo sapiens
  source 1..942: mol_type = unassigned DNA
aatcaatgacaatttaatggagcttttgatcatgattaatgcctgcaagattgcttcagccagccgggttactgcagtcatcccatgcttcccttatgcccggcaggataagaaagataagggcttttttgatatcccagtagacaatttgtatgcagagccggctgtcctaaagtggataagggagaatatctctgagtggaggaactgcactattgtctcacctgatgctggtggagctaagagagtgacctccattgcagacaggctgaatgtggactttgccttgattcacaaagaacggaagaaggccaatgaagtggaccgcatggtgcttgtgggagatgtgaaggatcgggtggccatccttgtggatgacatggctgacacttgtggcacaatctgccatgcagctgacaaacttctctcagctggcgccaccagagtttatgccatcttgactcatggaatcttctccggtcctgctatttctcgcatcaacaacgcatgctttgaggcagtagtagtcaccaataccatacctcaggaggacaagatgaagcattgctccaaaatacaggtgattgacatctctatgatccttgcagaagccatcaggagaactcacaatggagaatccgtttcttacctattcagccatgtccctttataatagagtaacttctgaggctttttgagaataaaatccaccccacccttgtttccccttggtatttgatgacaaattcagcagaagacccggcttgctccagtgtagctttctacatcccacatcaggtatattagagcttatccgaactggggaaagacggattgagattaactgctgggacctcctacctgcattatctcattctggcttccttgataattctgtgggccttgcagctttaactatagctcagctgctgcaagatttca

SEQ ID NO: 22539 - DNA, 628 bp, Homo sapiens
  source 1..628: mol_type = unassigned DNA
caacgcaaagcgcttggtattgagtctgtggccgacttcggttccggtctctgcagcagccgtgatcgcttagtggagtgcttagggtagttggccaggatgccgaatatcaaaatcttcagcggcagctcccaccaggacttatctcagaaaattgctgaccgcctgggcctggagctaggcaaggtggtgactaagaaattcagcaaccaggagacctgtgtggaaattggtgaaagtgtacgtggagaggatgtctacattgttcagagtggttgtggcgaaatcaatgacaatttaatggagcttttgatcatgattaatgcctgcaagattgcttcagccagccgggttactgcagtcatcccatgcttcccttatgcccggcaggataagaaagataagagccgggcgccaatctcagccaagcttgttgcaaatatgctatctgtagcaggtgcagatcatattatcaccatggacctacatgcttctcaaattcaggtatcagtggaagctaaatattggtgtttgaaaggtgggaggaaaggactgatgatgctgaagactgcagagaagccaaaaattatgcccaagtacatctgaaataaactagatatcaacaaca

SEQ ID NO: 22540 - DNA, 1218 bp, Homo sapiens
  source 1..1218: mol_type = unassigned DNA
aagatggcggagtagcaacgcaaagcgcttggtattgagtctgatgccgaatatcaaaatcttcagcggcagctcccaccaggacttatctcagaaaattgctgaccgcctgggcctggagctaggcaaggtggtgactaagaaattcagcaaccaggagacctgtgtggaaattggtgaaagtgtacgtggagaggatgtctacattgttcagagtggttgtggcgaaatcaatgacaatttaatggagcttttgatcatgattaatgcctgcaagattgcttcagccagccgggttactgcagtcatcccatgcttcccttatgcccggcaggataagaaagataagagccgggcgccaatctcagccaagcttgttgcaaatatgctatctgtagcaggtgcagatcatattatcaccatggacctacatgcttctcaaattcagggcttttttgatatcccagtagacaatttgtatgcagagccggctgtcctaaagtggataagggagaatatctctgagtggaggaactgcactattgtctcacctgatgctggtggagctaagagagtgacctccattgcagacaggctgaatgtggactttgccttgattcacaaagaacggaagaaggccaatgaagtggaccgcatggtgcttgtgggagatgtgaaggatcgggtggccatccttgtggatgacatggctgacacttgtggcacaatctgccatgcagctgacaaacttctctcagctggcgccaccagagtttatgccatcttgactcatggaatcttctccggtcctgctatttctcgcatcaacaacgcatgctttgaggcagtagtagtcaccaataccatacctcaggaggacaagatgaagcattgctccaaaatacaggtgattgacatctctatgatccttgcagaagccatcaggagaactcacaatggagaatccgtttcttacctattcagccatgtccctttataatagagtaacttctgaggctttttgagaataaaatccaccccacccttgtttccccttggtatttgatgacaaattcagcagaagacccggcttgctccagtgtagctttctacatcccacatcaggtatattagagcttatccgaactggggaaagacggattgagattaactgctgggacctcctacctgcattatctcattctggcttccttgata

SEQ ID NO: 22541 - DNA, 2073 bp, Homo sapiens
  source 1..2073: mol_type = unassigned DNA
gggaatgtaagatggcggagtagcaacgcaaagcgcttggtattgagtctgtggccgacttcggttccggtctctgcagcagccgtgatcgcttagtggagtgcttagggtagttggccaggatgccgaatatcaaaatcttcagcggcagctcccaccaggacttatctcagaaaattgctgaccgcctgggcctggagctaggcaaggtggtgactaagaaattcagcaaccaggagacctgtgtggaaattggtgaaagtgtacgtggagaggatgtctacattgttcagagtggttgtggcgaaatcaatgacaatttaatggagcttttgatcatgattaatgcctgcaagattgcttcagccagccgggttactgcagtcatcccatgcttcccttatgcccggcaggataagaaagataagagccgggcgccaatctcagccaagcttgttgcaaatatgctatctgtagcaggtgcagatcatattatcaccatggacctacatgcttctcaaattcagggcttttttgatatcccagtagacaatttgtatgcagagccggctgtcctaaagtggataagggagaatatctctgagtggaggaactgcactattgtctcacctgatgctggtggagctaagagagtgacctccattgcagacaggctgaatgtggactttgccttgattcacaaagaacggaagaaggccaatgaagtggaccgcatggtgcttgtgggagatgtgaaggatcgggtggccatccttgtggatgacatggctgacacttgtggcacaatctgccatgcagctgacaaacttctctcagctggcgccaccagagtttatgccatcttgactcatggaatcttctccggtcctgctatttctcgcatcaacaacgcatgctttgaggcagtagtagtcaccaataccatacctcaggaggacaagatgaagcattgctccaaaatacaggtgattgacatctctatgatccttgcagaagccatcaggagaactcacaatggagaatccgtttcttacctattcagccatgtccctttataatagagtaacttctgaggctttttgagaataaaatccaccccacccttgtttccccttggtatttgatgacaaattcagcagaagacccggcttgctccagtgtagctttctacatcccacatcaggtatattagagcttatccgaactggggaaagacggattgagattaactgctgggacctcctacctgcattatctcattctggcttccttgataattctgtgggccttgcagctttaactatagctcagctgctgcaagatttcagacttttgaggatgttgtgtgagggtgtttgactgtgactggggaagctcagactactttgtatgtgaatgcttcagggttttctttgttgagaacaactagcaacaaaggcaacccatgtgtgaccagttctccccaaggtctatgctaaattatagcaagagccctgggcaaccccaaacctagtcctggtagctgagcaccctgtaaggcaggagcaggcagctcagcttgagcagacattgggtggggggtggggggtggttgaggggggaggcagcacagtgcagcaaatgtttcttgggaggaagaagcctgatccatcaccatctgcttgactatgtagcttggattctcctttgtacctatccctttcgatttggctttaccttcatctatcttgatcctttcctggccaaatatcctcttgggcccaaatgaacattgtaccatagtcttctggaaagcaaacatgcttcctgctatgtaattgctaacattcatattagatgatgtgctgtagcttgatcttccttagcctactgccactgaggcagtaggttttaggtggtatcgtagtgccttttgattaatttaagtatttaattttcatcttccttctttggatctatttggcctctcaaatgaactgagattcctgttaaaaaagattgatgttattgtctcttgtagaggaaactaataaagtgtgtgtacctgtgtga

SEQ ID NO: 22542 - DNA, 1199 bp, Homo sapiens
  source 1..1199: mol_type = unassigned DNA
gacttcggttccggtctctgcagcagccgtgatcgcttagtggagtgcttagggtagttggccaggatgccgaatatcaaaatcttcagcggcagctcccaccaggacttatctcagaaaattgctgaccgcctgggcctggagctaggcaaggtggtgactaagaaattcagcaaccaggagacctgtgtggaaattggtgaaagtgtacgtggagaggatgtctacattgttcagagtggttgtggcgaaatcaatgacaatttaatggagcttttgatcatgattaatgcctgcaagattgcttcagccagccgggttactgcagtcatcccatgcttcccttatgcccggcaggataagaaagataagagccgggcgccaatctcagccaagcttgttgcaaatatgctatctgtagcaggtgcagatcatattatcaccatggacctacatgcttctcaaattcagggcttttttgatatcccagtagacaatttgtatgcagagccggctgtcctaaagtggataagggagaatatctctgagtggaggaactgcactattgtctcacctgatgctggtggagctaagagagtgacctccattgcagacaggctgaatgtggactttgccttgattcacaaagaacggaagaaggccaatgaagtggaccgcatggtgcttgtgggagatgtgaaggatcgggtggccatccttgtggatgacatggctgacacttgtggcacaatctgccatgcagctgacaaacttctctcagctggcgccaccagagtttatgccatcttgactcatggaatcttctccggtcctgctatttctcgcatcaacaacgcatgctttgaggcagtagtagtcaccaataccatacctcaggaggacaagatgaagcattgctccaaaatacaggtgattgacatctctatgatccttgcagaagccatcaggagaactcacaatggagaatccgtttcttacctattcagccatgtccctttataatagagtaaggtatttgatgacaaattcagcagaagacccggcttgctccagtgtagctttctacatcccacatcaggtatattagagcttatccgaactggggaaagacggattgagattaactgctgggacctcctacctgcattatctcattctggcttccttgataattctgt

SEQ ID NO: 22543 - DNA, 1082 bp, Homo sapiens
  source 1..1082: mol_type = unassigned DNA
attagagtctgtgcttcacttccgttccagcctcagcggcagctggatcgctcgacggagtgcctctggtagttggccaagacgccgaatatcaaaatcttcagcggcagctcccaccaggacttatcccagaaaattgctgaccgcctgggcctggagctaggcaaggtggtgactaagaaattcagcaaccaggagacctgcgtggaaattgatgagagtgtgcgtggagaggatgtctacatcgttcagagtggttgtggcgaaatcaacgacagtctaatggagcttttgatcatgattaatgcctgcaagattgcttcagctagccgagttactgcagtcatcccatgcttcccttatgcccgacaggataagaaggataagagccggtccccaatctctgccaagcttgttgcaaatatgctctctatagcaggtgcggatcatatcatcaccatggacctacatgcttctcaaattcagggcttttttgatatcccagtagacaacttgtatgcagagccaactgtcctgaagtggataagggagaatatccctgagtggaagaactgcattattgtctcgccagatgctggtggagctaaaagagtgacctccattgcagaccagttgaatgtggactttgctttgattcataaagaacggaagaaggccaatgaagtggactgcatagtgctagtgggagatgtgaatgatcgtgtggctatccttgtagatgacatggcagacacttgtgttacaatctgcctcgcagctgacaaacttctctcagctggagcaaccagagtttatgctatcttgactcatggaatcttttctggcccagccatttctcgcatcaacactgcatgctttgaagcagtggtagtcaccaataccatacctcaagatgagaagatgaagcattgctccaaaatacgagtaattgacatctccatgatccttgcagaagccataaggagaactcataatggggaatctgtttcctacctgttcagccatgttcctttataacagaataacttctaggttatgctattttaaaataaaataagatt

SEQ ID NO: 22544 - DNA, 2511 bp, Homo sapiens
  source 1..2511: mol_type = unassigned DNA
cctccccttccctacatctagccgccgcgctttcccgctcccgcagcagcagcctcccgcgtcgctgtcgctgttgcctccgccacctcctccgccgccgcgcgcccctcggagttccgcgccccaccatgcccaacatcgtgctgttcagcggcagctcgcatcaggacctgtcccagcgcgtggccgaccgcctgggcctggagctgggcaaggtggtcacgaagaagttcagcaaccaggagaccagcgtggagattggtgaaagcgtgagaggggaagatgtctacatcatccagagcggctgcggggaaattaacgacaacctgatggaactcctcatcatgatcaatgcctgcaagattgcgtcatcatccagagtaactgccgtgatcccgtgtttcccatacgcccgacaagataaaaaggacaagagtcgtgccccaatttctgcaaaacttgtggccaatatgctgtcggtggctggggcggatcacatcatcaccatggacctgcatgcttctcagatacagggattctttgatattcctgtggataatttgtatgcggagcccgcagtcctgcagtggattcgggaaaacattgccgagtggaagaactgtatcattgtttcacctgacgcagggggagccaaaagggttacatcaattgcagacaggttgaatgtggaatttgctttgatccacaaagagaggaagaaggcgaatgaagtggaccggatggtcctggtgggcgacgtgaaggaccgtgtggccatcctcgtggatgacatggctgacacttgcggcaccatctgccatgctgcggacaagctgctgtcagctggagccaccaaagtgtatgctatccttacccatgggatcttctctggaccagctatttccagaataaataatgccgcctttgaggctgttgtcgtcacaaacacaattccgcaagaggacaaaatgaaacactgcaccaagattcaggtcattgacatttccatgatcttggccgaagcaatccgaaggacacacaatggggaatccgtgtcctacctgttcagccatgtcccgctataaatccagaatgggaagtgtccagcaagcctactctgacttctgacttgtttttgttttctggatttttagctgtaggtattcagcaatgataggttaatcactggcaaaagcatcagatctttgtatatgctaagatttattgtttccccttctaaagctcaagatcatttctttccagtttttggggaaatggtggtggttatttggtctttaagtgaactgtcttaaatgagaaacgtttttgtcattttgacttttaacaggtacaggtgatctcttcctttgttctttcagtactttgaggcgacaactttcaagtatataatttcattgtggaagtcatagtttatatatttcgaggttgccaaaggtgacttcagattaaagccttctgtgtaaatatatactgataatgcctatggacatttgggtaaaaccctgtatagaattaattatccttttactttggagtgaaccttggaaaatttataattataataccatggattttgaattttccttttttttttttttttggataactcagtttcagataaaccatcttggttactgtgcttaatttggaccaaattttatttagcttaatatggacactgacacattttggggggtatacattagacatatcagagcagtgtatttctggatcattttttaaatgacctcttctaaaacataactgtcacttacctgaaatgctgcatcctaaaattccaaaattatattgagcaatcgccaaggcctaaagccaactgacttaaaggtaatcatttcagctaagattaaatttaaagcctaagaatgtatagagctagttttaaaataatgatctcagatttttaaaaaggatataggaacctgcattgtcattctctgaattaagaactgatggtttctatcattatttagccccacctttgtattttaaaatccttcagaatacatttatgaaccaatgcgactggacttagccacacacaatggaaattcagaccttgactatttggtgtttccagttcacaaaggtgatgaagactgtcttgggagcagcttaatcccaaaatttgtacatttcttgctgctcctggcgtggaaacttaagtgagaccaccaaatacattggtcctgtccaattctactgaatgggggtggacctggcatttatctggccaaaaacaggagccagagaaatatgaatataccaaagttgtttgtttagcctccaacttaaattacattagtcaacttatagatactcatatgatcacttttctttttagatactacatcaactagattcaggagtatatcatttgcagtgcttgtattggtttaaaatgtaagattttaagatcctctaacactgtactaaaacatttcaataaaatcattctgactgcgttca

SEQ ID NO: 22545 - DNA, 1348 bp, Homo sapiens
  source 1..1348: mol_type = unassigned DNA
gctcccgcagcagcagcctcccgcgtcgctgtcgctgttgcctccgccacctcctccgccgccgcgcgcccctcggagttccgcgccccaccatgcccaacatcgtgctgttcagcggcagctcgcatcaggacctgtcccagcgcgtggccgaccgcctgggcctggagctgggcaaggtggtcacgaagaagttcagcaaccaggagaccagcgtggagattggtgaaagcgtgagaggggaagatgtctacatcatccagagcggctgcggggaaattaacgacaacctgatggaactcctcatcatgatcaatgcctgcaagattgcgtcatcatccagagtaactgccgtgatcccgtgtttcccatacgcccgacaagataaaaaggacaaggtaggagagagtcgtgccccaatttctgcaaaacttgtggccaatatgctgtcggtggctggggcggatcacatcatcaccatggacctgcatgcttctcagatacagggattctttgatattcctgtggataatttgtatgcggagcccgcagtcctgcagtggattcgggaaaacattgccgagtggaagaactgtatcattgtttcacctgacgcagggggagccaaaagggttacatcaattgcagacaggttgaatgtggaatttgctttgatccacaaagagaggaagaaggcgaatgaagtggaccggatggtcctggtgggcgacgtgaaggaccgtgtggccatcctcgtggatgacatggctgacacttgcggcaccatctgccatgctgcggacaagctgctgtcagctggagccaccaaagtgtatgctatccttacccatgggatcttctctggaccagctatttccagaataaataatgccgcctttgaggctgttgtcgtcacaaacacaattccgcaagaggacaaaatgaaacactgcaccaagattcaggtcattgacatttccatgatcttggccgaagcaatccgaaggacacacaatggggaatccgtgtcctacctgttcagccatgtcccgctataaatccagaatgggaagtgtccagcaagcctactctgacttctgacttgtttttgttttctggatttttagctgtaggtattcagcaatgataggttaatcactggcaaaagcatcagatctttgtatatgctaagatttattgtttccccttctaaagctcaagatcatttctttccagtttttggggaaatggtggtggttatttggtctttaagtgaactgtcttaaatgagaaacgtttttgtcattttgacttttaacaggtacaggtgatctcttcctttgttctt

SEQ ID NO: 22546 - DNA, 1678 bp, Homo sapiens
  source 1..1678: mol_type = unassigned DNA
agagctagatcgtatacctcctcggaggcggacatgttgggtcctggccaaaaagttggaaacacctggggccactaccgaggcgccttggtgctgaattggggaagtctgttgtatatcaagagaccaatggagaaacaagagttgaaataaaagaatctgttcgtggccaagatattttcattatacagacaatacccagagatgtgaatacagctgtgatggagttgctcatcatggcttacgcactgaagactgcctgtgccaggaacattattggggtcatcccctacttcccctacagcaagcagagcaagatgaggaagaggggttccattgtgtgcaagctgctagcatccatgctggcgaaagcaggtttaactcacattatcactatggatcttcatcaaaaggaaatacaaggctttttcagctttcctgtggacaaccttagagcctcacctttcctgcttcagtatatccaggaagaaattccaaattacagaaatgcagtcattgtagctaagtctcctgatgctgcaaagagggcccagtcctatgcggagagactgcgtctgggtttggccgtcattcacggggaagctcagtgcacggaactggacatggacgatggtcgtcactccccgcctatggtcaaaaatgctactgtgcacccaggcctggagttgccattgatgatggccaaagagaagccaccgataactgtagttggagatgttggaggccgcatcgcaatcatcgtggatgacattattgacgatgtggagagttttgttgctgccgcggagatcctgaaagagagaggcgcctataagatctatgttatggccacccacggcatcctgtctgcagaggcccctcgcctgattgaggagtcctccgtagacgaggtggtggtgacgaatactgtccctcatgaggttcagaagctgcaatgtcccaagataaagactgtggatatcagtttgattctttctgaagccattcggagaatccacaatggagagtccatggcctaccttttccgaaacatcactgtggatgactagctttcacgagggtctcgaccctggacctcctgagggaaacatggaaaaagcagtgccatgagtgatacagtgtttccttgcaagggaggactcgaaacagcctggagttagatatcttcttttgcccggattgatggggaggagggattaaaagagtcaggaagaagacagagctaatggataaatatcataacatggccttacatgtctgctgtcatcagccctgttccttaaaagttctagctgctttcttaaaaataatctgaaaatcttattgatactaaagaggagttaaaggcacataaagtcttaactctataatgttcatttagttgtttcagctccagggaaatggaggtattgatgttgaacctggttagggaagctgagcgcctgtggccctattactatccagttggcctctcccaaatcaacttcaagtcttttatagagaatcgtatttttctttcagaaattgttatgcctacagccattgaaaaatgaagcattcatgttgttacatcttccaaggatgtcagattagaaaatagcatcccacctctgggtatctgagtggctctgaagttgcaaataaaataatttgttgt

SEQ ID NO: 22547 - DNA, 2213 bp, Homo sapiens
  source 1..2213: mol_type = unassigned DNA
aaaaagttggaaacacctggggccactaccgaggtaggctgctcctcccaagaaagtgagaccgaaagagctcccgtggaagcggtcaaagcaggggcggggcgaacctgtgacatgcccctcggaagaacaggcttttagagagtcgccaggctccctgccctcatccgagatggcggcctgagggcgctctagccgacgctcttcggatgcccggagggggcggtggccttgcctctggctctgaggcggcggcgccgggcgctgcgaaggctcggccgctgtagtcagtggtgtggggtgcgcaagggcacggacctcggagctctccccgcttgcgccgagtttctcagcgccttccccacccaaaccggggtctcgcagtcggaagcactcagagtgcagccccgcgcggggccggtcgtaaccgcgccgcgggccggacgatgcccaagaagctgctgctgttgcccccgccctccgcgtcctcggctttccgcgtcccgcgcgcccgccccgttcccccgccggccatgaacgccgctcgcaccggctaccgagtcttctcggccaactccacggccgcctgcacggagctggccaagcgcatcacagagcgccttggtgctgaattggggaagtctgttgtatatcaagagaccaatggagaaacaagagttgaaataaaagaatctgttcgtggccaagatattttcattatacagacaatacccagagatgtgaatacagctgtgatggagttgctcatcatggcttacgcactgaagactgcctgtgccaggaacattattggggtcatcccctacttcccctacagcaagcagagcaagatgaggaagaggggttccattgtgtgcaagctgctagcatccatgctggcgaaagcaggtttaactcacattatcactatggatcttcatcaaaaggaaatacaaggctttttcagctttcctgtggacaaccttagagcctcacctttcctgcttcagtatatccaggaagaaattccaaattacagaaatgcagtcattgtagctaagtctcctgatgctgcaaagagggcccagtcctatgcggagagactgcgtctgggtttggccgtcattcacggggaagctcagtgcacggaactggacatggacgatggtcgtcactccccgcctatggtcaaaaatgctactgtgcacccaggcctggagttgccattgatgatggccaaagagaagccaccgataactgtagttggagatgttggaggccgcatcgcaatcatcgtggatgacattattgacgatgtggagagttttgttgctgccgcggagatcctgaaagagagaggcgcctataagatctatgttatggccacccacggcatcctgtctgcagaggcccctcgcctgattgaggagtcctccgtagacgaggtggtggtgacgaatactgtccctcatgaggttcagaagctgcaatgtcccaagataaagactgtggatatcagtttgattctttctgaagccattcggagaatccacaatggagagtccatggcctaccttttccgaaacatcactgtggatgactagctttcacgagggtctcgaccctggacctcctgagggaaacatggaaaaagcagtgccatgagtgatacagtgtttccttgcaagggaggactcgaaacagcctggagttagatatcttcttttgcccggattgatggggaggagggattaaaagagtcaggaagaagacagagctaatggataaatatcataacatggccttacatgtctgctgtcatcagccctgttccttaaaagttctagctgctttcttaaaaataatctgaaaatcttattgatactaaagaggagttaaaggcacataaagtcttaactctataatgttcatttagttgtttcagctccagggaaatggaggtattgatgttgaacctggttagggaagctgagcgcctgtggccctattactatccagttggcctctcccaaatcaacttcaagtcttttatagagaatcgtatttttctttcagaaattgttatgcctacagccattgaaaaatgaagcattcatgttgttacatcttccaaggatgtcagattagaaaatagcatcccacctctgggtatctgagtggctctgaagttgcaaataaaataatttgttgtc

SEQ ID NO: 22548 - DNA, 1890 bp, Homo sapiens
  source 1..1890: mol_type = unassigned DNA
ctagagaggccgccaggagacccggcgctttcttccttctgcagctgaggctgcggcggggccggggctggggtcggggccaggaggaattttgttgtcagagaataaaaggaggttgtccataattgactttaagcagcaatcagtaaaacattgagctcttcagctccgcctttcttgctctgaaaattggaaaaccaagaaggttttgatgttttgtgtgacgccacctgaattagaaaccaagatgaacataaccaaaggtggtctggtgttgttttcagcaaactcgaattcatcatgtatggagctatcaaagaaaattgcagagcggctaggggtggagatgggcaaagtgcaggtttaccaggaacctaacagagaaacaagagtacaaattcaagagtctgtgaggggaaaagatgttttcatcatccaaactgtttcgaaggacgtgaacaccaccatcatggagctcctgatcatggtgtatgcatgtaagacctcttgtgccaagagcatcattggcgtgataccctactttccttacagcaagcagtgcaagatgagaaaaagaggctccattgtctctaaattgctggcttccatgatgtgcaaagctggtctaactcatcttattactatggatttacaccagaaggaaattcagggcttcttcaatattcctgttgacaatttaagagcatctcccttcttattacagtatattcaagaagagatcccagattacaggaatgcagtaatcgtggccaagtctccagcctcggcgaagagggcacagtcttttgctgagcgcctgcgcctgggaattgcagtgattcatggagaggcgcaggatgccgagtcggacttggtggatggacggcattccccacccatggtcagaagtgtggctgccatccaccccagcctggagatccccatgctgattcctaaagaaaagcccccaatcacggttgtgggtgatgttggaggaaggattgccatcatcgtggatgacatcattgatgatgttgacagctttcttgctgcagcagagaccctgaaggaaagaggtgcatataagatctttgtgatggcaactcatggcttgttgtcttctgacgccccccggcggattgaagagtctgccattgatgaggtggtggtcaccaatacaattccacatgaagtccagaagctccagtgccccaagattaaaactgtggatatcagcatgatcctttcagaggcgatccgtcggatccacaatggggagtccatgtcctaccttttcagaaacataggcttagatgactgagttttcctttaggaaaactcccgagggccaaactggaaacataagagtgactgctcggtgggatggatttcacaggaaccgtcatgcttgttcctccctctcccctgtaacctcacttcttattgattcctaagaagatagaccaactttttatgtcggtttgggtgtttgtgagtttggggagcaatttttataaaagaaaaactttattctcctcttttgaaaaggtaagacctcgttttagttgtaactgtttaaaaaataacacttggaataagatttgtaagctcacaaagccttcttccaaagttgcttgagccaagtgcttaaaaagttaataaaataaaatgatctgtatgatacctgcaattgaaaagccgaaaagattatactgtcaagtccagtaaatgacatttttagagatgcttttgtagacaagcatatggaatatgtgattgtatttattttctgcaactaaaaaaggaataaaaacttgtgtttgtgtgtttttctaaaactttgtgttttggcaatcgttttataactaaaataaaatgaaagctaaatct

SEQ ID NO: 22549 - DNA, 2092 bp, Homo sapiens
  source 1..2092: mol_type = unassigned DNA
gccagccacagcagagaggtgggggttgtgaccggagttagatgccagcgcagaagggacgtgagcccagccgaggtaccgctgaagaggaatcaattttggtatgcagataatcactgggctcatgggtcttgctctttacaaagagaattcagcggggtgccaagtcgttttctgtgtgggttgagagacaggctgtgcagcccactgttgcataggactaactactacaaatcatgctgagaccgagctatttttgctgcttagaggctttgcagccttgagaggaattttgttgtcagagaataaaaggaggttgtccataattgactttaagcagcaatcagtaaaacattgagctcttcagctccgcctttcttgctctgaaaattggaaaaccaagaaggttttgatgttttgtgtgacgccacctgaattagaaaccaagatgaacataaccaaaggtggtctggtgttgttttcagcaaactcgaattcatcatgtatggagctatcaaagaaaattgcagagcggctaggggtggagatgggcaaagtgcaggtttaccaggaacctaacagagaaacaagagtacaaattcaagagtctgtgaggggaaaagatgttttcatcatccaaactgtttcgaaggacgtgaacaccaccatcatggagctcctgatcatggtgtatgcatgtaagacctcttgtgccaagagcatcattggcgtgataccctactttccttacagcaagcagtgcaagatgagaaaaagaggctccattgtctctaaattgctggcttccatgatgtgcaaagctggtctaactcatcttattactatggatttacaccagaaggaaattcagggcttcttcaatattcctgttgacaatttaagagcatctcccttcttattacagtatattcaagaagagatcccagattacaggaatgcagtaatcgtggccaagtctccagcctcggcgaagagggcacagtcttttgctgagcgcctgcgcctgggaattgcagtgattcatggagaggcgcaggatgccgagtcggacttggtggatggacggcattccccacccatggtcagaagtgtggctgccatccaccccagcctggagatccccatgctgattcctaaagaaaagcccccaatcacggttgtgggtgatgttggaggaaggattgccatcatcgtggatgacatcattgatgatgttgacagctttcttgctgcagcagagaccctgaaggaaagaggtgcatataagatctttgtgatggcaactcatggcttgttgtcttctgacgccccccggcggattgaagagtctgccattgatgaggtggtggtcaccaatacaattccacatgaagtccagaagctccagtgccccaagattaaaactgtggatatcagcatgatcctttcagaggcgatccgtcggatccacaatggggagtccatgtcctaccttttcagaaacataggcttagatgactgagttttcctttaggaaaactcccgagggccaaactggaaacataagagtgactgctcggtgggatggatttcacaggaaccgtcatgcttgttcctccctctcccctgtaacctcacttcttattgattcctaagaagatagaccaactttttatgtcggtttgggtgtttgtgagtttggggagcaatttttataaaagaaaaactttattctcctcttttgaaaaggtaagacctcgttttagttgtaactgtttaaaaaataacacttggaataagatttgtaagctcacaaagccttcttccaaagttgcttgagccaagtgcttaaaaagttaataaaataaaatgatctgtatgatacctgcaattgaaaagccgaaaagattatactgtcaagtccagtaaatgacatttttagagatgcttttgtagacaagcatatggaatatgtgattgtatttattttctgcaactaaaaaaggaataaaaacttgtgtttgtgtgtttttctaaaactttgtgttttggcaatcgttttataactaaaataaaatgaaagctaaatcta

SEQ ID NO: 22550 - DNA, 968 bp, Homo sapiens
  source 1..968: mol_type = unassigned DNA
cgcagtcaccgcggacgccaatcttgtgcatggagtcgccattttgctcctagagaggccgccaggagacccggcgctttcttccttctgcagctgaggctgcggcggggccggggctggggtcggggccaggctctgaaaattggaaaaccaagaaggttttgatgttttgtgtgacgccacctgaattagaaaccaagatgaacataaccaaaggtggtctggtgttgttttcagcaaactcgaattcatcatgtatggagctatcaaagaaaattgcagagcggctaggggtggagatgggcaaagtgcaggtttaccaggaacctaacagagaaacaagagtacaaattcaagagtctgtgaggggaaaagatgttttcatcatccaaactgtttcgaaggacgtgaacaccaccatcatggagctcctgatcatggtgtatgcatgtaagacctcttgtgccaagagcatcattggcgtgataccctactttccttacagcaagcagtgcaagatgagaaaaagaggctccattgtctctaaattgctggcttccatgatgtgcaaagctggtctaactcatcttattactatggatttacaccagaaggaaattcagggcttcttcaatattcctgttgacaatttaagagcatctcccttcttattacagtatattcaagaagagatcccagattacaggaatgcagtaatcgtggccaagtctccagcctcggcgaagagggcacagtcttttgctgagcgcctgcgcctgggaattgcagtgattcatggagaggcgcaggatgccgagtcggacttggtggatggacggcattccccacccatggtcagaagtgtggctgccatccaccccagcctggagatccccatgctgattcctaaagaaaagcccccaatcacggttgtgggtgatgttggaggaaggattgccatcatcgtg

SEQ ID NO: 22551 - DNA, 787 bp, Homo sapiens
  source 1..787: mol_type = unassigned DNA
gccagccacagcagagaggtgggggttgtgaccggagttagatgccagcgcagaagggacgtgagcccagccgaggaggaattttgttgtcagagaataaaaggaggttgtccataattgactttaagcagcaatcagtaaaacattgagctcttcagctccgcctttcttgctctgaaaattggaaaaccaagaaggttttgatgttttgtgtgacgccacctgaattagaaaccaagatgaacataaccaaaggtggtctggtgttgttttcagcaaactcgaattcatcatgtatggagctatcaaagaaaattgcagagcggctaggggtggagatgggcaaagtgcaggtttaccaggaacctaacagagaaacaagagtacaaattcaagagtctgtgaggggaaaagatgttttcatcatccaaactgtttcgaaggacgtgaacaccaccatcatggagctcctgatcatggtgtatgcatgtaagacctcttgtgccaagagcatcattggcgtgataccctactttccttacagcaagcagtgcaagatgagaaaaagaggctccattgtctctaaattgctggcttccatgatgtgcaaagctggtctaactcatcttattactatggatttacaccagaaggaaattcagggcttcttcaatattcctgttgacaatttaagagcatctcccttcttattacagtatattcaagaagagatcccagattacaggaatgcagtaatcgtggccaagtctccagcctcggcgaagag

SEQ ID NO: 22552 - DNA, 1491 bp, Homo sapiens
  source 1..1491: mol_type = unassigned DNA
gttgtgaccggagttagatgccagcgcagaagggacgtgagcccagccgaggtaccgctgaagaggaatcaattttggaggaattttgttgtcagagaataaaaggaggttgtccataattgactttaagcagcaatcagtaaaacattgagctcttcagctccgcctttcttgctctgaaaattggaaaaccaagaaggttttgatgttttgtgtgacgccacctgaattagaaaccaagatgaacataaccaaaggtggtctggtgttgttttcagcaaactcgaattcatcatgtatggagctatcaaagaaaattgcagaggacgtgaacaccaccatcatggagctcctgatcatggtgtatgcatgtaagacctcttgtgccaagagcatcattggcgtgataccctactttccttacagcaagcagtgcaagatgagaaaaagaggctccattgtctctaaattgctggcttccatgatgtgcaaagctggtctaactcatcttattactatggatttacaccagaaggaaattcagggcttcttcaatattcctgttgacaatttaagagcatctcccttcttattacagtatattcaagaagagatcccagattacaggaatgcagtaatcgtggccaagtctccagcctcggcgaagagggcacagtcttttgctgagcgcctgcgcctgggaattgcagtgattcatggagaggcgcaggatgccgagtcggacttggtggatggacggcattccccacccatggtcagaagtgtggctgccatccaccccagcctggagatccccatgctgattcctaaagaaaagcccccaatcacggttgtgggtgatgttggaggaaggattgccatcatcgtggatgacatcattgatgatgttgacagctttcttgctgcagcagagaccctgaaggaaagaggtgcatataagatctttgtgatggcaactcatggcttgttgtcttctgacgccccccggcggattgaagagtctgccattgatgaggtggtggtcaccaatacaattccacatgaagtccagaagctccagtgccccaagattaaaactgtggatatcagcatgatcctttcagaggcgatccgtcggatccacaatggggagtccatgtcctaccttttcagaaacataggcttagatgactgagttttcctttaggaaaactcccgagggccaaactggaaacataagagtgactgctcggtgggatggatttcacaggaaccgtcatgcttgttcctccctctcccctgtaacctcacttcttattgattcctaagaagatagaccaactttttatgtcggtttgggtgtttgtgagtttggggagcaatttttataaaagaaaaactttattctcctcttttgaaaaggtaagacctcgttttagttgtaactgtttaaaaaataacacttggaataagatttgtaagctcacaaag

SEQ ID NO: 22553 - DNA, 883 bp, Homo sapiens
  source 1..883: mol_type = unassigned DNA
ttttgctcctagagaggccgccaggagacccggcgctttcttccttctgcagctgaggctgcggcggggccggggctggggtcggggccagaattcagcggggtgccaagtcgttttctgtgtgggttgagagacaggctgtgcagcccactgttgcataggactaactactacaaatcatgctgagaccgagctatttttgctgcttagaggctttgcagccttgagaggaattttgttgtcagagaataaaaggaggttgtccataattgactttaagcagcaatcagtaaaacattgagctcttcagctccgcctttcttgctctgaaaattggaaaaccaagaaggttttgatgttttgtgtgacgccacctgaattagaaaccaagatgaacataaccaaaggtggtctggtgttgttttcagcaaactcgaattcatcatgtatggagctatcaaagaaaattgcagagcggctaggggtggagatgggcaaagtgcaggtttaccaggaacctaacagagaaacaagagtacaaattcaagagtctgtgaggggaaaagatgttttcatcatccaaactgtttcgaaggacgtgaacaccaccatcatggagctcctgatcatggtgtatgcatgtaagacctcttgtgccaagagcatcattggcgtgataccctactttccttacagcaagcagtgcaagatgagaaaaagaggctccattgtctctaaattgctggcttccatgatgtgcaaagctggtctaactcatcttattactatggatttacaccagaaggaaattcagggcttcttcaatattcctgttgacaatttaagagcatctcccttcttattacagtatattcaagaagag

SEQ ID NO: 22554 - DNA, 1038 bp, Homo sapiens
  source 1..1038: mol_type = unassigned DNA
agtctctgctgcctggaccttaaattctgatggggaaatctttttaccaaggttatatctcttgtctggaaggtaaaggctgaggcccagcaaggacaagtgatgtccacatggcctagtagctggaaggcaaacccaactcttcacactcctacttcagccatctttaagtagaaggaggaattttgttgtcagagaataaaaggaggttgtccataattgactttaagcagcaatcagtaaaacattgagctcttcagctccgcctttcttgctctgaaaattggaaaaccaagaaggttttgatgttttgtgtgacgccacctgaattagaaaccaagatgaacataaccaaaggtggtctggtgttgttttcagcaaactcgaattcatcatgtatggagctatcaaagaaaattgcagagcggctaggggtggagatgggcaaagtgcaggtttaccaggaacctaacagagaaacaagagtacaaattcaagagtctgtgaggggaaaagatgttttcatcatccaaactgtttcgaaggacgtgaacaccaccatcatggagctcctgatcatggtgtatgcatgtaagacctcttgtgccaagagcatcattggcgtgataccctactttccttacagcaagcagtgcaagatgagaaaaagaggctccattgtctctaaattgctggcttccatgatgtgcaaagctggtctaactcatcttattactatggatttacaccagaaggaaattcagggcttcttcaatattcctgttgacaatttaagagcatctcccttcttattacagtatattcaagaagagatcccagattacaggaatgcagtaatcgtggccaagtctccagcctcggcgaagagggcacagtcttttgctgagcgcctgcgcctgggaattgcagtgattcatggagaggcgcaggatgccgagtcggacttggtggatggacggcattccccacccatggtcagaagtgtggctgccatccaccccagcctggagatcccca

SEQ ID NO: 22555 - DNA, 325 bp, Homo sapiens
  source 1..325: mol_type = unassigned DNA
aagaggaatcaattttggtatgcagataatcactgggctcatgggtcttgctctttacaaagaggaggaattttgttgtcagagaataaaaggaggttgtccataattgactttaagcagcaatcagtaaaacattgagctcttcagctccgcctttcttgctctgaaaattggaaaaccaagaaggttttgatgttttgtgtgacgccacctgaattagaaaccaagatgaacataaccaaaggtggtctggtgttgttttcagcaaactcgaattcatcatgtatggagctatcaaagaaaattgcagagcggctaggggtgg

SEQ ID NO: 22556 - DNA, 931 bp, Homo sapiens
  source 1..931: mol_type = unassigned DNA
aagggacgtgagcccagccgaggtaccgctgaagaggaatcaattttggtatgcagataatcactgggctcatgggtcttgctctttacaaagaggctctgaaaattggaaaaccaagaaggttttgatgttttgtgtgacgccacctgaattagaaaccaagatgaacataaccaaaggtggtctggtgttgttttcagcaaactcgaattcatcatgtatggagctatcaaagaaaattgcagagcggctaggggtggagatgggcaaagtgcaggtttaccaggaacctaacagagaaacaagagtacaaattcaagagtctgtgaggggaaaagatgttttcatcatccaaactgtttcgaaggacgtgaacaccaccatcatggagctcctgatcatggtgtatgcatgtaagacctcttgtgccaagagcatcattggcgtgataccctactttccttacagcaagcagtgcaagatgagaaaaagaggctccattgtctctaaattgctggcttccatgatgtgcaaagctggtctaactcatcttattactatggatttacaccagaaggaaattcagggcttcttcaatattcctgttgacaatttaagagcatctcccttcttattacagtatattcaagaagagatcccagattacaggaatgcagtaatcgtggccaagtctccagcctcggcgaagagggcacagtcttttgctgagcgcctgcgcctgggaattgcagtgattcatggagaggcgcaggatgccgagtcggacttggtggatggacggcattccccacccatggtcagaagtgtggctgccatccaccccagcctggagatccccatgctgattcctaaagaaaagcccccaatcacggttgtgggtgatgttggaggaaggattgccatcatcgtg

SEQ ID NO: 22557 - DNA, 700 bp, Homo sapiens
  source 1..700: mol_type = unassigned DNA
atctacatgaagaattacagcaagacatgcaaaagtttaagaatgaggtcaacacattagaagaagagttcctggctttgaagaaagaaaatgttcaacttcataaagaggttgaagaagaaatggagaagcacagaagtaatagcacagaattatcaggaaccctaactgatggtactactgttggcaatgatgatgatggactaaatcagcagattcctaggaaggaaaatgaagagcatgacaggctctgaaaattggaaaaccaagaaggttttgatgttttgtgtgacgccacctgaattagaaaccaagatgaacataaccaaaggtggtctggtgttgttttcagcaaactcgaattcatcatgtatggagctatcaaagaaaattgcagagcggctaggggtggagatgggcaaagtgcaggtttaccaggaacctaacagagaaacaagagtacaaattcaagagtctgtgaggggaaaagatgttttcatcatccaaactgtttcgaaggacgtgaacaccaccatcatggagctcctgatcatggtgtatgcatgtaagacctcttgtgccaagagcatcattggcgtgataccctactttccttacagcaagcagtgcaagatgagaaaaagaggctccattgtctctaaattgctggcttccatgatgtgcaaagctggtctaactc

SEQ ID NO: 22558 - DNA, 1087 bp, Homo sapiens
  source 1..1087: mol_type = unassigned DNA
cgcccctccccgcccaccggcctcgcagtcaccgcggacgccaatcttgtgcatggagtcgccattttgctcctagagaggccgccaggagacccggcgctttcttccttctgcagctgaggctgcggcggggccggggctggggtcggggccaggaggaattttgttgtcagagaataaaaggaggttgtccataattgactttaagcagcaatcagtaaaacattgagctcttcagctccgcctttcttgctctgaaaattggaaaaccaagaaggttttgatgttttgtgtgacgccacctgaattagaaaccaagatgaacataaccaaaggtggtctggtgttgttttcagcaaactcgaattcatcatgtatggagctatcaaagaaaattgcagagcggctaggggtggagatgggcaaagtgcaggtttaccaggaacctaacagagaaacaagagtacaaattcaagagtctgtgaggggaaaagatgttttcatcatccaaactgtttcgaaggacgtgaacaccaccatcatggagctcctgatcatggtgtatgcatgtaagacctcttgtgccaagagcatcattggcgtgataccctactttccttacagcaagcagtgcaagatgagaaaaagaggctccattgtctctaaattgctggcttccatgatgtgcaaagctggtctaactcatcttattactatggatttacaccagaaggaaattcagggcttcttcaatattcctgttgacaatttaagagcatctcccttcttattacagtatattcaagaagagatcccagattacaggaatgcagtaatcgtggccaagtctccagcctcggcgaagagggcacagtcttttgctgagcgcctgcgcctgggaattgcagtgattcatggagaggcgcaggatgccgagtcggacttggtggatggacggcattccccacccatggtcagaagtgtggctgccatccaccccagcctggagatccccatgctgattcctaaagaaaagcccccaatcacggttgtgggtgatgttggaggaaggattgccatcatcgtg

SEQ ID NO: 22559 - DNA, 1494 bp, Homo sapiens
  source 1..1494: mol_type = unassigned DNA
agaggccgccaggagacccggcgctttcttccttctgcagctgaggctgcggcggggccggggctggggtcggggccaggctctgaaaattggaaaaccaagaaggttttgatgttttgtgtgacgccacctgaattagaaaccaagatgaacataaccaaaggtggtctggtgttgttttcagcaaactcgaattcatcatgtatggagctatcaaagaaaattgcagaaaacaagagtacaaattcaagagtctgtgaggggaaaagatgttttcatcatccaaactgtttcgaaggacgtgaacaccaccatcatggagctcctgatcatggtgtatgcatgtaagacctcttgtgccaagagcatcattggcgtgataccctactttccttacagcaagcagtgcaagatgagaaaaagaggctccattgtctctaaattgctggcttccatgatgtgcaaagctggtctaactcatcttattactatggatttacaccagaaggaaattcagggcttcttcaatattcctgttgacaatttaagagcatctcccttcttattacagtatattcaagaagagatcccagattacaggaatgcagtaatcgtggccaagtctccagcctcggcgaagagggcacagtcttttgctgagcgcctgcgcctgggaattgcagtgattcatggagaggcgcaggatgccgagtcggacttggtggatggacggcattccccacccatggtcagaagtgtggctgccatccaccccagcctggagatccccatgctgattcctaaagaaaagcccccaatcacggttgtgggtgatgttggaggaaggattgccatcatcgtggatgacatcattgatgatgttgacagctttcttgctgcagcagagaccctgaaggaaagaggtgcatataagatctttgtgatggcaactcatggcttgttgtcttctgacgccccccggcggattgaagagtctgccattgatgaggtggtggtcaccaatacaattccacatgaagtccagaagctccagtgccccaagattaaaactgtggatatcagcatgatcctttcagaggcgatccgtcggatccacaatggggagtccatgtcctaccttttcagaaacataggcttagatgactgagttttcctttaggaaaactcccgagggccaaactggaaacataagagtgactgctcggtgggatggatttcacaggaaccgtcatgcttgttcctccctctcccctgtaacctcacttcttattgattcctaagaagatagaccaactttttatgtcggtttgggtgtttgtgagtttggggagcaatttttataaaagaaaaactttattctcctcttttgaaaaggtaagacctcgttttagttgtaactgtttaaaaaataacacttggaataagatttgtaagctcacaaagccttcttccaaagttgcttgagccaagtgc

SEQ ID NO: 22560 - DNA, 1047 bp, Homo sapiens
  source 1..1047: mol_type = unassigned DNA
cagctccgcctttcttgctctgaaaattggaaaaccaagaaggttttgatgttttgtgtgacgccacctgaattagaaaccaagatgaacataaccaaaggtggtctggtgttgttttcagcaaactcgaattcatcatgtatggagctatcaaagaaaattgcagagcggctaggggtggagatgggcaaagtgcaggtttaccaggaacctaacagagaaacaagagtacaaattcaagagtctgtgaggggaaaagatgttttcatcatccaaactgtttcgaaggacgtgaacaccaccatcatggagctcctgatcatggtgtatgcatgtaagacctcttgtgccaagagcatcattggcgtgataccctactttccttacagcaagcagtgcaagatgagaaaaagaggctccattgtctctaaattgctggcttccatgatgtgcaaagctggtctaactcatcttattactatggatttacaccagaaggaaattcagggcttcttcaatattcctgttgacaatttaagagcatctcccttcttattacagtatattcaagaagagatcccagattacaggaatgcagtaatcgtggccaagtctccagcctcggcgaagagggcacagtcttttgctgagcgcctgcgcctgggaattgcagtgattcatggagaggcgcaggatgccgagtcggacttggtggatggacggcattccccacccatggtcagaagtgtggctgccatccaccccagcctggagatccccatgctgattcctaaagaaaagcccccaatcacggttgtgggtgatgttggaggaaggattgccatcatcgtggtggtggtcaccaatacaattccacatgaagtccagaagctccagtgccccaagattaaaactgtggatatcagcatgatcctttcagaggcgatccgtcggatccacaatggggagtccatgtcctaccttttcagaaacataggcttagatgactgagttttcctttaggaaaactcccgagggccaaactgg

SEQ ID NO: 22561 - DNA, 1835 bp, Homo sapiens
  source 1..1835: mol_type = unassigned DNA
ggggttgtgaccggagttagatgccagcgcagaagggacgtgagcccagccgaggtaccgctgaagaggaatcaattttggaggaattttgttgtcagagaataaaaggaggttgtccataattgactttaagcagcaatcagtaaaacattgagctcttcagctccgcctttcttgctctgaaaattggaaaaccaagaaggttttgatgttttgtgtgacgccacctgaattagaaaccaagatgaacataaccaaaggtggtctggtgttgttttcagcaaactcgaattcatcatgtatggagctatcaaagaaaattgcagaaaacaagagtacaaattcaagagtctgtgaggggaaaagatgttttcatcatccaaactgtttcgaaggacgtgaacaccaccatcatggagctcctgatcatggtgtatgcatgtaagacctcttgtgccaagagcatcattggcgtgataccctactttccttacagcaagcagtgcaagatgagaaaaagaggctccattgtctctaaattgctggcttccatgatgtgcaaagctggtctaactcatcttattactatggatttacaccagaaggaaattcagggcttcttcaatattcctgttgacaatttaagagcatctcccttcttattacagtatattcaagaagagatcccagattacaggaatgcagtaatcgtggccaagtctccagcctcggcgaagagggcacagtcttttgctgagcgcctgcgcctgggaattgcagtgattcatggagaggcgcaggatgccgagtcggacttggtggatggacggcattccccacccatggtcagaagtgtggctgccatccaccccagcctggagatccccatgctgattcctaaagaaaagcccccaatcacggttgtgggtgatgttggaggaaggattgccatcatcgtggatgacatcattgatgatgttgacagctttcttgctgcagcagagaccctgaaggaaagaggtgcatataagatctttgtgatggcaactcatggcttgttgtcttctgacgccccccggcggattgaagagtctgccattgatgaggtggtggtcaccaatacaattccacatgaagtccagaagctccagtgccccaagattaaaactgtggatatcagcatgatcctttcagaggcgatccgtcggatccacaatggggagtccatgtcctaccttttcagaaacataggcttagatgactgagttttcctttaggaaaactcccgagggccaaactggaaacataagagtgactgctcggtgggatggatttcacaggaaccgtcatgcttgttcctccctctcccctgtaacctcacttcttattgattcctaagaagatagaccaactttttatgtcggtttgggtgtttgtgagtttggggagcaatttttataaaagaaaaactttattctcctcttttgaaaaggtaagacctcgttttagttgtaactgtttaaaaaataacacttggaataagatttgtaagctcacaaagccttcttccaaagttgcttgagccaagtgcttaaaaagttaataaaataaaatgatctgtatgatacctgcaattgaaaagccgaaaagattatactgtcaagtccagtaaatgacatttttagagatgcttttgtagacaagcatatggaatatgtgattgtatttattttctgcaactaaaaaaggaataaaaacttgtgtttgtgtgtttttctaaaactttgtgttttggcaatcgttttataactaaaataaaatgaaagctaaatcta

SEQ ID NO: 22562 - DNA, 1926 bp, Homo sapiens
  source 1..1926: mol_type = unassigned DNA
cttcccttcccgcgttccccgggagaaacatggccgggagcagcgaggaggcgccagactacgggcgaggcgtcgtgattatggatgattggccagggtatgacttgaatttattcacgtacccacagcactattatggagacttggagtatgtcctcatccctcatggtatcattgtggacagaattgagcggctggccaaggatattatgaaagacataggatatagtgacatcatggtcctgtgtgtgcttaaaggaggttacaaattctgtgctgatctcgtagaacaccttaagaacatcagccgaaattcagatcgatttgtctcaatgaaggttgatttcatcagactaaaaagttacaggaatgaccagtccatgggtgagatgcagataatcggaggcgatgatctttcaacgctggctggaaagaatgttctcattgttgaggatgttgtcggaactgggaggaccatgaaagcactactcagcaatatagagaaatacaagcccaacatgattaaggtagccagtttgttggtgaagagaacatccagaagtgacggctttagacctgactatgctggatttgagattccaaacttatttgtggtgggatatgccttagattacaatgaatacttcagagatctgaatcacatatgcgtcatcaatgagcacggtaaagaaaaatatcgagtctaaagacatgaattctcaccactaaagtcccagatagcatcatatttacgcctgtacttgggaagccagctgtcaagtttgtccccccaggcatcttcactcagcaggatataaaagaaaaaaatgttcaaatgagagagctttcttttctgaggttaatataaagagtatcaaaggttcctaaggaaaagaaagcagtgcttttatttgacttgttccaaattaaacactccgccttgtgactcagcaatgctatctaccttcacactcctgagctccgccttcctttgttttgatacagtcattatatttgattagtattcccaggaatacccccacctagttactcaaatatttttcacttaactttttatactcttattttggtaataagcttacaatattaagaagctggggacttttttttaactgaagacttgagtcccctataccgggaatgcagctattaatagattcccatattttaaaaggagggaaaggacaatttaatataaatttctgtttgtgcatttctgacaggccattattatctgctttgacaaagcctttctgaaacgcagtgtacaatgaatcttaatgatgttatgaaacgagctttgctcggggctcttgattggagcttccggtatgtgatgacggtatgtcatgtatgcatggatgtactcaactgtgtttaatactctgaattttaattagaaaaaaatacaatagcagcaaggccctggtttctaagctgtatccttttattcatgtgggacatgagcaaatggcagaattaggggcgagtgctttcaatgctcgaaactaagcaagtataaatttttcctcttatttgcatgaaaggacaagacactgttatgccctgtcctaaatgtgaagacagaggttgaattttttaaaaaatatctttaaaagactgatcacaaaatccaaggtgctacaggaaacaagcacactcaagaaagtttttttctgaataacatttttttccaatttctccgttttataagacatttcctaatttatggggattttaattgaaaataaacttgagtcccaatagagctgtttttttctcacttcctacaaaatgcaaatgcaaaataaataactaagcagcttttgtttggttctgaaccgtatgtggcgtattgttattaggttctagcttcctttaaactaataaagaataagaaaactt

SEQ ID NO: 22563 - DNA, 1849 bp, Homo sapiens
  source 1..1849: mol_type = unassigned DNA
cttcccttcccgcgttccccgggagaaacatggccgggagcagcgaggaggcgccagactacgggcgaggcgtcgtgattatggatgattggccagggtatgacttgaatttattcacgtacccacagcactattatggagacttggagtatgtcctcatccctcatggtatcattgtggacagaattgagcggctggccaaggatattatgaaagacataggatatagtgacatcatggtcctgtgtgtgcttaaaggaggttacaaattctgtgctgatctcgtagaacaccttaagaacatcagccgaaattcagatcgatttgtctcaatgaaggttgatttcatcagactaaaaagttacaggaatgaccagtccatgggtgagatgcagataatcggaggcgatgatctttcaacgctggctggaaagtctgtcctttttgcaaaggatgttgtcggaactgggaggaccatgaaagcactactcagcaatatagagaaatacaagcccaacatgattaaggtagccagtttgttggtgaagagaacatccagaagtgacggctttagacctgactcacatatgcgtcatcaatgagcacggtaaagaaaaatatcgagtctaaagacatgaattctcaccactaaagtcccagatagcatcatatttacgcctgtacttgggaagccagctgtcaagtttgtccccccaggcatcttcactcagcaggatataaaagaaaaaaatgttcaaatgagagagctttcttttctgaggttaatataaagagtatcaaaggttcctaaggaaaagaaagcagtgcttttatttgacttgttccaaattaaacactccgccttgtgactcagcaatgctatctaccttcacactcctgagctccgccttcctttgttttgatacagtcattatatttgattagtattcccaggaatacccccacctagttactcaaatatttttcacttaactttttatactcttattttggtaataagcttacaatattaagaagctggggacttttttttaactgaagacttgagtcccctataccgggaatgcagctattaatagattcccatattttaaaaggagggaaaggacaatttaatataaatttctgtttgtgcatttctgacaggccattattatctgctttgacaaagcctttctgaaacgcagtgtacaatgaatcttaatgatgttatgaaacgagctttgctcggggctcttgattggagcttccggtatgtgatgacggtatgtcatgtatgcatggatgtactcaactgtgtttaatactctgaattttaattagaaaaaaatacaatagcagcaaggccctggtttctaagctgtatccttttattcatgtgggacatgagcaaatggcagaattaggggcgagtgctttcaatgctcgaaactaagcaagtataaatttttcctcttatttgcatgaaaggacaagacactgttatgccctgtcctaaatgtgaagacagaggttgaattttttaaaaaatatctttaaaagactgatcacaaaatccaaggtgctacaggaaacaagcacactcaagaaagtttttttctgaataacatttttttccaatttctccgttttataagacatttcctaatttatggggattttaattgaaaataaacttgagtcccaatagagctgtttttttctcacttcctacaaaatgcaaatgcaaaataaataactaagcagcttttgtttggttctgaaccgtatgtggcgtattgttattaggttctagcttcctttaaactaataaagaataagaaaactt

SEQ ID NO: 22564 - DNA, 741 bp, Homo sapiens
  source 1..741: mol_type = unassigned DNA
cgttccccgggagaaacatggccgggagcagcgaggaggcgccagactacgggcgaggcgtcgtgattatggatgattggccagggtatgacttgaatttattcacgtacccacagcactattatggagacttggagtatgtcctcatccctcatggtatcattgtggacagaattgagcggctggccaaggatattatgaaagacataggatatagtgacatcatggtcctgtgtgtgcttaaaggaggttacaaattctgtgctgatctcgtagaacaccttaagaacatcagccgaaattcagatcgatttgtctcaatgaaggttgatttcatcagactaaaaagttacaggctgcgtgctcggttgaagaggacaaccatctgtgatagaggaggactggccttcagtcaagggtatatgagtagctgtgctcccctgcaagaatctccaaataccctctggagaggttacctccaagtgctcattccctgtttccacatccggtttcagttaccaagatcagagcagaattaggtctgagatccagtgaggtgtacagtagcacctggaccattctagggctcactgtcttcaagccctggctgtgcccacagtcttcatgaagaaactggacactgtgtctgctggatgatgtatttcttcttgcttgaggttatgaaaaatatcaaaatatgtaaagaaacatgctggataaaaatattgccttgaaatacaa

SEQ ID NO: 22565 - DNA, 747 bp, Homo sapiens
  source 1..747: mol_type = unassigned DNA
gggagaaacatggccgggagcagcgaggaggcgccagactacgggcgaggcgtcgtgattatggatgattggccagggtatgacttgaatttattcacgtacccacagcactattatggagacttggagtatgtcctcatccctcatggtatcattgtggacagaattgagcggctggccaaggatattatgaaagacataggatatagtgacatcatggtcctgtgtgtgcttaaaggaggttacaaattctgtgctgatctcgtagaacaccttaagaacatcagccgaaattcagatcgatttgtctcaatgaaggttgatttcatcagactaaaaagttacaggaatgaccagtccatgggtgagatgcagataatcggaggcgatgatctttcaacgctggctggaaagaatgttctcattgttgaggatgttgtcggaactgggaggaccatgaaagcactactcagcaatatagagaaatacaagcccaacatgattaaggtagccagtttgttggtgaagagaacatccagaagtgacggctttagacctgactcacatatgcgtcatcaatgagcacggtaaagaaaaatatcgagtctaaagacatgaattctcaccactaaagtcccagatagcatcatatttacgcctgtacttgggaagccagctgtcaagtttgtccccccaggcatcttcactcagcaggatataaaagaaaaaaatgttcaaatgagagag

SEQ ID NO: 22566 - DNA, 3297 bp, Homo sapiens
  source 1..3297: mol_type = unassigned DNA
agtctccgcccatacccctccgggttaggcggctgtagcggagctcgaaaagagtggcgcagggtcgcgcggccccgcctccttccccgcccagcgaagctctctgaccacccctcttttctagagttctgcctcgcttcccggcgcggtcgcagccctcagcccacttaggataatggcgacagctgaggtactgaacattggtaaaaaattatatgagggtaaaacaaaagaagtctacgaattgttagacagtccaggaaaagtcctcctgcagtccaaggaccagattacagcaggaaatgcagctagaaaaaaccacctggaaggaaaagctgcaatctcaaataaaatcaccagttgtatttttcagttattacaggaagcagttacctcatataagtcaaatcgtattaaaactgccttcaccagaaaatgtggggagacagctttcattgcaccgcagtgtgaaatgattccaattgaatgggtttgcagaagaatagcaactggttcttttctcaaaagaaatcctggtgtcaaggaaggatataagttttacccacctaaagtggagttgtttttcaaggatgatgccaataatgacccacagtggtctgaggaacagctgattgctgcaaaattttgctttgctggacttcttataggccagactgaagtggatatcatgagtcatgctacacaggctatatttgaaatactggagaaatcctggttgccccagaattgtacactggttgatatgaagattgaatttggtgttgatgtaaccaccaaagaaattgttcttgctgatgttattgacaatgattcctggagactctggccatcaggagatcgaagccaacagaaagacaaacagtcttatcgggacctcaaagaagtaactcctgaagggctccaaatggtaaagaaaaactttgagtgggttgcagagagagtagagttgcttttgaaatcagaaagtcagtgcagggttgtagtgttgatgggctctacttctgatcttggtcactgtgaaaaaatcaagaaggcctgtggaaattttggcattccatgtgaacttcgagtaacatctgcgcataaaggaccagatgaaactctgaggattaaagctgagtatgaaggggatggcattcctactgtatttgtggcagtggcaggcagaagtaatggtttgggaccagtgatgtctgggaacactgcatatccagttatcagctgtcctcccctcacaccagactggggagttcaggatgtgtggtcttctcttcgactacccagtggtcttggctgttcaaccgtactttctccagaaggatcagctcaatttgctgctcagatatttgggttaagcaaccatttggtatggagcaaactgcgagcaagcattttgaacacatggatttccttgaagcaggctgacaagaaaatcagagaatgtaatttataagaaagaatgccattgaattttttaggggaaaaactacaaatttctaatttagctgaaggaaaatcaagcaagatgaaaaggtaattttaaattagagaacacaaataaaatgtattagtgaataaatgcttctctagatccatattaataaacatgagcatctaacccctcctttcttaggctagacaccaagatatttcagccagcctttatcattcctcttactttatcctttttccttaagtattggtggtcactactattgagtttcttccttaacactgattaaatgatcttaactccctcagctaaaactggcattactgactcccagctatatttctccagacttgcatttttttttttttttttgagacagggtctcactgtcgcccaggctggagtgcagtggcgtgatctcagttcactgctgctttccctcctgggctcaagcagttctcccacctcagcctctcgactaacagggactataatcttgcagcaccatgccgagctaattttattttttgtagagatgagctctcactatgtcacccaggttcgtctcaaactcctgaaccctagtaattctcctatctcagcctcccaaagtgctagggttacagacatgagccactgtgcctgtctagacttgtactttcaactgtccatttctccctgtctgtcccatgggcactcatgaaaaaacagaatgctcccaactttattcatcttccaagcctgtagctcttggtatactcactgttgcaagtcagaagcttgatttcatcattgatgtttttctcacgtttcacatctcactcatcaccaagtcatgttggtgttaatttctgattaacccttgaatttaccgtcttctcatcctctgtacaaaagcctcaagtgagggtcaaattcaacattatcctgatctagacagcccccattctcaatccacccttttccaagttgattgcccaaggacttctaacaataaactctcttttgcaccacagacttctttgaaaatatacatgctgttgaccctctctgtagaaaaccgcacacataaaacttaccaacagatttcattggttcttgggttctcccgaagcctatccatggtttatagattaagaattgatgaggtagctgggcacagtggctcacacctacgatcacagcacttcgggaggctgaagcaagcagatcacttgaggtcaggagtttgagaccagcctggccaacatggtgaaaccctgtctctactaaaaatacaaaaagtagccagccgtgatgacaggcacctgtaatcccagctactcgggaggctgaggcatgagaattgcttgaacccgggaggcggaggttgcagtgagcctagatcatgccactgcactccaacctgggcagcagagcaagactctgtctcaaaaggggaaaaaaaaaattgctgatgtgacccatgaagggaactcattttcctcgtaattttggactgccacacattggtacctttagttctctgaaggcccacgtttttatcattaagacctatttgttagctagtagagctttatgttcgctgtccatgaaaccttctgtaaccacagtgactacaagtagttctttctctattgaattattaggtccagaatagaagatgtcattgtacactttatttccctcacactgtgttatgctctgatgtgctatgcttagctatctgtcagagattagtaaattataaaactcatgtgtactacttaagtttatatcttatgctagtttataagaacaattaaaaggacttagaagattaa

SEQ ID NO: 22567 - DNA, 3339 bp, Homo sapiens
  source 1..3339: mol_type = unassigned DNA
gctagccttcccctaagagctgcctggaaagctgtatttgctgcacgtggaaatctccgttattttccagcacccaacagtagcgtaatgggagtaacggacttaacctcatttctctttcagagcatttagccttcatatgcccttccctgcatgcttcccccaggccgtcaagacttgagttctgcctcgcttcccggcgcggtcgcagccctcagcccacttaggataatggcgacagctgaggtactgaacattggtaaaaaattatatgagggtaaaacaaaagaagtctacgaattgttagacagtccaggaaaagtcctcctgcagtccaaggaccagattacagcaggaaatgcagctagaaaaaaccacctggaaggaaaagctgcaatctcaaataaaatcaccagttgtatttttcagttattacaggaagcaggtattaaaactgccttcaccagaaaatgtggggagacagctttcattgcaccgcagtgtgaaatgattccaattgaatgggtttgcagaagaatagcaactggttcttttctcaaaagaaatcctggtgtcaaggaaggatataagttttacccacctaaagtggagttgtttttcaaggatgatgccaataatgacccacagtggtctgaggaacagctgattgctgcaaaattttgctttgctggacttcttataggccagactgaagtggatatcatgagtcatgctacacaggctatatttgaaatactggagaaatcctggttgccccagaattgtacactggttgatatgaagattgaatttggtgttgatgtaaccaccaaagaaattgttcttgctgatgttattgacaatgattcctggagactctggccatcaggagatcgaagccaacagaaagacaaacagtcttatcgggacctcaaagaagtaactcctgaagggctccaaatggtaaagaaaaactttgagtgggttgcagagagagtagagttgcttttgaaatcagaaagtcagtgcagggttgtagtgttgatgggctctacttctgatcttggtcactgtgaaaaaatcaagaaggcctgtggaaattttggcattccatgtgaacttcgagtaacatctgcgcataaaggaccagatgaaactctgaggattaaagctgagtatgaaggggatggcattcctactgtatttgtggcagtggcaggcagaagtaatggtttgggaccagtgatgtctgggaacactgcatatccagttatcagctgtcctcccctcacaccagactggggagttcaggatgtgtggtcttctcttcgactacccagtggtcttggctgttcaaccgtactttctccagaaggatcagctcaatttgctgctcagatatttgggttaagcaaccatttggtatggagcaaactgcgagcaagcattttgaacacatggatttccttgaagcaggctgacaagaaaatcagagaatgtaatttataagaaagaatgccattgaattttttaggggaaaaactacaaatttctaatttagctgaaggaaaatcaagcaagatgaaaaggtaattttaaattagagaacacaaataaaatgtattagtgaataaatgcttctctagatccatattaataaacatgagcatctaacccctcctttcttaggctagacaccaagatatttcagccagcctttatcattcctcttactttatcctttttccttaagtattggtggtcactactattgagtttcttccttaacactgattaaatgatcttaactccctcagctaaaactggcattactgactcccagctatatttctccagacttgcatttttttttttttttttgagacagggtctcactgtcgcccaggctggagtgcagtggcgtgatctcagttcactgctgctttccctcctgggctcaagcagttctcccacctcagcctctcgactaacagggactataatcttgcagcaccatgccgagctaattttattttttgtagagatgagctctcactatgtcacccaggttcgtctcaaactcctgaaccctagtaattctcctatctcagcctcccaaagtgctagggttacagacatgagccactgtgcctgtctagacttgtactttcaactgtccatttctccctgtctgtcccatgggcactcatgaaaaaacagaatgctcccaactttattcatcttccaagcctgtagctcttggtatactcactgttgcaagtcagaagcttgatttcatcattgatgtttttctcacgtttcacatctcactcatcaccaagtcatgttggtgttaatttctgattaacccttgaatttaccgtcttctcatcctctgtacaaaagcctcaagtgagggtcaaattcaacattatcctgatctagacagcccccattctcaatccacccttttccaagttgattgcccaaggacttctaacaataaactctcttttgcaccacagacttctttgaaaatatacatgctgttgaccctctctgtagaaaaccgcacacataaaacttaccaacagatttcattggttcttgggttctcccgaagcctatccatggtttatagattaagaattgatgaggtagctgggcacagtggctcacacctacgatcacagcacttcgggaggctgaagcaagcagatcacttgaggtcaggagtttgagaccagcctggccaacatggtgaaaccctgtctctactaaaaatacaaaaagtagccagccgtgatgacaggcacctgtaatcccagctactcgggaggctgaggcatgagaattgcttgaacccgggaggcggaggttgcagtgagcctagatcatgccactgcactccaacctgggcagcagagcaagactctgtctcaaaaggggaaaaaaaaaattgctgatgtgacccatgaagggaactcattttcctcgtaattttggactgccacacattggtacctttagttctctgaaggcccacgtttttatcattaagacctatttgttagctagtagagctttatgttcgctgtccatgaaaccttctgtaaccacagtgactacaagtagttctttctctattgaattattaggtccagaatagaagatgtcattgtacactttatttccctcacactgtgttatgctctgatgtgctatgcttagctatctgtcagagattagtaaattataaaactcatgtgtactacttaagtttatatcttatgctagtttataagaacaattaaaaggacttagaagattaactttggt

SEQ ID NO: 22568 - DNA, 1565 bp, Homo sapiens
  source 1..1565: mol_type = unassigned DNA
cccctccgggttaggcggctgtagcggagctcgaaaagagtggcgcagggtcgcgcggccccgcctccttccccgcccagcgaagctctctgaccacccctcttttctagagttctgcctcgcttcccggcgcggtcgcagccctcagcccacttaggataatggcgacagctgaggtactgaacattggtaaaaaattatatgagggtaaaacaaaagaagtctacgaattgttagacagtccaggaaaagtcctcctgcagtccaaggaccagattacagcaggaaatgcagctagaaaaaaccacctggaaggaaaagctgcaatctcaaataaaatcaccagttgtatttttcagttattacaggaagcaggtattaaaactgccttcaccagaaaatgtggggagacagctttcattgcaccgcagtgtgaaatgattccaattgaatgggtttgcagaagaatagcaactggttcttttctcaaaagaaatcctggtgtcaaggaaggatataagttttacccacctaaagtggagttgtttttcaaggatgatgccaataatgacccacagtggtctgaggaacagctgattgctgcaaaattttgctttgctggacttcttataggccagactgaagtggatatcatgagtcatgctacacaggctatatttgaaatactggagaaatcctggttgccccagaattgtacactggttgatatgaagattgaatttggtgttgatgtaaccaccaaagaaattgttcttgctgatgttattgacaatgattcctggagactctggccatcaggagatcgaagccaacagaaagacaaacagtcttatcgggacctcaaagaagtaactcctgaagggctccaaatggtaaagaaaaactttgagtgggttgcagagagagtagagttgcttttgaaatcagaaagtcagtgcagggttgtagtgttgatgggctctacttctgatcttggtcactgtgaaaaaatcaagaaggcctgtggaaattttggcattccatgtgaacttcgagtaacatctgcgcataaaggaccagatgaaactctgaggattaaagctgagtatgaaggggatggcattcctactgtatttgtggcagtggcaggcagaagtaatggtttgggaccagtgatgtctgggaacactgcatatccagttatcagctgtcctcccctcacaccagactggggagttcaggatgtgtggtcttctcttcgactacccagtggtcttggctgttcaaccgtactttctccagaaggatcagctcaatttgctgctcagatatttgggttaagcaaccatttggtatggagcaaactgcgagcaagcattttgaacacatggatttccttgaagcaggctgacaagaaaatcagagaatgtaatttataagaaagaatgccattgaattttttaggggaaaaactacaaatttctaatttagctgaaggaaaatcaagcaagatgaaaaggtaattttaaattagagaacacaaataaaatgtattagtgaataaa

SEQ ID NO: 22569 - DNA, 5368 bp, Homo sapiens
  source 1..5368: mol_type = unassigned DNA
gcgcgacgattcgaggtgctctgtggccgcgagtgcatcttccacgaacctaattcatctctccagcaaaggacacatctctccagcaaaggacacctctctccagcaaaggacacctgcagagatgtccccagtccttcacttctatgttcgtccctctggccatgagggggcagcccctggacacactcggaggaaactgcaagggaaactgccagagctgcagggcgtcgagactgaactgtgctacaacgtgaactggacagctgaggccctccccagtgctgaggagacaaagaagctgatgtggctgtttggttgccccttactgctggatgatgttgctcgggagtcctggctccttcctggctccaatgacctgctgctggaggtcgggcccaggctgaacttctccaccccaacatccaccaacatcgtgtcagtgtgccgcgccactgggctggggcctgtggatcgtgtggagaccacccggcgctaccggctctcgtttgcccaccccccgtcagctgaggtggaagccattgctctggctaccctgcacgaccggatgacagagcagcacttcccccatcccatccagagtttctcccctgagagcatgccggaacccctcaatggccctatcaatatactgggtgagggccggcttgcgctggagaaggccaaccaggagcttggtctggctttagactcttgggacctagacttctacaccaagcgcttccaggagctacagcggaacccgagcactgtggaggcctttgacttggcgcagtccaatagcgagcacagccgacactggttcttcaagggccagctccacgtggatgggcagaagctggtgcactcactgtttgagtccatcatgagcacccaggaatcctcgaaccccaacaacgtcctcaaattctgtgataacagcagtgcaatccagggaaaggaagtccgattcctacggcctgaggaccccacacggccaagccgcttccagcaacagcaagggctgagacatgttgtcttcacagcagagactcacaactttcccacaggagtatgcccctttagtggtgcaaccactggcacagggggccggattcgagatgtccagtgcacaggccgcggggcccacgtggtggctggcactgccggctattgctttggaaatctgcatattccaggttacaatctgccctgggaggatccaagcttccagtatcctgggaattttgcccggcccctggaggttgccattgaagccagtaatggagcttctgactatggcaacaagtttggggaaccagtgctggctggcttcgcccgctccttgggcctccagctcccagacggccagcggcgtgagtggatcaagcccatcatgtttagtgggggcattgggtccatggaagctgaccacataagcaaggaggccccagagccaggcatggaagttgtaaaggttggaggtcccgtctacaggattggagttggaggtggagctgcttcatctgtgcaggtgcagggagataacaccagtgacctggactttggggctgtgcagcgaggagacccggagatggaacagaagatgaaccgtgtgatcagggcttgtgtggaggcccccaagggaaaccccatctgcagccttcatgatcagggcgctggtggcaatggcaatgtcctaaaagagctgagtgacccagctggagccatcatttacaccagccgcttccagcttggggacccaaccctgaatgccctggaaatctggggggctgagtaccaggaatcaaatgctcttctgctgaggtcccccaaccgggacttcctgactcatgtcagtgcccgtgaacgttgcccggcttgcttcgtgggcaccatcactggagaccggagaatagtgctggtggacgatcgggagtgtcctgtcagaagaaatggccagggggatgcccccccgacacccctgccaacccctgtggacctggagctcgaatgggtgctgggcaagatgcctcggaaggagttcttcctgcagaggaagccccccatgctgcagcctctggccttgcccccagggctgagcgtgcaccaggctctggagagggttctgaggctgcccgccgtggccagcaagcgctacctcaccaataaggtggaccgctctgtgggaggcctggtggcccagcagcagtgcgtggggcccctgcaaactcctctggcagatgtagcggttgtggcactgagccatgaggagctcataggggctgccacagccttgggagaacagccagtcaagagcctgctggacccaaaagtcgccgcccggctggccgtggccgaagccctcaccaacctggtgtttgctctggtcactgacctccgggatgtgaagtgtagcgggaactggatgtgggcagccaagctcccaggggagggcgcagctttggcggatgcctgtgaggctatggtggcagtgatggcagccctgggtgtggcagtggatggtggcaaggactccctcagcatggctgctcgggttggcactgagaccgtgcgggctcctgggtcactggtcatctcagcctatgccgtctgcccagacatcacagccactgtgaccccagacctcaagcatcctgaagggagaggccatctgctctatgtggctctgagccctgggcagcaccggctcgggggcacagctctggcccagtgcttctcccagcttggggaacaccctccagacctggaccttcctgagaacttggtgcgggccttcagcatcactcaggggctgctgaaagaccgcctcctctgctcaggccacgatgtcagtgacggaggcctcgtcacatgcctgctggagatggcctttgctggaaattgcgggctacaggtggatgtgcctgtccccagggttgatgtcctgtctgtgctgttcgctgaggagccaggcctcgtgctggaggtgcaggagccagacctggcccaggtgctgaagcgttaccgggatgctggcctccattgcctggagctgggccacacaggcgaggccgggccccacgccatggtccgggtgtcagtgaacggggctgtggttctggaggagcctgttggggagctgcgagccctctgggaggagacgagtttccagctggaccggctacaggcagagcctcgctgtgtggcagaggaggaacggggcctgagggagcggatggggcccagctattgcctgccccccacctttcccaaagcctccgtgccccgtgagcctggtggtcccagcccccgagtcgccatcttgcgagaggagggcagtaatggagaccgggagatggccgatgccttccacttagctgggtttgaggtatgggacgtgaccatgcaggacctctgctctggggcaattgggctggacactttccgtggcgtggccttcgtgggcggcttcagctatgcagatgtcctgggctctgccaaagggtgggcagctgctgtgacctttcatcccagggctggggctgagctgaggcgcttccggaagcggccagacaccttcagcctgggcgtgtgtaatggctgtcaactgctggctctgctcggctgggtgggaggcgaccccaatgaggatgctgcagagatgggccctgactcccagccagcccggccaggccttctgctacgccacaacctgtctgggcgctacgagtctcgctgggccagcgtgcgtgtggggcctgggccagccctgatgctgcgagggatggagggcgccgtgctgcccgtgtggagtgcgcacggggaaggttacgtagcattttcttctccggaactccaagctcagattgaggccaggggcttggctccactgcactgggctgatgatgacgggaaccccacagagcagtaccctctgaatcccaatgggtccccagggggcgtggctggcatctgctcctgtgatggccgccacctggctgtcatgcctcaccctgagcgggccgttaggccttggcagtgggcatggcgaccccctccatttgatactctgaccacctccccctggctccagctctttatcaatgcccgaaactggaccctggaagggagctgctgactggccacaggggctcacctgggccccatggcttttcacctaagtgggtcctgccccctcccccatgaccttcaggagcaccccatattatttccaaaaatatcttggacagacaaggaccaaaatgccaaaatctcagcggactcgataatctgcctgctgatgttccttctgtggctgtgtctattttcagttctgctctaacatggcatgccctttctcagcccaggaaacagcatgtggttcagagaaaagagcgacaaggaaaagttaggactcctgaggtccgaacaggggcttctgttgcccacttcacaacacccagtgatcaccggtgtgcaattgcctccttggctctgagggatgttttgcgctcccttttctcatcattggggttagcgggtgcagacaaattcagcaatagtatgcagatcagcccctcaccacctcattgttctcatctggaactgaaactttctggatttctcttgaagtgctacactgcactgaatgtaaggaattgttgcttgtggaagtttctcagcgtttctggctgtcttagggctggcctcagaacccagcattcctgttatttgcttctaaattagcagctctctttttttttttttttttgaggcagtctcactctgtcacccaggctggagtacaatggcgtgatctcggcccactgcaacctctgcctcctgggttcaagcaattttcctgcctcagcctcccgagtagctgggagtacaggcacacaccaccacacccagctaatttttgtatttttagtagagatagggtttcaccatgtctcccaggctggtctcaaactcctaacctcaagtgattcgcctgcctcggcctcccaaagtgctgggattacaggtgggagccactacagctggcccagcagctctgtttctgatagaggtggttggggctctcatccctagatcctaaccctttagtatgctggaattctactcttcacttactgcattgactgttgttgattagttattattgcaaagcactgtcaccggcctcagggagtttatgtgtaatagaattaaaaataatagctgtgtataacacttagctcaagccacgcatgtgtgaggcatttggtatgtatctgaattaattctcactaaaattcagcaaaggacttgatagcccctccccgccttttcaataaaggatgaatgaaggttgactgca

SEQ ID NO: 22570 - DNA, 4242 bp, Homo sapiens
  source 1..4242: mol_type = unassigned DNA
aacaaacgcgcgcgacgattcgaggtgctctgtggccgcgagtgcatcttccacgaacctaattcatctctccagcaaaggacacatctctccagcaaaggacacctctctccagcaaaggacacctgcagagatgtccccagtccttcacttctatgttcgtccctctggccatgagggggcagcccctggacacactcggaggaaactgcaagggaaactgccagagctgcagggcgtcgagactgaactgtgctacaacgtgaactggacagctgaggccctccccagtgctgaggagacaaagaagctgatgtggctgtttggttgccccttactgctggatgatgttgctcgggagtcctggctccttcctggctccaatgacctgctgctggaggtcgggcccaggctgaacttctccaccccaacatccaccaacatcgtgtcagtgtgccgcgccactgggctggggcctgtggatcgtgtggagaccacccggcgctaccggctctcggtctggctttagactcttgggacctagacttctacaccaagcgcttccaggagctacagcggaacccgagcactgtggaggcctttgacttggcgcagtccaatagcgagcacagccgacactggttcttcaagggccagctccacgtggatgggcagaagctggtgcactcactgtttgagtccatcatgagcacccaggaatcctcgaaccccaacaacgtcctcaaattctgtgataacagcaggtgctgtgccctagactgggttggcgtcaggacccggggaggggaggccccaggccctggttgggttagtgtaggtcccagaaaggaagcaaggtccatgacgggtatgtccacagtgcaatccagggaaaggaagtccgattcctacggcctgaggaccccacacggccaagccgcttccagcaacagcaagggctgagacatgttgtcttcacagcagagactcacaactttcccacaggagtatgcccctttagtggtgcaaccactggcacagggggccggattcgagatgtccagtgcacaggccgcggggcccacgtggtggctggcactgccggctattgctttggaaatctgcatattccaggttacaatctgccctgggaggatccaagcttccagtatcctgggaattttgcccggcccctggaggttgccattgaagccagtaatggagcttctgactatggcaacaagtttggggaaccagtgctggctggcttcgcccgctccttgggcctccagctcccagacggccagcggcgtgagtggatcaagcccatcatgtttagtgggggcattgggtccatggaagctgaccacataagcaaggaggccccagagccaggcatggaagttgtaaaggttggaggtcccgtctacaggattggagttggaggtggagctgcttcatctgtgcaggtgcagggagataacaccagtgacctggactttggggctgtgcagcgaggagacccggagatggaacagaagatgaaccgtgtgatcagggcttgtgtggaggcccccaagggaaaccccatctgcagccttcatgatcagggcgctggtggcaatggcaatgtcctaaaagagctgagtgacccagctggagccatcatttacaccagccgcttccagcttggggacccaaccctgaatgccctggaaatctggggggctgagtaccaggaatcaaatgctcttctgctgaggtcccccaaccgggacttcctgactcatgtcagtgcccgtgaacgttgcccggcttgcttcgtgggcaccatcactggagaccggagaatagtgctggtggacgatcgggagtgtcctgtcagaagaaatggccagggggatgcccccccgacacccctgccaacccctgtggacctggagctcgaatgggtgctgggcaagatgcctcggaaggagttcttcctgcagaggaagccccccatgctgcagcctctggccttgcccccagggctgagcgtgcaccaggctctggagagggttctgaggctgcccgccgtggccagcaagcgctacctcaccaataaggtggaccgctctgtgggaggcctggtggcccagcagcagtgcgtggggcccctgcaaactcctctggcagatgtagcggttgtggcactgagccatgaggagctcataggggctgccacagccttgggagaacagccagtcaagagcctgctggacccaaaagtcgccgcccggctggccgtggccgaagccctcaccaacctggtgtttgctctggtcactgacctccgggatgtgaagtgtagcgggaactggatgtgggcagccaagctcccaggggagggcgcagctttggcggatgcctgtgaggctatggtggcagtgatggcagccctgggtgtggcagtggatggtggcaaggactccctcagcatggctgctcgggttggcactgagaccgtgcgggctcctgggtcactggtcatctcagcctatgccgtctgcccagacatcacagccactgtgaccccagacctcaagcatcctgaagggagaggccatctgctctatgtggctctgagccctgggcagcaccggctcgggggcacagctctggcccagtgcttctcccagcttggggaacaccctccagacctggaccttcctgagaacttggtgcgggccttcagcatcactcaggggctgctgaaagaccgcctcctctgctcaggccacgatgtcagtgacggaggcctcgtcacatgcctgctggagatggcctttgctggaaattgcgggctacaggtggatgtgcctgtccccagggttgatgtcctgtctgtgctgttcgctgaggagccaggcctcgtgctggaggtgcaggagccagacctggcccaggtgctgaagcgttaccgggatgctggcctccattgcctggagctgggccacacaggcgaggccgggccccacgccatggtccgggtgtcagtgaacggggctgtggttctggaggagcctgttggggagctgcgagccctctgggaggagacgagtttccagctggaccggctacaggcagagcctcgctgtgtggcagaggaggaacggggcctgagggagcggatggggcccagctattgcctgccccccacctttcccaaagcctccgtgccccgtgagcctggtggtcccagcccccgagtcgccatcttgcgagaggagggcagtaatggagaccgggagatggccgatgccttccacttagctgggtttgaggtatgggacgtgaccatgcaggacctctgctctggggcaattgggctggacactttccgtggcgtggccttcgtgggcggcttcagctatgcagatgtcctgggctctgccaaagggtgggcagctgctgtgacctttcatcccagggctggggctgagctgaggcgcttccggaagcggccagacaccttcagcctgggcgtgtgtaatggctgtcaactgctggctctgctcggctgggtgggaggcgaccccaatgaggatgctgcagagatgggccctgactcccagccagcccggccaggccttctgctacgccacaacctgtctgggcgctacgagtctcgctgggccagcgtgcgtgtggggcctgggccagccctgatgctgcgagggatggagggcgccgtgctgcccgtgtggagtgcgcacggggaaggttacgtagcattttcttctccggaactccaagctcagattgaggccaggggcttggctccactgcactgggctgatgatgacgggaaccccacagagcagtaccctctgaatcccaatgggtccccagggggcgtggctggcatctgctcctgtgatggccgccacctggctgtcatgcctcaccctgagcgggccgttaggccttggcagtgggcatggcgaccccctccatttgatactctgaccacctccccctggctccagctctttatcaatgcccgaaactggaccctggaagggagctgctgactggccacaggggctcacctgggccccatggcttttcacctaagtgggtcctgccccctcccccatgaccttcaggagcaccccatattatttccaaaaatatcttggacagacaaggaccaaaatgccaaaatctcagcggactcgataatctgcctgctgatgt

SEQ ID NO: 22571 - DNA, 3470 bp, Homo sapiens
  source 1..3470: mol_type = unassigned DNA
gtcaagggagagagacgaatagtgctggtggacgatcgggagtgtcctgtcagaagaaatggccagggggatgcccccccgacacccctgccaacccctgtggacctggagctcgaatgggtgctgggcaagatgcctcggaaggagttcttcctgcagaggaagccccccatgctgcagcctctggccttgcccccagggctgagcgtgcaccaggctctggagagggttctgaggctgcccgccgtggccagcaagcgctacctcaccaataaggtggaccgctctgtgggaggcctggtggcccagcagcagtgcgtggggcccctgcaaactcctctggcagatgtagcggttgtggcactgagccatgaggagctcataggggctgccacagccttgggagaacagccagtcaagagcctgctggacccaaaagtcgccgcccggctggccgtggccgaagccctcaccaacctggtgtttgctctggtcactgacctccgggatgtgaagtgtagcgggaactggatgtgggcagccaagctcccaggggagggcgcagctttggcggatgcctgtgaggctatggtggcagtgatggcagccctgggtgtggcagtggatggtggcaaggactccctcagcatggctgctcgggttggcactgagaccgtgcgggctcctgggtcactggtcatctcagcctatgccgtctgcccagacatcacagccactgtgaccccagacctcaagcatcctgaagggagaggccatctgctctatgtggctctgagccctgggcagcaccggctcgggggcacagctctggcccagtgcttctcccagcttggggaacaccctccagacctggaccttcctgagaacttggtgcgggccttcagcatcactcaggggctgctgaaagaccgcctcctctgctcaggccacgatgtcagtgacggaggcctcgtcacatgcctgctggagatggcctttgctggaaattgcgggctacaggtggatgtgcctgtccccagggttgatgtcctgtctgtgctgttcgctgaggagccaggcctcgtgctggaggtgcaggagccagacctggcccaggtgctgaagcgttaccgggatgctggcctccattgcctggagctgggccacacaggcgaggccgggccccacgccatggtccgggtgtcagtgaacggggctgtggttctggaggagcctgttggggagctgcgagccctctgggaggagacgagtttccagctggaccggctacaggcagagcctcgctgtgtggcagaggaggaacggggcctgagggagcggatggggcccagctattgcctgccccccacctttcccaaagcctccgtgccccgtgagcctggtggtcccagcccccgagtcgccatcttgcgagaggagggcagtaatggagaccgggagatggccgatgccttccacttagctgggtttgaggtatgggacgtgaccatgcaggacctctgctctggggcaattgggctggacactttccgtggcgtggccttcgtgggcggcttcagctatgcagatgtcctgggctctgccaaagggtgggcagctgctgtgacctttcatcccagggctggggctgagctgaggcgcttccggaagcggccagacaccttcagcctgggcgtgtgtaatggctgtcaactgctggctctgctcggctgggtgggaggcgaccccaatgaggatgctgcagagatgggccctgactcccagccagcccggccaggccttctgctacgccacaacctgtctgggcgctacgagtctcgctgggccagcgtgcgtgtggggcctgggccagccctgatgctgcgagggatggagggcgccgtgctgcccgtgtggagtgcgcacggggaaggttacgtagcattttcttctccggaactccaagctcagattgaggccaggggcttggctccactgcactgggctgatgatgacgggaaccccacagagcagtaccctctgaatcccaatgggtccccagggggcgtggctggcatctgctcctgtgatggccgccacctggctgtcatgcctcaccctgagcgggccgttaggccttggcagtgggcatggcgaccccctccatttgatactctgaccacctccccctggctccagctctttatcaatgcccgaaactggaccctggaagggagctgctgactggccacaggggctcacctgggccccatggcttttcacctaagtgggtcctgccccctcccccatgaccttcaggagcaccccatattatttccaaaaatatcttggacagacaaggaccaaaatgccaaaatctcagcggactcgataatctgcctgctgatgttccttctgtggctgtgtctattttcagttctgctctaacatggcatgccctttctcagcccaggaaacagcatgtggttcagagaaaagagcgacaaggaaaagttaggactcctgaggtccgaacaggggcttctgttgcccacttcacaacacccagtgatcaccggtgtgcaattgcctccttggctctgagggatgttttgcgctcccttttctcatcattggggttagcgggtgcagacaaattcagcaatagtatgcagatcagcccctcaccacctcattgttctcatctggaactgaaactttctggatttctcttgaagtgctacactgcactgaatgtaaggaattgttgcttgtggaagtttctcagcgtttctggctgtcttagggctggcctcagaacccagcattcctgttatttgcttctaaattagcagctctctttttttttttttttttgaggcagtctcactctgtcacccaggctggagtacaatggcgtgatctcggcccactgcaacctctgcctcctgggttcaagcaattttcctgcctcagcctcccgagtagctgggagtacaggcacacaccaccacacccagctaatttttgtatttttagtagagatagggtttcaccatgtctcccaggctggtctcaaactcctaacctcaagtgattcgcctgcctcggcctcccaaagtgctgggattacaggtgggagccactacagctggcccagcagctctgtttctgatagaggtggttggggctctcatccctagatcctaaccctttagtatgctggaattctactcttcacttactgcattgactgttgttgattagttattattgcaaagcactgtcaccggcctcagggagtttatgtgtaatagaattaaaaataatagctgtgtataacacttagctcaagccacgcatgtgtgaggcatttggtatgtatctgaattaattctcactaaaattcagcaaaggacttgatagcccctccccgccttttcaataaaggatgaatgaaggttgactgc

SEQ ID NO: 22572 - DNA, 2149 bp, Homo sapiens
  source 1..2149: mol_type = unassigned DNA
ccgacttccggcgagcgggcaagcgggaaccaggtggccacccggtgtcggtttcattttcctttggaatttctgctttacagacagaacaatggcagcccgagtacttataattggcagtggaggaagggaacatacgctggcctggaaacttgcacagtctcatcatgtcaaacaagtgttggttgccccaggaaacgcaggcactgcctgctctgaaaagatttcaaataccgccatctcaatcagtgaccacactgcccttgctcaattctgcaaagagaagaaaattgaatttgtagttgttggaccagaagcacctctggctgctgggattgttgggaacctgaggtctgcaggagtgcaatgctttggcccaacagcagaagcggctcagttagagtccagcaaaaggtttgccaaagagtttatggacagacatggaatcccaaccgcacaatggaaggctttcaccaaacctgaagaagcctgcagcttcattttgagtgcagacttccctgctttggttgtgaaggccagtggtcttgcagctggaaaaggggtgattgttgcaaagagcaaagaagaggcctgcaaagctgtacaagagatcatgcaggagaaagcctttggggcagctggagaaacaattgtcattgaagaacttcttgacggagaagaggtgtcgtgtctgtgtttcactgatggcaagactgtggcccccatgcccccagcacaggaccataagcgattactggagggagatggtggccctaacacagggggaatgggagcctattgtccagcccctcaggtttctaatgatctattactaaaaattaaagatactgttcttcagaggacagtggatggcatgcagcaagagggtactccatatacaggtattctctatgctggaataatgctgaccaagaatggcccaaaagttctagagtttaattgccgttttggtgatccagagtgccaagtaatcctcccacttcttaaaagtgatctttatgaagtgattcagtccaccttagatggactgctctgcacatctctgcctgtttggctagaaaaccacaccgccctaactgttgtcatggcaagtaaaggttatcctggagactacaccaagggtgtagagataacagggtttcctgaggctcaagctctaggactggaggtgttccatgcaggcactgccctcaaaaatggcaaagtagtaactcatgggggtagagttcttgcagtcacagccatccgggaaaatctcatatcagcccttgaggaagccaagaaaggactagctgctataaagtttgagggagcaatttataggaaagacgtcggctttcgtgccatagctttcctccagcagcccaggtaaaactctaagcaagttagctgtagtgccatttcagaaactggcctaaatggctatgtagaacatttcattaaccctataagtcattcagtattcttttctctctgtgggagtgatacagtcttggtttgtattttgtttgaatcaaaactggttatagcaatactcaaatggaaaaaacttcatgatagcgtaagtttggaaagtttagcaaaatcacagtggtactgatttttatttgttttctattttttttattttatatttttaatttttttaacagggtcttcctctctcgcccaagttctcatgcctcagcctcccaaatagctgggactacaggcacaggccaccacacctggctaatttttttgtattttttgtggagatggggtttcaccatgttgccaaggccagtctgaaatcctgggctcaagtgatcctcctgctttggcctcccaaaatgctgggattataggcatgagccgctgcacttggcctgatactgatttttattccttgcgttatcacatagtgttgtatttgaaacatagttcatggttttatcaaagaactgaagatgagaatactggtcatctaactttgtaatttgatttgattatactgtaaagtttgacagtctcattttatcactgcgtttgtatctattactaaaatgtattttttgacctcttactgattcattgttggtatgtacaaactgttgacttgtaaaatcaataaagtcttagttggaaa

SEQ ID NO: 22573 - DNA, 3341 bp, Homo sapiens
  source 1..3341: mol_type = unassigned DNA
tggtcccgcgccggtcccggtgggccgacttccggcgagcgggcaagcgggaaccaggtggccacccggtgtcggtttcattttcctttggaatttctgctttacagacagaacaatggcagcccgagtacttataattggcagtggaggaagggaacatacgctggcctggaaacttgcacagtctcatcatgtcaaacaagtgttggttgccccaggaaacgcaggcactgcctgctctgaaaagatttcaaataccgccatctcaatcagtgaccacactgcccttgctcaattctgcaaagagaagaaaattgaatttgtagttgttggaccagaagcacctctggctgctgggattgttgggaacctgaggtctgcaggagtgcaatgctttggcccaacagcagaagcggctcagttagagtccagcaaaaggtttgccaaagagtttatggacagacatggaatcccaaccgcacaatggaaggctttcaccaaacctgaagaagcctgcagcttcattttgagtgcagacttccctgctttggttgtgaaggccagtggtcttgcagctggaaaaggggtgattgttgcaaagagcaaagaagaggcctgcaaagctgtacaagagatcatgcaggagaaagcctttggggcagctggagaaacaattgtcattgaagaacttcttgacggagaagaggtgtcgtgtctgtgtttcactgatggcaagactgtggcccccatgcccccagcacaggaccataagcgattactggagggagatggtggccctaacacagggggaatgggagcctattgtccagcccctcaggtttctaatgatctattactaaaaattaaagatactgttcttcagaggacagtggatggcatgcagcaagagggtactccatatacaggtattctctatgctggaataatgctgaccaagaatggcccaaaagttctagagtttaattgccgttttggtgatccagagtgccaagtaatcctcccacttcttaaaagtgatctttatgaagtgattcagtccaccttagatggactgctctgcacatctctgcctgtttggctagaaaaccacaccgccctaactgttgtcatggcaagtaaaggttatcctggagactacaccaagggtgtagagataacagggtttcctgaggctcaagctctaggactggaggtgttccatgcaggcactgccctcaaaaatggcaaagtagtaactcatgggggtagagttcttgcagtcacagccatccgggaaaatctcatatcagcccttgaggaagccaagaaaggactagctgctataaagtttgagggagcaatttataggaaagacgtcggctttcgtgccatagctttcctccagcagcccaggagtttgacttacaaggaatctggagtagatatcgcagctggaaatatgctggtcaagaaaattcagcctttagcaaaagccacttccagatcaggctgtaaagttgatcttggaggttttgctggtctttttgatttaaaagcagctggtttcaaagatccccttctggcctctggaacagatggcgttggaactaaactaaagattgcccagctatgcaataaacatgataccattggtcaagatttggtagcaatgtgtgttaatgatattctggcacaaggagcagagcccctcttcttccttgattacttttcctgtggaaaacttgacctcagtgtaactgaagctgttgttgctggaattgctaaagcttgtggaaaagctggatgtgctctccttggaggtgaaacagcagaaatgcctgacatgtatccccctggagagtatgacctagctgggtttgccgttggtgccatggagcgagatcagaaactccctcacctggaaagaatcactgagggtgatgttgttgttggaatagcttcatctggtcttcatagcaatggatttagccttgtgaggaaaatcgtggcaaaatcttccctccagtactcctctccagcacctgatggttgtggtgaccagactttaggggacttacttctcacgcctaccagaatctacagccattcactgttacctgtcctacgttcaggacatgtcaaagcctttgcccatattactggtggaggattactagagaacatccccagagtcctccctgagaaacttggggtagatttagatgcccagacctggaggatccccagggtcttctcatggttgcagcaggaaggacacctctctgaggaagagatggccagaacatttaactgtggggttggcgctgtccttgtggtatcaaaggagcagacagagcagattctgagggatatccagcagcacaaggaagaagcctgggtgattggcagtgtggttgcacgagctgaaggttccccacgtgtgaaagtcaagaatctgattgaaagcatgcaaataaatgggtcagtgttgaagaatggctccctgacaaatcatttctcttttgaaaaaaaaaaggccagagtggctgtcttaatatctggaacaggatcgaacctgcaagcacttatagacagtactcgggaaccaaatagctctgcacaaattgatattgttatctccaacaaagccgcagtagctgggttagataaagcggaaagagctggtattcccactagagtaattaatcataaactgtataaaaatcgtgtagaatttgacagtgcaattgacctagtccttgaagagttctccatagacatagtctgtcttgcaggattcatgagaattctttctggcccctttgtccaaaagtggaatggaaaaatgctcaatatccacccatccttgctcccttcttttaagggttcaaatgcccatgagcaagccctggaaaccggagtcacagttactgggtgcactgtacactttgtagctgaagatgtggatgctggacagattattttgcaagaagctgttcccgtgaagaggggtgatactgtcgcaactctttctgaaagagtaaaattagcagaacataaaatatttcctgcagcccttcagctggtggccagtggaactgtacagcttggagaaaatggcaagatctgttgggttaaagaggaatgaagccttttaattcagaaatggggccagtttagaaagaattatttgctgtttgcatggtggttttttatcatggacttggcccaaaagaaaaactgctaaaagacaaaaaagacctcacccttacttcatctatttttttaataaatagagactcactaaaaacaagactagttagtgcagcatatctgagaca

SEQ ID NO: 22574 - DNA, 3490 bp, Homo sapiens
  source 1..3490: mol_type = unassigned DNA
ctgacgcaggcgccattacaggagccgtctctcttgaggcgaccgtgtccgcataagttgtcagtccccagcagtgtttgggagccttaacaggcttgctaagtgcctgagattaaaggcgaagaggaagaagagcaagaagggcaacccggtgtttaacacacggctttcaggcgctctcaggtggcgccaagttcagtttcgacagggatatgcatccgggagagaatttttcagcccccgcccccactggcatacagaacaatggcagcccgagtacttataattggcagtggaggaagggaacatacgctggcctggaaacttgcacagtctcatcatgtcaaacaagtgttggttgccccaggaaacgcaggcactgcctgctctgaaaagatttcaaataccgccatctcaatcagtgaccacactgcccttgctcaattctgcaaagagaagaaaattgaatttgtagttgttggaccagaagcacctctggctgctgggattgttgggaacctgaggtctgcaggagtgcaatgctttggcccaacagcagaagcggctcagttagagtccagcaaaaggtttgccaaagagtttatggacagacatggaatcccaaccgcacaatggaaggctttcaccaaacctgaagaagcctgcagcttcattttgagtgcagacttccctgctttggttgtgaaggccagtggtcttgcagctggaaaaggggtgattgttgcaaagagcaaagaagaggcctgcaaagctgtacaagagatcatgcaggagaaagcctttggggcagctggagaaacaattgtcattgaagaacttcttgacggagaagaggtgtcgtgtctgtgtttcactgatggcaagactgtggcccccatgcccccagcacaggaccataagcgattactggagggagatggtggccctaacacagggggaatgggagcctattgtccagcccctcaggtttctaatgatctattactaaaaattaaagatactgttcttcagaggacagtggatggcatgcagcaagagggtactccatatacaggtattctctatgctggaataatgctgaccaagaatggcccaaaagttctagagtttaattgccgttttggtgatccagagtgccaagtaatcctcccacttcttaaaagtgatctttatgaagtgattcagtccaccttagatggactgctctgcacatctctgcctgtttggctagaaaaccacaccgccctaactgttgtcatggcaagtaaaggttatcctggagactacaccaagggtgtagagataacagggtttcctgaggctcaagctctaggactggaggtgttccatgcaggcactgccctcaaaaatggcaaagtagtaactcatgggggtagagttcttgcagtcacagccatccgggaaaatctcatatcagcccttgaggaagccaagaaaggactagctgctataaagtttgagggagcaatttataggaaagacgtcggctttcgtgccatagctttcctccagcagcccaggagtttgacttacaaggaatctggagtagatatcgcagctggaaatatgctggtcaagaaaattcagcctttagcaaaagccacttccagatcaggctgtaaagttgatcttggaggttttgctggtctttttgatttaaaagcagctggtttcaaagatccccttctggcctctggaacagatggcgttggaactaaactaaagattgcccagctatgcaataaacatgataccattggtcaagatttggtagcaatgtgtgttaatgatattctggcacaaggagcagagcccctcttcttccttgattacttttcctgtggaaaacttgacctcagtgtaactgaagctgttgttgctggaattgctaaagcttgtggaaaagctggatgtgctctccttggaggtgaaacagcagaaatgcctgacatgtatccccctggagagtatgacctagctgggtttgccgttggtgccatggagcgagatcagaaactccctcacctggaaagaatcactgagggtgatgttgttgttggaatagcttcatctggtcttcatagcaatggatttagccttgtgaggaaaatcgtggcaaaatcttccctccagtactcctctccagcacctgatggttgtggtgaccagactttaggggacttacttctcacgcctaccagaatctacagccattcactgttacctgtcctacgttcaggacatgtcaaagcctttgcccatattactggtggaggattactagagaacatccccagagtcctccctgagaaacttggggtagatttagatgcccagacctggaggatccccagggtcttctcatggttgcagcaggaaggacacctctctgaggaagagatggccagaacatttaactgtggggttggcgctgtccttgtggtatcaaaggagcagacagagcagattctgagggatatccagcagcacaaggaagaagcctgggtgattggcagtgtggttgcacgagctgaaggttccccacgtgtgaaagtcaagaatctgattgaaagcatgcaaataaatgggtcagtgttgaagaatggctccctgacaaatcatttctcttttgaaaaaaaaaaggccagagtggctgtcttaatatctggaacaggatcgaacctgcaagcacttatagacagtactcgggaaccaaatagctctgcacaaattgatattgttatctccaacaaagccgcagtagctgggttagataaagcggaaagagctggtattcccactagagtaattaatcataaactgtataaaaatcgtgtagaatttgacagtgcaattgacctagtccttgaagagttctccatagacatagtctgtcttgcaggattcatgagaattctttctggcccctttgtccaaaagtggaatggaaaaatgctcaatatccacccatccttgctcccttcttttaagggttcaaatgcccatgagcaagccctggaaaccggagtcacagttactgggtgcactgtacactttgtagctgaagatgtggatgctggacagattattttgcaagaagctgttcccgtgaagaggggtgatactgtcgcaactctttctgaaagagtaaaattagcagaacataaaatatttcctgcagcccttcagctggtggccagtggaactgtacagcttggagaaaatggcaagatctgttgggttaaagaggaatgaagccttttaattcagaaatggggccagtttagaaagaattatttgctgtttgcatggtggttttttatcatggacttggcccaaaagaaaaactgctaaaagacaaaaaagacctcacccttacttcatctatttttttaataaatagagactcactaaaaacaagactagttagtgcagcatatctgagaca

SEQ ID NO: 22575 - DNA, 3469 bp, Homo sapiens
  source 1..3469: mol_type = unassigned DNA
atgtccgccatgttagtgtctgacgcaggcgccattacaggagccgtctctcttgaggcgaccgtgtccgcataagttgtcagtccccagcagtgtttgggagccttaacaggcttgctaagtgcctgagattaaaggcgaagaggaagaagagcaagaagggcaacccggtgtttaacacacggctttcaggcgctctcaggtttcattttcctttggaatttctgctttacagacagaacaatggcagcccgagtacttataattggcagtggaggaagggaacatacgctggcctggaaacttgcacagtctcatcatgtcaaacaagtgttggttgccccaggaaacgcaggcactgcctgctctgaaaagatttcaaataccgccatctcaatcagtgaccacactgcccttgctcaattctgcaaagagaagaaaattgaatttgtagttgttggaccagaagcacctctggctgctgggattgttgggaacctgaggtctgcaggagtgcaatgctttggcccaacagcagaagcggctcagttagagtccagcaaaaggtttgccaaagagtttatggacagacatggaatcccaaccgcacaatggaaggctttcaccaaacctgaagaagcctgcagcttcattttgagtgcagacttccctgctttggttgtgaaggccagtggtcttgcagctggaaaaggggtgattgttgcaaagagcaaagaagaggcctgcaaagctgtacaagagatcatgcaggagaaagcctttggggcagctggagaaacaattgtcattgaagaacttcttgacggagaagaggtgtcgtgtctgtgtttcactgatggcaagactgtggcccccatgcccccagcacaggaccataagcgattactggagggagatggtggccctaacacagggggaatgggagcctattgtccagcccctcaggtttctaatgatctattactaaaaattaaagatactgttcttcagaggacagtggatggcatgcagcaagagggtactccatatacaggtattctctatgctggaataatgctgaccaagaatggcccaaaagttctagagtttaattgccgttttggtgatccagagtgccaagtaatcctcccacttcttaaaagtgatctttatgaagtgattcagtccaccttagatggactgctctgcacatctctgcctgtttggctagaaaaccacaccgccctaactgttgtcatggcaagtaaaggttatcctggagactacaccaagggtgtagagataacagggtttcctgaggctcaagctctaggactggaggtgttccatgcaggcactgccctcaaaaatggcaaagtagtaactcatgggggtagagttcttgcagtcacagccatccgggaaaatctcatatcagcccttgaggaagccaagaaaggactagctgctataaagtttgagggagcaatttataggaaagacgtcggctttcgtgccatagctttcctccagcagcccaggagtttgacttacaaggaatctggagtagatatcgcagctggaaatatgctggtcaagaaaattcagcctttagcaaaagccacttccagatcaggctgtaaagttgatcttggaggttttgctggtctttttgatttaaaagcagctggtttcaaagatccccttctggcctctggaacagatggcgttggaactaaactaaagattgcccagctatgcaataaacatgataccattggtcaagatttggtagcaatgtgtgttaatgatattctggcacaaggagcagagcccctcttcttccttgattacttttcctgtggaaaacttgacctcagtgtaactgaagctgttgttgctggaattgctaaagcttgtggaaaagctggatgtgctctccttggaggtgaaacagcagaaatgcctgacatgtatccccctggagagtatgacctagctgggtttgccgttggtgccatggagcgagatcagaaactccctcacctggaaagaatcactgagggtgatgttgttgttggaatagcttcatctggtcttcatagcaatggatttagccttgtgaggaaaatcgtggcaaaatcttccctccagtactcctctccagcacctgatggttgtggtgaccagactttaggggacttacttctcacgcctaccagaatctacagccattcactgttacctgtcctacgttcaggacatgtcaaagcctttgcccatattactggtggaggattactagagaacatccccagagtcctccctgagaaacttggggtagatttagatgcccagacctggaggatccccagggtcttctcatggttgcagcaggaaggacacctctctgaggaagagatggccagaacatttaactgtggggttggcgctgtccttgtggtatcaaaggagcagacagagcagattctgagggatatccagcagcacaaggaagaagcctgggtgattggcagtgtggttgcacgagctgaaggttccccacgtgtgaaagtcaagaatctgattgaaagcatgcaaataaatgggtcagtgttgaagaatggctccctgacaaatcatttctcttttgaaaaaaaaaaggccagagtggctgtcttaatatctggaacaggatcgaacctgcaagcacttatagacagtactcgggaaccaaatagctctgcacaaattgatattgttatctccaacaaagccgcagtagctgggttagataaagcggaaagagctggtattcccactagagtaattaatcataaactgtataaaaatcgtgtagaatttgacagtgcaattgacctagtccttgaagagttctccatagacatagtctgtcttgcaggattcatgagaattctttctggcccctttgtccaaaagtggaatggaaaaatgctcaatatccacccatccttgctcccttcttttaagggttcaaatgcccatgagcaagccctggaaaccggagtcacagttactgggtgcactgtacactttgtagctgaagatgtggatgctggacagattattttgcaagaagctgttcccgtgaagaggggtgatactgtcgcaactctttctgaaagagtaaaattagcagaacataaaatatttcctgcagcccttcagctggtggccagtggaactgtacagcttggagaaaatggcaagatctgttgggttaaagaggaatgaagccttttaattcagaaatggggccagtttagaaagaattatttgctgtttgcatggtggttttttatcatggacttggcccaaaagaaaaactgctaaaagacaaaaaagacctcacccttacttcatctatttttttaataaatagagactcactaaaaacaagactagttagtgcagcatatctgagaca

SEQ ID NO: 22576 - DNA, 837 bp, Homo sapiens
  source 1..837: mol_type = unassigned DNA
cgcataagttgtcagtccccagcagtgtttgggagccttaacaggcttgctaagtgcctgagattaaaggcgaagaggaagaagagcaagaagggcaacccggtgtttaacacacggctttcaggcgctctcagacagaacaatggcagcccgagtacttataattggcagtggaggaagggaacatacgctggcctggaaacttgcacagtctcatcatgtcaaacaagtgttggttgccccaggaaacgcaggcactgcctgctctgaaaagatttcaaataccgccatctcaatcagtgaccacactgcccttgctcaattctgcaaagagaagaaaattgaatttgtagttgttggaccagaagcacctctggctgctgggattgttgggaacctgaggtctgcaggagtgcaatgctttggcccaacagcagaagcggctcagttagagtccagcaaaaggtttgccaaagagtttatggacagacatggaatcccaaccgcacaatggaaggctttcaccaaacctgaagaagcctgcagcttcattttgagtgcagacttccctgctttggttgtgaaggccagtggtcttgcagctggaaaaggggtgattgttgcaaagagcaaagaagaggcctgcaaagctgtacaagagatcatgcaggagaaagcctttggggcagctggagaaacaattgtcattgaagaacttcttgacggagaagaggtgtcgtgtctgtgtttcactgatggcaagactgtggcccccatgcccccagcacaggaccataagcgattactggagggagatggtggccctaacacaggggg

SEQ ID NO: 22577 - DNA, 1036 bp, Homo sapiens
  source 1..1036: mol_type = unassigned DNA
cccgtccctggcggacaaccgggcctacgagtagctaaacggcaggggggacccaaacaggggagaagggtgaacatcttaactcggttctgaaacagggagtcttgggttacctcggaaaaggcgaagttcctcgagggaaaaggaagggagcggctgggggggcggttggggggggcccggaaaatggatcccaggcccaggcggggccctagcggggcctgagccggggaacgactgcgtctccgaagaaaggtgccaaagaaggctaggtttcattttcctttggaatttctgctttacagacagaacaatggcagcccgagtacttataattggcagtggaggaagggaacatacgctggcctggaaacttgcacagtctcatcatgtcaaacaagtgttggttgccccaggaaacgcaggcactgcctgctctgaaaagatttcaaataccgccatctcaatcagtgaccacactgcccttgctcaattctgcaaagagaagaaaattgaatttgtagttgttggaccagaagcacctctggctgctgggattgttgggaacctgaggtctgcaggagtgcaatgctttggcccaacagcagaagcggctcagttagagtccagcaaaaggtttgccaaagagtttatggacagacatggaatcccaaccgcacaatggaaggctttcaccaaacctgaagaagcctgcagcttcattttgagtgcagacttccctgctttggttgtgaaggccagtggtcttgcagctggaaaaggggtgattgttgcaaagagcaaagaagaggcctgcaaagctgtacaagagatcatgcaggagaaagcctttggggcagctggagaaacaattgtcattgaagaacttcttgacggagaagaggtgtcgtgtctgtgtttcactgatggcaagactgtggcccccatgcccccagcacaggaccataagcgattactggagggagatggtggccctaacacagggggaatgggagcctattgtccagcccctcag

SEQ ID NO: 22578 - DNA, 697 bp, Homo sapiens
  source 1..697: mol_type = unassigned DNA
agccgtctctcttgaggcgaccgtgtccgcataagttgtcagtccccagcagtgtttgggagccttaacaggcttgctaagtgcctgagattaaaggcgaagaggaagaagagcaagaagggcaacccggtgtttaacacacggctttcaggcgctctcaggtggcgccaagttcagtttcgacagggatatgcatccgggagagaatttttcagcccccgcccccactggcatgtgagaggaggaactcgctgttgccctgtgtcttccccaacagaacaatggcagcccgagtacttataattggcagtggaggaagggaacatacgctggcctggaaacttgcacagtctcatcatgtcaaacaagtgttggttgccccaggaaacgcaggcactgcctgctctgaaaagatttcaaataccgccatctcaatcagtgaccacactgcccttgctcaattctgcaaagagaagaaaattgaatttgtagttgttggaccagaagcacctctggctgctgggattgttgggaacctgaggtctgcaggagtgcaatgctttggcccaacagcagaagcggctcagttagagtccagcaaaaggtttgccaaagagtttatggacagacatggaatcccaaccgcacaatggaaggctttcaccaaacctgaagaagcctgcagcttcattttgag

SEQ ID NO: 22579 - DNA, 715 bp, Homo sapiens
  source 1..715: mol_type = unassigned DNA
ttttggcgctcccccccggcgctcctggaaacactgcgtggcaccccgtaccactgtcacattataaacgtgctaaggcttgggtgtctcggctggggagcagtcaggcagcgcccagggcgggagggaatcagactagattctcgccgcggagacccagggccgcgcggaccaatggggcagggaagccgtcgtagggcggggcagtgaggggcggtgccgcgctggtcccgcgccggtcccggtgggccgacttccggcgagcgggcaagcgggaaccaggtggccacccggtgtcgacagaacaatggcagcccgagtacttataattggcagtggaggaagggaacatacgctggcctggaaacttgcacagtctcatcatgtcaaacaagtgttggttgccccaggaaacgcaggcactgcctgctctgaaaagatttcaaataccgccatctcaatcagtgaccacactgcccttgctcaattctgcaaagagaagaaaattgaatttgtagttgttggaccagaagcacctctggctgctgggattgttgggaacctgaggtctgcaggagtgcaatgctttggcccaacagcagaagcggctcagttagagtccagcaaaaggtttgccaaagagtttatggacagacatggaatcccaaccgcacaatggaaggctttcaccaaacctgaagaagcctgcagcttc

SEQ ID NO: 22580 - DNA, 1820 bp, Homo sapiens
  source 1..1820: mol_type = unassigned DNA
taaatgtactgctccgacttgtgggtcctatacagaaggaaatgatgcactgagagtttgacttacaaggaatctggagtagatatcgcagctggaaatatgctggtcaagaaaattcagcctttagcaaaagccacttccagatcaggctgtaaagttgatcttggaggttttgctggtctttttgatttaaaagcagctggtttcaaagatccccttctggcctctggaacagatggcgttggaactaaactaaagattgcccagctatgcaataaacatgataccattggtcaagatttggtagcaatgtgtgttaatgatattctggcacaaggagcagagcccctcttcttccttgattacttttcctgtggaaaacttgacctcagtgtaactgaagctgttgttgctggaattgctaaagcttgtggaaaagctggatgtgctctccttggaggtgaaacagcagaaatgcctgacatgtatccccctggagagtatgacctagctgggtttgccgttggtgccatggagcgagatcagaaactccctcacctggaaagaatcactgagggtgatgttgttgttggaatagcttcatctggtcttcatagcaatggatttagccttgtgaggaaaatcgtggcaaaatcttccctccagtactcctctccagcacctgatggttgtggtgaccagactttaggggacttacttctcacgcctaccagaatctacagccattcactgttacctgtcctacgttcaggacatgtcaaagcctttgcccatattactggtggaggattactagagaacatccccagagtcctccctgagaaacttggggtagatttagatgcccagacctggaggatccccagggtcttctcatggttgcagcaggaaggacacctctctgaggaagagatggccagaacatttaactgtggggttggcgctgtccttgtggtatcaaaggagcagacagagcagattctgagggatatccagcagcacaaggaagaagcctgggtgattggcagtgtggttgcacgagctgaaggttccccacgtgtgaaagtcaagaatctgattgaaagcatgcaaataaatgggtcagtgttgaagaatggctccctgacaaatcatttctcttttgaaaaaaaaaaggccagagtggctgtcttaatatctggaacaggatcgaacctgcaagcacttatagacagtactcgggaaccaaatagctctgcacaaattgatattgttatctccaacaaagccgcagtagctgggttagataaagcggaaagagctggtattcccactagagtaattaatcataaactgtataaaaatcgtgtagaatttgacagtgcaattgacctagtccttgaagagttctccatagacatagtctgtcttgcaggattcatgagaattctttctggcccctttgtccaaaagtggaatggaaaaatgctcaatatccacccatccttgctcccttcttttaagggttcaaatgcccatgagcaagccctggaaaccggagtcacagttactgggtgcactgtacactttgtagctgaagatgtggatgctggacagattattttgcaagaagctgttcccgtgaagaggggtgatactgtcgcaactctttctgaaagagtaaaattagcagaacataaaatatttcctgcagcccttcagctggtggccagtggaactgtacagcttggagaaaatggcaagatctgttgggttaaagaggaatgaagccttttaattcagaaatggggccagtttag

SEQ ID NO: 22581 - DNA, 2611 bp, Homo sapiens
  source 1..2611: mol_type = unassigned DNA
actccttggctggaggcagtgctgaggccgccgtcccctctaccatcagtccagtccggcccgccctcctgcagccatgtcccggcccctgtcagaccaagagaaaagaaagcaaatcagtgtgcgtggcctggccggcgtggagaacgtgactgagctgaaaaagaacttcaaccggcacctgcatttcacactcgtaaaggaccgcaatgtggccaccccacgagactactactttgctctggcccataccgtgcgcgaccacctcgtggggcgctggatccgcacgcagcagcactactatgagaaggaccccaagaagatctccgggggctggcagatggaggaggccgatgactggcttcgctacggcaacccctgggagaaggcccggcccgagttcacgctacctgtgcacttctacggccatgtggagcacaccagccagggtgccaagtgggtggacacacaggtggtactggccatgccctacgatacgcccgtgcctggctatcgcaacaatgttgtcaacaccatgcgcctctggtctgccaaggctcccaatgacttcaacctcaaggacttcaatgtcggtggctacatccaggctgtgttggaccgaaacctggcggagaacatctctcgtgtcctgtaccccaatgataatttcttcgaagggaaggagctgcggctgaagcaggagtatttcgtggtggctgccaccctccaggacatcatccgtcgcttcaagtcttccaagttcggctgccgtgatcccgtgcgcacgaacttcgatgccttcccagataaggtggccatccagctcaatgacacccacccctccctggccatccccgagctgatgaggatcctggtggacctggaacggatggactgggacaaggcgtgggatgtgacagtgaggacctgtgcctacaccaaccacacggtgctgcccgaggccctggagcgctggccggtgcacctcttggagacgctgctgccgcggcacctccagatcatctacgagatcaaccagcgcttcctcaaccgggtggcggccgcattcccaggggacgtagaccggctgcggcgcatgtcgctggtggaggagggcgcagtgaagcgcatcaacatggcacacctgtgcatcgcggggtcgcacgccgtcaacggcgtggcgcgcatccactccgagatcctcaagaagaccatcttcaaagacttctatgagctggagcctcataagttccagaataagaccaacggcatcacccctcggcgctggctggttctgtgtaaccccgggctggcagaggtcattgctgagcgcatcggggaggacttcatctctgacctggaccagctgcgcaaactgctctcctttgtggatgatgaagctttcattcgggatgtggccaaagtgaagcaggaaaacaagttgaagtttgctgcctacctagagagggaatacaaagtccacatcaaccccaactcactcttcgacatccaggtgaagcggattcacgaatataaacgacagctcctcaactgcctccatgtcatcaccctgtacaaccgcatcaagagggagcccaataagttttttgtgcctcggactgtgatgattggagggaaggctgcacctgggtaccacatggccaagatgatcatcagactcgtcacagccatcggggatgtggtcaaccatgacccggcagtgggtgaccgcctccgtgtcatcttcctggagaactaccgagtctcactggccgagaaagtgatcccagctgcagacctctctgagcagatctccactgcgggcactgaagcctcaggcaccggcaacatgaagttcatgctcaacggggctctgaccattggcaccatggacggggccaatgtggagatggcagaagaggcgggagaggaaaacttcttcatctttggcatgcgggtggaggatgtggataagcttgaccaaagagggtacaatgcccaggagtactacgatcgcattcctgagcttcggcaggtcattgagcagctgagcagtggcttcttctcccccaaacagcccgacctgttcaaggacattgtcaatatgctcatgcaccatgaccggtttaaagtcttcgcagattatgaagactacattaaatgccaggagaaagtcagcgccttgtacaagaacccaagagagtggacgcggatggtgatccggaacatagccacctctggcaagttctccagtgaccgcaccattgcccagtatgcccgggagatctggggtgtggagccttcccgccagcgcctgccagccccggatgaggccatctgagcctccagaccagaccccaaaccagcccttgagtctgtcacactctcttgggccagccccagcacctcatgcagagggtggggtactggagttagatctctaagcccctcctggaaccctcattttccccactctcaatgtcccagtgtccagcgtgactaaggacacgggcccccttccgtcctcgggctcccggtcccctcctatttatggggtctgaccaactgcacccactccctaataaattcattctccttgggagcctcctta

SEQ ID NO: 22582 - DNA, 6121 bp, Homo sapiens
  source 1..6121: mol_type = unassigned DNA
cacgcggaggccggactggactaagggggcaggagcggcgcctggggcgctgcggcggggctctagaccgcgggaagccagtgctagcgctggcgcgtggtgggcccctgaggccgccggagtccggagaggtacgcggaatccgcggcgccaggcctgagcggtgggagggctctgcggggcctggtgttcaggcgtcccaccacgagggtggagcagcgttggatacttgttccttagggaccgaaggctccggtggcacccgggctatttctcagaggacaattagtaacgtgtcgccatgaggagccggagtaactccggggtccggctggacggctacgctcgactggtgcaacagaccatcctgtgccatcagaatccagtgactggcttgcttccagccagctatgatcagaaagatgcttgggtccgagataatgtgtacagcatcttggctgtgtggggtttgggcctggcctatcggaagaatgcagaccgggatgaggataaggcaaaggcctatgaattggagcagagtgtagtgaagctgatgagaggactactgcactgcatgatcagacaggtggataaagtagaatccttcaaatatagtcagagtactaaggatagcctccatgcaaagtacaacaccaaaacctgtgccactgtagtgggtgatgatcaatggggacacctgcagttggatgctacctctgtgtacctgctcttcttagcccaaatgactgcctcaggactccatatcatccacagcctagatgaagtcaatttcatacagaaccttgtgttttacattgaagctgcatataaaactgctgacttcgggatatgggaacgtggagacaagaccaaccaagggatctcagagttgaatgccagttcagttggaatggcaaaggcagccctggaagcattagatgaactggatctgtttggtgtgaaaggtgggcctcaatcagttatccatgtcctggctgatgaagtacagcactgccagtctatcctaaattcactactgccccgtgcttcaacatcaaaagaggttgatgctagtctactctcagtggtttccttccctgcctttgcagtagaggatagccagttggtggagctcacaaaacaggaaatcatcaccaagcttcagggtcgttatggttgctgtcgctttctacgagatggatataaaactcctaaagaggatcccaatcgtctgtactatgaaccagctgagctgaagctatttgaaaacattgagtgtgaatggccattgttctggacatactttattcttgatggggtcttcagtggcaatgcagaacaggttcaagaatataaagaggctcttgaagcagtcctcatcaagggcaaaaatggagtcccacttctgccagagctgtacagtgttcctcctgacagggtcgatgaagaatatcagaatcctcacactgtggaccgagtccccatggggaaattgcctcacatgtggggtcagtctctatacattttaggaagcttgatggcagagggatttttagcccctggagaaattgatcccctgaatcgcaggttttctactgtaccgaagcccgatgttgtggttcaagtctccattctagctgaaacagaagaaatcaagaccattttgaaggacaagggaatttacgtggagaccattgctgaggtataccccatcagagtacaaccagctcgtattctcagccacatttattccagcctaggatgcaacaatagaatgaaactcagtggacgaccctacagacacatgggagtgcttggaacttcaaaactctatgacattcggaaaactatctttactttcactccacagtttatagaccagcaacagttctacctggctctggacaacaagatgatagtggaaatgcttagaacagacctctcctacctctgtagccgctggcggatgacaggccagcccaccatcaccttccccatctcacacagcatgcttgatgaagatggaacaagcttgaattcaagtatcctggcagcactccgaaaaatgcaagatgggtattttggtggggcaagggttcaaacaggtaaattgtcagagtttttgacaacatcttgttgcacacacttgagcttcatggaccctggacctgagggtaagctgtacagtgaagattatgatgacaactatgattacctggaatctggcaactggatgaatgattatgattcaaccagtcatgctcgctgtggtgatgaagttgctcgttatttagatcaccttttggcgcacactgctccccatcctaaactagcccctacctcacagaagggagggctagatcggttccaagctgctgtgcaaacaacctgcgacttaatgtccttggtgaccaaggccaaggaactgcatgtacagaatgttcacatgtatcttcctacgaagttatttcaggcttcccggccttcattcaacttacttgattcacctcatccccgacaggagaaccaggttccctctgttcgtgtagaaatacatcttcctagagaccagtctggggaggtggactttaaagcactggttttacagttgaaggagacctcaagcttacaggaacaagctgatatcctctatatgctgtatactatgaaaggacctgactggaacactgaattgtataatgaacggagtgctacagtgagagagcttcttaccgagctgtatggcaaagtgggagaaattcgtcactggggcctgatccgatacatttctgggatcttaaggaagaaagtggaagcacttgatgaggcctgcacagaccttctctcccaccagaaacatttgacagtaggacttcctccagaacctcgagaaaagactatctctgcacctctgccctatgaggcgctcactcagctgatagatgaagccagtgaaggggatatgagcatttcaatccttacacaggaaataatggtatatctagccatgtatatgcgaacccagcctggcctctttgctgaaatgtttcgacttcgaattggtctgatcatacaagttatggcaacagaactggcccactcccttcgatgctcagctgaggaagccacagagggcctgatgaatctcagtccttcggccatgaagaatctcctgcatcacattctcagcggcaaggagtttggagtggaacgaagcgttcgtcccactgattcaaatgtcagtcctgctatttctatccacgagattggtgctgttggagcaaccaaaacagaacgaactgggatcatgcagttaaaaagtgagataaagcagtcacctggaacctctatgactccaagtagtgggtcctttcctagtgcatatgatcagcagtcatctaaagatagtcgtcaaggtcaatggcaacgccgaagaaggctggatggggcactgaatagagttccagttggattttatcagaaagtatggaaagttttgcagaagtgtcacggactttctgttgaagggtttgtccttccttcctctaccactagagagatgactccaggtgagattaaattctctgttcatgtggagtctgtcctgaatcgtgtacctcagccagagtaccgtcagctgctggttgaagccatccttgtcctcaccatgctggcagatattgaaattcatagcatcggaagcatcattgctgtggaaaaaatagtgcatattgccaatgacttgttccttcaagaacagaaaacccttggcgcagatgataccatgttggcaaaggatcccgcatctggcatctgtactcttctgtatgacagtgcacccagtggcaggtttggcaccatgacctacctctccaaggcagccgccacctacgtgcaggagttcctgccccacagcatctgtgccatgcaatgagggctttggttcctggcttctgggagccttttgacagctggtccctgcctcggttgattgtgcatggaactaaaatgttattgcctaatcactccaaccctgcccctttctgtcccatccttcccaagaagagagaactttttcgataaactaactactgtagaagaagtgaacacttacctggaggctcaccttgcagaaccagtgacaatcttatgagtataatgaacactcagccaggcctgtcatgattggctttatttctttcatcattcataaaagtttgcatgtgtttttattctctagatctgttaccaatatagttttctaactcctgtttggggagcaagtgttaataataacttattcctaaagcttggtttttcttttttgtgattttattgtgtatatgagtggtgggtactttgggacattatttcaaatgagtaaactctaaattgttaaatatttatgctgctataaattagaattacctattctacgtgccttttcttaggaaaagagagtactggatcatggttttcttccttacttacaggttgcttcacactgagtgataatttaaaattgtttctatgtagaatcattgtctctactgttgccctctctgtgtctgcacacataatgcctctctcactttggtgaaatatcaaaaaaatgcaagtacagcatgcatatttaagaatttctgaactaacacttgaaatcacattttataaagattgttggtactcagagttgtatttgcagcagaaaatgcagaataacccagaaatggagcccggagcccaattccagagaggaagggaaagaagagacgatgcctggacaatgtcttatacatagggaacagagagggaatcagaggtggcttagttccctgaagacagccttatgcgcttaatccctgcctttgaaaaatgggccaatacacaacacagacaataatttgaagcgtctgtattcagcaaagataaatacagcagtccagtctataggtgctctacttagcattcttttcatgtgctcctggtctctgtctcactcacctactttctactacatccaactcaactccctgacaccctatccccccatctattcttaaactctttcatatatattttcacttcctaattctagtgtacatatccctgtatatcatggtatctgtgggcatatgtctgtttcttataaagacacatatttgtgtgtgtatgtgtgtgtgtgtgtgtgtgtgtgtataagcatacatgggaatttttctgaatgtaagcagttttgatgtgtctgtatatcaatctgtatctacatttgatggactgagtaagaatgttgcatgtgagagaagggatgtgactgtggactcagattgacacacacagattggtggaagaatagcttcagtcctcttccttcatcccatatgtaggtagccttgcttgacaaatgtttcttctaactctccttcttctgaattgtgcagagactctgttaacttccctttttgcacttagataacttcctacttcaaccccctcctttatcttggatttctaaagtttttccccaatattgggaatggtgagggtggggatgagagactctctgaacaattcttgcagaaccagtgacaatcttatgaatataatgaataagtaagcatatagtagggtgatagaatacagatagtagaaacaaagagaggacagcaaaccttttcagcacttctctcagagcaaatggaaacacacagtaagtagctttctgactacattattttctggtcacttttaaagaaagtttacaacctgttctgaaactatttgtcttttcactggttgtaagtgtaccccaatctcagggagtatatctgtagtgccacaggcaaaagatccactccttcccacactcatttgcctgaacttactcgaagggctgcatttctctgagtttacgaaattgtgtcattatggtccccatacagtggtatttaacttttaaagcaacttttaagaaaactcgacttgttttttgttcattttaagtgtgtggtactaaaaagacatgttagactttttttaaaaaagcacttatgttttgaaaatagaataaataataagaatttccaattaaatcatgtctggtgccaatgtgcaaaacttc

SEQ ID NO: 22583 - DNA, 4476 bp, Homo sapiens
  source 1..4476: mol_type = unassigned DNA
gacctgttggcggcggccgggcgggaggctgtgggccgcggcggtctcccggggttgaggggaggatgcaggagtcacacgcggaggccggactggactaagggggcaggagcggcgcctggggcgctgcggcggggctctagaccgcgggaagccagtgctagcgctggcgcgtggtgggcccctgaggccgccggagtccggagaggtacgcggaatccgcggcgccaggcctgagcggtgggagggctctgcggggcctggtgttcaggcgtcccaccacgagggtggagcagcgttggatacttgttccttagggaccgaaggctccggtggcacccgggctatttctcagaggacaattagtaacgtgtcgccatgaggagccggagtaactccggggtccggctggacggctacgctcgactggtgcaacagaccatcctgtgccatcagaatccagtgactggcttgcttccagccagctatgatcagaaagatgcttgggtccgagataatgtgtacagcatcttggctgtgtggggtttgggcctggcctatcggaagaatgcagaccgggatgaggataaggcaaaggcctatgaattggagcagagtgtagtgaagctgatgagaggactactgcactgcatgatcagacaggtggataaagtagaatccttcaaatatagtcagagtactaaggatagcctccatgcaaagtacaacaccaaaacctgtgccactgtagtgggtgatgatcaatggggacacctgcagttggatgctacctctgtgtacctgctcttcttagcccaaatgactgcctcaggactccatatcatccacagcctagatgaagtcaatttcatacagaaccttgtgttttacattgaagctgcatataaaactgctgacttcgggatatgggaacgtggagacaagaccaaccaagggatctcagagttgaatgccagttcagttggaatggcaaaggcagccctggaagcattagatgaactggatctgtttggtgtgaaaggtgggcctcaatcagttatccatgtcctggctgatgaagtacagcactgccagtctatcctaaattcactactgccccgtgcttcaacatcaaaagaggttgatgctagtctactctcagtggtttccttccctgcctttgcagtagaggatagccagttggtggagctcacaaaacaggaaatcatcaccaagcttcagggtcgttatggttgctgtcgctttctacgagatggatataaaactcctaaagaggatcccaatcgtctgtactatgaaccagctgagctgaagctatttgaaaacattgagtgtgaatggccattgttctggacatactttattcttgatggggtcttcagtggcaatgcagaacaggttcaagaatataaagaggctcttgaagcagtcctcatcaagggcaaaaatggagtcccacttctgccagagctgtacagtgttcctcctgacagggtcgatgaagaatatcagaatcctcacactgtggaccgagtccccatggggaaattgcctcacatgtggggtcagtctctatacattttaggaagcttgatggcagagggatttttagcccctggagaaattgatcccctgaatcgcaggttttctactgtaccgaagcccgatgttgtggttcaagtctccattctagctgaaacagaagaaatcaagaccattttgaaggacaagggaatttacgtggagaccattgctgaggtataccccatcagagtacaaccagctcgtattctcagccacatttattccagcctaggatgcaacaatagaatgaaactcagtggacgaccctacagacacatgggagtgcttggaacttcaaaactctatgacattcggaaaactatctttactttcactccacagtttatagaccagcaacagttctacctggctctggacaacaagatgatagtggaaatgcttagaacagacctctcctacctctgtagccgctggcggatgacaggccagcccaccatcaccttccccatctcacacagcatgcttgatgaagatggaacaagcttgaattcaagtatcctggcagcactccgaaaaatgcaagatgggtattttggtggggcaagggttcaaacaggtaaattgtcagagtttttgacaacatcttgttgcacacacttgagcttcatggaccctggacctgagggtaagctgtacagtgaagattatgatgacaactatgattacctggaatctggcaactggatgaatgattatgattcaaccagtcatgctcgctgtggtgatgaagttgctcgttatttagatcaccttttggcgcacactgctccccatcctaaactagcccctacctcacagaagggagggctagatcggttccaagctgctgtgcaaacaacctgcgacttaatgtccttggtgaccaaggccaaggaactgcatgtacagaatgttcacatgtatcttcctacgaagttatttcaggcttcccggccttcattcaacttacttgattcacctcatccccgacaggagaaccaggttccctctgttcgtgtagaaatacatcttcctagagaccagtctggggaggtggactttaaagcactggttttacagttgaaggagacctcaagcttacaggaacaagctgatatcctctatatgctgtatactatgaaaggacctgactggaacactgaattgtataatgaacggagtgctacagtgagagagcttcttaccgagctgtatggcaaagtgggagaaattcgtcactggggcctgatccgatacatttctgggatcttaaggaagaaagtggaagcacttgatgaggcctgcacagaccttctctcccaccagaaacatttgacagtaggacttcctccagaacctcgagaaaagactatctctgcacctctgccctatgaggcgctcactcagctgatagatgaagccagtgaaggggatatgagcatttcaatccttacacaggaaataatggtatatctagccatgtatatgcgaacccagcctggcctctttgctgaaatgtttcgacttcgaattggtctgatcatacaagttatggcaacagaactggcccactcccttcgatgctcagctgaggaagccacagagggcctgatgaatctcagtccttcggccatgaagaatctcctgcatcacattctcagcggcaaggagtttggagtggaacgaagcgttcgtcccactgattcaaatgtcagtcctgctatttctatccacgagattggtgctgttggagcaaccaaaacagaacgaactgggatcatgcagttaaaaagtgagataaagcaggtggaatttcgtagactgtcaatctcagctgagagtcagtccaatggtggtcatcccctgggtatagatttgatgtcaccgtcttttatgtcacctggaacctctatgactccaagtagtgggtcctttcctagtgcatatgatcagcagtcatctaaagatagtcgtcaaggtcaatggcaacgccgaagaaggctggatggggcactgaatagagttccagttggattttatcagaaagtatggaaagttttgcagaagtgtcacggactttctgttgaagggtttgtccttccttcctctaccactagagagatgactccaggtgagattaaattctctgttcatgtggagtctgtcctgaatcgtgtacctcagccagagtaccgtcagctgctggttgaagccatccttgtcctcaccatgctggcagatattgaaattcatagcatcggaagcatcattgctgtggaaaaaatagtgcatattgccaatgacttgttccttcaagaacagaaaacccttggcgcagatgataccatgttggcaaaggatcccgcatctggcatctgtactcttctgtatgacagtgcacccagtggcaggtttggcaccatgacctacctctccaaggcagccgccacctacgtgcaggagttcctgccccacagcatctgtgccatgcaatgagggctttggttcctggcttctgggagccttttgacagctggtccctgcctcggttgattgtgcatggaactaaaatgttattgcctaatcactccaaccctgcccctttctgtcccatccttcccaagaagagagaactttttcgataaactaactactgtagaagaagtgaacacttacctggaggctcaccttgcagaaccagtgacaatcttatgagtataatgaacactcagccaggcctgtcatgattggctttatttctttcatcattcataaaagtttgcatgtgtttttattctctagatctgttaccaatatagttttctaactcctgtttggggagcaagtgttaataataacttattcctaaag

SEQ ID NO: 22584 - DNA, 6020 bp, Homo sapiens
  source 1..6020: mol_type = unassigned DNA
tccgcggcgccaggcctgagcggtgggagggctctgcggggcctggtgttcaggcgtcccaccacgagggtggagcagcgttggatacttgttccttagggaccgaaggctccggtggcacccgggctatttctcagaggacaattagtaacgtgtcgccatgaggagccggagtaactccggggtccggctggacggctacgctcgactggtgcaacagaccatcctgtgccatcagaatccagtgactggcttgcttccagccagctatgatcagaaagatgcttgggtccgagataatgtgtacagcatcttggctgtgtggggtttgggcctggcctatcggaagaatgcagaccgggatgaggataaggcaaaggcctatgaattggagcagagtgtagtgaagctgatgagaggactactgcactgcatgatcagacaggtggataaagtagaatccttcaaatatagtcagagtactaaggatagcctccatgcaaagtacaacaccaaaacctgtgccactgtagtgggtgatgatcaatggggacacctgcagttggatgctacctctgtgtacctgctcttcttagcccaaatgactgcctcaggactccatatcatccacagcctagatgaagtcaatttcatacagaaccttgtgttttacattgaagctgcatataaaactgctgacttcgggatatgggaacgtggagacaagaccaaccaagggatctcagagttgaatgccagttcagttggaatggcaaaggcagccctggaagcattagatgaactggatctgtttggtgtgaaaggtgggcctcaatcagttatccatgtcctggctgatgaagtacagcactgccagtctatcctaaattcactactgccccgtgcttcaacatcaaaagaggttgatgctagtctactctcagtggtttccttccctgcctttgcagtagaggatagccagttggtggagctcacaaaacaggaaatcatcaccaagcttcagggtcgttatggttgctgtcgctttctacgagatggatataaaactcctaaagaggatcccaatcgtctgtactatgaaccagctgagctgaagctatttgaaaacattgagtgtgaatggccattgttctggacatactttattcttgatggggtcttcagtggcaatgcagaacaggttcaagaatataaagaggctcttgaagcagtcctcatcaagggcaaaaatggagtcccacttctgccagagctgtacagtgttcctcctgacagggtcgatgaagaatatcagaatcctcacactgtggaccgagtccccatggggaaattgcctcacatgtggggtcagtctctatacattttaggaagcttgatggcagagggatttttagcccctggagaaattgatcccctgaatcgcaggttttctactgtaccgaagcccgatgttgtggttcaagtctccattctagctgaaacagaagaaatcaagaccattttgaaggacaagggaatttacgtggagaccattgctgaggtataccccatcagagtacaaccagctcgtattctcagccacatttattccagcctaggatgcaacaatagaatgaaactcagtggacgaccctacagacacatgggagtgcttggaacttcaaaactctatgacattcggaaaactatctttactttcactccacagtttatagaccagcaacagttctacctggctctggacaacaagatgatagtggaaatgcttagaacagacctctcctacctctgtagccgctggcggatgacaggccagcccaccatcaccttccccatctcacacagcatgcttgatgaagatggaacaagcttgaattcaagtatcctggcagcactccgaaaaatgcaagatgggtattttggtggggcaagggttcaaacaggtaaattgtcagagtttttgacaacatcttgttgcacacacttgagcttcatggaccctggacctgagggtaagctgtacagtgaagattatgatgacaactatgattacctggaatctggcaactggatgaatgattatgattcaaccagtcatgctcgctgtggtgatgaagttgctcgttatttagatcaccttttggcgcacactgctccccatcctaaactagcccctacctcacagaagggagggctagatcggttccaagctgctgtgcaaacaacctgcgacttaatgtccttggtgaccaaggccaaggaactgcatgtacagaatgttcacatgtatcttcctacgaagttatttcaggcttcccggccttcattcaacttacttgattcacctcatccccgacaggagaaccaggttccctctgttcgtgtagaaatacatcttcctagagaccagtctggggaggtggactttaaagcactggttttacagttgaaggagacctcaagcttacaggaacaagctgatatcctctatatgctgtatactatgaaaggacctgactggaacactgaattgtataatgaacggagtgctacagtgagagagcttcttaccgagctgtatggcaaagtgggagaaattcgtcactggggcctgatccgatacatttctgggatcttaaggaagaaagtggaagcacttgatgaggcctgcacagaccttctctcccaccagaaacatttgacagtaggacttcctccagaacctcgagaaaagactatctctgcacctctgccctatgaggcgctcactcagctgatagatgaagccagtgaaggggatatgagcatttcaatccttacacaggaaataatggtatatctagccatgtatatgcgaacccagcctggcctctttgctgaaatgtttcgacttcgaattggtctgatcatacaagttatggcaacagaactggcccactcccttcgatgctcagctgaggaagccacagagggcctgatgaatctcagtccttcggccatgaagaatctcctgcatcacattctcagcggcaaggagtttggagtggaacgaagcgttcgtcccactgattcaaatgtcagtcctgctatttctatccacgagattggtgctgttggagcaaccaaaacagaacgaactgggatcatgcagttaaaaagtgagataaagcaggtggaatttcgtagactgtcaatctcagctgagagtcagtcacctggaacctctatgactccaagtagtgggtcctttcctagtgcatatgatcagcagtcatctaaagatagtcgtcaaggtcaatggcaacgccgaagaaggctggatggggcactgaatagagttccagttggattttatcagaaagtatggaaagttttgcagaagtgtcacggactttctgttgaagggtttgtccttccttcctctaccactagagagatgactccaggtgagattaaattctctgttcatgtggagtctgtcctgaatcgtgtacctcagccagagtaccgtcagctgctggttgaagccatccttgtcctcaccatgctggcagatattgaaattcatagcatcggaagcatcattgctgtggaaaaaatagtgcatattgccaatgacttgttccttcaagaacagaaaacccttggcgcagatgataccatgttggcaaaggatcccgcatctggcatctgtactcttctgtatgacagtgcacccagtggcaggtttggcaccatgacctacctctccaaggcagccgccacctacgtgcaggagttcctgccccacagcatctgtgccatgcaatgagggctttggttcctggcttctgggagccttttgacagctggtccctgcctcggttgattgtgcatggaactaaaatgttattgcctaatcactccaaccctgcccctttctgtcccatccttcccaagaagagagaactttttcgataaactaactactgtagaagaagtgaacacttacctggaggctcaccttgcagaaccagtgacaatcttatgagtataatgaacactcagccaggcctgtcatgattggctttatttctttcatcattcataaaagtttgcatgtgtttttattctctagatctgttaccaatatagttttctaactcctgtttggggagcaagtgttaataataacttattcctaaagcttggtttttcttttttgtgattttattgtgtatatgagtggtgggtactttgggacattatttcaaatgagtaaactctaaattgttaaatatttatgctgctataaattagaattacctattctacgtgccttttcttaggaaaagagagtactggatcatggttttcttccttacttacaggttgcttcacactgagtgataatttaaaattgtttctatgtagaatcattgtctctactgttgccctctctgtgtctgcacacataatgcctctctcactttggtgaaatatcaaaaaaatgcaagtacagcatgcatatttaagaatttctgaactaacacttgaaatcacattttataaagattgttggtactcagagttgtatttgcagcagaaaatgcagaataacccagaaatggagcccggagcccaattccagagaggaagggaaagaagagacgatgcctggacaatgtcttatacatagggaacagagagggaatcagaggtggcttagttccctgaagacagccttatgcgcttaatccctgcctttgaaaaatgggccaatacacaacacagacaataatttgaagcgtctgtattcagcaaagataaatacagcagtccagtctataggtgctctacttagcattcttttcatgtgctcctggtctctgtctcactcacctactttctactacatccaactcaactccctgacaccctatccccccatctattcttaaactctttcatatatattttcacttcctaattctagtgtacatatccctgtatatcatggtatctgtgggcatatgtctgtttcttataaagacacatatttgtgtgtgtatgtgtgtgtgtgtgtgtgtgtgtgtataagcatacatgggaatttttctgaatgtaagcagttttgatgtgtctgtatatcaatctgtatctacatttgatggactgagtaagaatgttgcatgtgagagaagggatgtgactgtggactcagattgacacacacagattggtggaagaatagcttcagtcctcttccttcatcccatatgtaggtagccttgcttgacaaatgtttcttctaactctccttcttctgaattgtgcagagactctgttaacttccctttttgcacttagataacttcctacttcaaccccctcctttatcttggatttctaaagtttttccccaatattgggaatggtgagggtggggatgagagactctctgaacaattcttgcagaaccagtgacaatcttatgaatataatgaataagtaagcatatagtagggtgatagaatacagatagtagaaacaaagagaggacagcaaaccttttcagcacttctctcagagcaaatggaaacacacagtaagtagctttctgactacattattttctggtcacttttaaagaaagtttacaacctgttctgaaactatttgtcttttcactggttgtaagtgtaccccaatctcagggagtatatctgtagtgccacaggcaaaagatccactccttcccacactcatttgcctgaacttactcgaagggctgcatttctctgagtttacgaaattgtgtcattatggtccccatacagtggtatttaacttttaaagcaacttttaagaaaactcgacttgttttttgttcattttaagtgtgtggtactaaaaagacatgttagactttttttaaaaaagcacttatgttttgaaaatagaataaataataagaatttccaattaaatcatgtctggtgccaatgtgcaaaacttca

SEQ ID NO: 22585 - DNA, 6173 bp, Homo sapiens
  source 1..6173: mol_type = unassigned DNA
tcgcgcccgccccgcctcccgctcgcgtctcccgcaaggtggaggcggcgcagcggtcgttgacctgttggcggcggccgggcgggaggctgtgggccgcggcggtctcccggggttgaggggaggatgcaggagtcacacgcggaggccggactggactaagggggcaggagcggcgcctggggcgctgcggcggggctctagaccgcgggaagccagtgctagcgctggcgcgtggtgggcccctgaggccgccggagtccggagaggtacgcggaatccgcggcgccaggcctgagcggtgggagggctctgcggggcctggtgttcaggcgtcccaccacgagggtggagcagcgttggatacttgttccttagggaccgaaggctccggtggcacccgggctatttctcagaggacaattagtaacgtgtcgccatgaggagccggagtaactccggggtccggctggacggctacgctcgactggtgcaacagaccatcctgtgccatcagaatccagtgactggcttgcttccagccagctatgatcagaaagatgcttgggtccgagataatgtgtacagcatcttggctgtgtggggtttgggcctggcctatcggaagaatgcagaccgggatgaggataaggcaaaggcctatgaattggagcagagtgtagtgaagctgatgagaggactactgcactgcatgatcagacaggtggataaagtagaatccttcaaatatagtcagagtactaaggatagcctccatgcaaagtacaacaccaaaacctgtgccactgtagtgggtgatgatcaatggggacacctgcagttggatgctacctctgtgtacctgctcttcttagcccaaatgactgcctcaggactccatatcatccacagcctagatgaagtcaatttcatacagaaccttgtgttttacattgaagctgcatataaaactgctgacttcgggatatgggaacgtggagacaagaccaaccaagggatctcagagttgaatgccagttcagttggaatggcaaaggcagccctggaagcattagatgaactggatctgtttggtgtgaaaggtgggcctcaatcagttatccatgtcctggctgatgaagtacagcactgccagtctatcctaaattcactactgccccgtgcttcaacatcaaaagaggttgatgctagtctactctcagtggtttccttccctgcctttgcagtagaggatagccagttggtggagctcacaaaacaggaaatcatcaccaagcttcagggtcgttatggttgctgtcgctttctacgagatggatataaaactcctaaagaggatcccaatcgtctgtactatgaaccagctgagctgaagctatttgaaaacattgagtgtgaatggccattgttctggacatactttattcttgatggggtcttcagtggcaatgcagaacaggttcaagaatataaagaggctcttgaagcagtcctcatcaagggcaaaaatggagtcccacttctgccagagctgtacagtgttcctcctgacagggtcgatgaagaatatcagaatcctcacactgtggaccgagtccccatggggaaattgcctcacatgtggggtcagtctctatacattttaggaagcttgatggcagagggatttttagcccctggagaaattgatcccctgaatcgcaggttttctactgtaccgaagcccgatgttgtggttcaagtctccattctagctgaaacagaagaaatcaagaccattttgaaggacaagggaatttacgtggagaccattgctgaggtataccccatcagagtacaaccagctcgtattctcagccacatttattccagcctaggatgcaacaatagaatgaaactcagtggacgaccctacagacacatgggagtgcttggaacttcaaaactctatgacattcggaaaactatctttactttcactccacagtttatagaccagcaacagttctacctggctctggacaacaagatgatagtggaaatgcttagaacagacctctcctacctctgtagccgctggcggatgacaggccagcccaccatcaccttccccatctcacacagcatgcttgatgaagatggaacaagcttgaattcaagtatcctggcagcactccgaaaaatgcaagatgggtattttggtggggcaagggttcaaacaggtaaattgtcagagtttttgacaacatcttgttgcacacacttgagcttcatggaccctggacctgagggtaagctgtacagtgaagattatgatgacaactatgattacctggaatctggcaactggatgaatgattatgattcaaccagtcatgatgttcacatgtatcttcctacgaagttatttcaggcttcccggccttcattcaacttacttgattcacctcatccccgacaggagaaccaggttccctctgttcgtgtagaaatacatcttcctagagaccagtctggggaggtggactttaaagcactggttttacagttgaaggagacctcaagcttacaggaacaagctgatatcctctatatgctgtatactatgaaaggacctgactggaacactgaattgtataatgaacggagtgctacagtgagagagcttcttaccgagctgtatggcaaagtgggagaaattcgtcactggggcctgatccgatacatttctgggatcttaaggaagaaagtggaagcacttgatgaggcctgcacagaccttctctcccaccagaaacatttgacagtaggacttcctccagaacctcgagaaaagactatctctgcacctctgccctatgaggcgctcactcagctgatagatgaagccagtgaaggggatatgagcatttcaatccttacacaggaaataatggtatatctagccatgtatatgcgaacccagcctggcctctttgctgaaatgtttcgacttcgaattggtctgatcatacaagttatggcaacagaactggcccactcccttcgatgctcagctgaggaagccacagagggcctgatgaatctcagtccttcggccatgaagaatctcctgcatcacattctcagcggcaaggagtttggagtggaacgaagcgttcgtcccactgattcaaatgtcagtcctgctatttctatccacgagattggtgctgttggagcaaccaaaacagaacgaactgggatcatgcagttaaaaagtgagataaagcaggtggaatttcgtagactgtcaatctcagctgagagtcagtccaatggtggtcatcccctgggtatagatttgatgtcaccgtcttttatgtcacctggaacctctatgactccaagtagtgggtcctttcctagtgcatatgatcagcagtcatctaaagatagtcgtcaaggtcaatggcaacgccgaagaaggctggatggggcactgaatagagttccagttggattttatcagaaagtatggaaagttttgcagaagtgtcacggactttctgttgaagggtttgtccttccttcctctaccactagagagatgactccaggtgagattaaattctctgttcatgtggagtctgtcctgaatcgtgtacctcagccagagtaccgtcagctgctggttgaagccatccttgtcctcaccatgctggcagatattgaaattcatagcatcggaagcatcattgctgtggaaaaaatagtgcatattgccaatgacttgttccttcaagaacagaaaacccttggcgcagatgataccatgttggcaaaggatcccgcatctggcatctgtactcttctgtatgacagtgcacccagtggcaggtttggcaccatgacctacctctccaaggcagccgccacctacgtgcaggagttcctgccccacagcatctgtgccatgcaatgagggctttggttcctggcttctgggagccttttgacagctggtccctgcctcggttgattgtgcatggaactaaaatgttattgcctaatcactccaaccctgcccctttctgtcccatccttcccaagaagagagaactttttcgataaactaactactgtagaagaagtgaacacttacctggaggctcaccttgcagaaccagtgacaatcttatgagtataatgaacactcagccaggcctgtcatgattggctttatttctttcatcattcataaaagtttgcatgtgtttttattctctagatctgttaccaatatagttttctaactcctgtttggggagcaagtgttaataataacttattcctaaagcttggtttttcttttttgtgattttattgtgtatatgagtggtgggtactttgggacattatttcaaatgagtaaactctaaattgttaaatatttatgctgctataaattagaattacctattctacgtgccttttcttaggaaaagagagtactggatcatggttttcttccttacttacaggttgcttcacactgagtgataatttaaaattgtttctatgtagaatcattgtctctactgttgccctctctgtgtctgcacacataatgcctctctcactttggtgaaatatcaaaaaaatgcaagtacagcatgcatatttaagaatttctgaactaacacttgaaatcacattttataaagattgttggtactcagagttgtatttgcagcagaaaatgcagaataacccagaaatggagcccggagcccaattccagagaggaagggaaagaagagacgatgcctggacaatgtcttatacatagggaacagagagggaatcagaggtggcttagttccctgaagacagccttatgcgcttaatccctgcctttgaaaaatgggccaatacacaacacagacaataatttgaagcgtctgtattcagcaaagataaatacagcagtccagtctataggtgctctacttagcattcttttcatgtgctcctggtctctgtctcactcacctactttctactacatccaactcaactccctgacaccctatccccccatctattcttaaactctttcatatatattttcacttcctaattctagtgtacatatccctgtatatcatggtatctgtgggcatatgtctgtttcttataaagacacatatttgtgtgtgtatgtgtgtgtgtgtgtgtgtgtgtgtataagcatacatgggaatttttctgaatgtaagcagttttgatgtgtctgtatatcaatctgtatctacatttgatggactgagtaagaatgttgcatgtgagagaagggatgtgactgtggactcagattgacacacacagattggtggaagaatagcttcagtcctcttccttcatcccatatgtaggtagccttgcttgacaaatgtttcttctaactctccttcttctgaattgtgcagagactctgttaacttccctttttgcacttagataacttcctacttcaaccccctcctttatcttggatttctaaagtttttccccaatattgggaatggtgagggtggggatgagagactctctgaacaattcttgcagaaccagtgacaatcttatgaatataatgaataagtaagcatatagtagggtgatagaatacagatagtagaaacaaagagaggacagcaaaccttttcagcacttctctcagagcaaatggaaacacacagtaagtagctttctgactacattattttctggtcacttttaaagaaagtttacaacctgttctgaaactatttgtcttttcactggttgtaagtgtaccccaatctcagggagtatatctgtagtgccacaggcaaaagatccactccttcccacactcatttgcctgaacttactcgaagggctgcatttctctgagtttacgaaattgtgtcattatggtccccatacagtggtatttaacttttaaagcaacttttaagaaaactcgacttgttttttgttcattttaagtgtgtggtactaaaaagacatgttagactttttttaaaaaagcacttatgttttgaaaatagaataaataataagaatttccaattaaatcatgtctggtgccaatgtgcaaaacttca

SEQ ID NO: 22586 - DNA, 5944 bp, Homo sapiens
  source 1..5944: mol_type = unassigned DNA
cacgcggaggccggactggactaagggggcaggagcggcgcctggggcgctgcggcggggctctagaccgcgggaagccagtgctagcgctggcgcgtggtgggcccctgaggccgccggagtccggagaggtacgcggaatccgcggcgccaggcctgagcggtgggagggctctgcggggcctggtgttcaggcgtcccaccacgagggtggagcagcgttggatacttgttccttagggaccgaaggctccggtggcacccgggctatttctcagaggacaattagtaacgtgtcgccatgaggagccggagtaactccggggtccggctggacggctacgctcgactggtgcaacagaccatcctgtgccatcagaatccagtgactggcttgcttccagccagctatgatcagaaagatgcttgggtccgagataatgtgtacagcatcttggctgtgtggggtttgggcctggcctatcggaagaatgcagaccgggatgaggataaggcaaaggcctatgaattggagcagagtgtagtgaagctgatgagaggactactgcactgcatgatcagacaggtggataaagtagaatccttcaaatatagtcagagtactaaggatagcctccatgcaaagtacaacaccaaaacctgtgccactgtagtgggtgatgatcaatggggacacctgcagttggatgctacctctgtgtacctgctcttcttagcccaaatgactgcctcaggactccatatcatccacagcctagatgaagtcaatttcatacagaaccttgtgttttacattgaagctgcatataaaactgctgacttcgggatatgggaacgtggagacaagaccaaccaagggatctcagagttgaatgccagttcagttggaatggcaaaggcagccctggaagcattagatgaactggatctgtttggtgtgaaaggtgggcctcaatcagttatccatgtcctggctgatgaagtacagcactgccagtctatcctaaattcactactgccccgtgcttcaacatcaaaagaggttgatgctagtctactctcagtggtttccttccctgcctttgcagtagaggatagccagttggtggagctcacaaaacaggaaatcatcaccaagcttcagggtcgttatggttgctgtcgctttctacgagatggatataaaactcctaaagaggatcccaatcgtctgtactatgaaccagctgagctgaagctatttgaaaacattgagtgtgaatggccattgttctggacatactttattcttgatggggtcttcagtggcaatgcagaacaggttcaagaatataaagaggctcttgaagcagtcctcatcaagggcaaaaatggagtcccacttctgccagagctgtacagtgttcctcctgacagggtcgatgaagaatatcagaatcctcacactgtggaccgagtccccatggggaaattgcctcacatgtggggtcagtctctatacattttaggaagcttgatggcagagggatttttagcccctggagaaattgatcccctgaatcgcaggttttctactgtaccgaagcccgatgttgtggttcaagtctccattctagctgaaacagaagaaatcaagaccattttgaaggacaagggaatttacgtggagaccattgctgaggtataccccatcagagtacaaccagctcgtattctcagccacatttattccagcctaggatgcaacaatagaatgaaactcagtggacgaccctacagacacatgggagtgcttggaacttcaaaactctatgacattcggaaaactatctttactttcactccacagtttatagaccagcaacagttctacctggctctggacaacaagatgatagtggaaatgcttagaacagacctctcctacctctgtagccgctggcggatgacaggccagcccaccatcaccttccccatctcacacagcatgcttgatgaagatggaacaagcttgaattcaagtatcctggcagcactccgaaaaatgcaagatgggtattttggtggggcaagggttcaaacaggtaaattgtcagagtttttgacaacatcttgttgcacacacttgagcttcatggaccctggacctgagggtaagctgtacagtgaagattatgatgacaactatgattacctggaatctggcaactggatgaatgattatgattcaaccagtcatgatgttcacatgtatcttcctacgaagttatttcaggcttcccggccttcattcaacttacttgattcacctcatccccgacaggagaaccaggttccctctgttcgtgtagaaatacatcttcctagagaccagtctggggaggtggactttaaagcactggttttacagttgaaggagacctcaagcttacaggaacaagctgatatcctctatatgctgtatactatgaaaggacctgactggaacactgaattgtataatgaacggagtgctacagtgagagagcttcttaccgagctgtatggcaaagtgggagaaattcgtcactggggcctgatccgatacatttctgggatcttaaggaagaaagtggaagcacttgatgaggcctgcacagaccttctctcccaccagaaacatttgacagtaggacttcctccagaacctcgagaaaagactatctctgcacctctgccctatgaggcgctcactcagctgatagatgaagccagtgaaggggatatgagcatttcaatccttacacaggaaataatggtatatctagccatgtatatgcgaacccagcctggcctctttgctgaaatgtttcgacttcgaattggtctgatcatacaagttatggcaacagaactggcccactcccttcgatgctcagctgaggaagccacagagggcctgatgaatctcagtccttcggccatgaagaatctcctgcatcacattctcagcggcaaggagtttggagtggaacgaagcgttcgtcccactgattcaaatgtcagtcctgctatttctatccacgagattggtgctgttggagcaaccaaaacagaacgaactgggatcatgcagttaaaaagtgagataaagcagtcacctggaacctctatgactccaagtagtgggtcctttcctagtgcatatgatcagcagtcatctaaagatagtcgtcaaggtcaatggcaacgccgaagaaggctggatggggcactgaatagagttccagttggattttatcagaaagtatggaaagttttgcagaagtgtcacggactttctgttgaagggtttgtccttccttcctctaccactagagagatgactccaggtgagattaaattctctgttcatgtggagtctgtcctgaatcgtgtacctcagccagagtaccgtcagctgctggttgaagccatccttgtcctcaccatgctggcagatattgaaattcatagcatcggaagcatcattgctgtggaaaaaatagtgcatattgccaatgacttgttccttcaagaacagaaaacccttggcgcagatgataccatgttggcaaaggatcccgcatctggcatctgtactcttctgtatgacagtgcacccagtggcaggtttggcaccatgacctacctctccaaggcagccgccacctacgtgcaggagttcctgccccacagcatctgtgccatgcaatgagggctttggttcctggcttctgggagccttttgacagctggtccctgcctcggttgattgtgcatggaactaaaatgttattgcctaatcactccaaccctgcccctttctgtcccatccttcccaagaagagagaactttttcgataaactaactactgtagaagaagtgaacacttacctggaggctcaccttgcagaaccagtgacaatcttatgagtataatgaacactcagccaggcctgtcatgattggctttatttctttcatcattcataaaagtttgcatgtgtttttattctctagatctgttaccaatatagttttctaactcctgtttggggagcaagtgttaataataacttattcctaaagcttggtttttcttttttgtgattttattgtgtatatgagtggtgggtactttgggacattatttcaaatgagtaaactctaaattgttaaatatttatgctgctataaattagaattacctattctacgtgccttttcttaggaaaagagagtactggatcatggttttcttccttacttacaggttgcttcacactgagtgataatttaaaattgtttctatgtagaatcattgtctctactgttgccctctctgtgtctgcacacataatgcctctctcactttggtgaaatatcaaaaaaatgcaagtacagcatgcatatttaagaatttctgaactaacacttgaaatcacattttataaagattgttggtactcagagttgtatttgcagcagaaaatgcagaataacccagaaatggagcccggagcccaattccagagaggaagggaaagaagagacgatgcctggacaatgtcttatacatagggaacagagagggaatcagaggtggcttagttccctgaagacagccttatgcgcttaatccctgcctttgaaaaatgggccaatacacaacacagacaataatttgaagcgtctgtattcagcaaagataaatacagcagtccagtctataggtgctctacttagcattcttttcatgtgctcctggtctctgtctcactcacctactttctactacatccaactcaactccctgacaccctatccccccatctattcttaaactctttcatatatattttcacttcctaattctagtgtacatatccctgtatatcatggtatctgtgggcatatgtctgtttcttataaagacacatatttgtgtgtgtatgtgtgtgtgtgtgtgtgtgtgtgtataagcatacatgggaatttttctgaatgtaagcagttttgatgtgtctgtatatcaatctgtatctacatttgatggactgagtaagaatgttgcatgtgagagaagggatgtgactgtggactcagattgacacacacagattggtggaagaatagcttcagtcctcttccttcatcccatatgtaggtagccttgcttgacaaatgtttcttctaactctccttcttctgaattgtgcagagactctgttaacttccctttttgcacttagataacttcctacttcaaccccctcctttatcttggatttctaaagtttttccccaatattgggaatggtgagggtggggatgagagactctctgaacaattcttgcagaaccagtgacaatcttatgaatataatgaataagtaagcatatagtagggtgatagaatacagatagtagaaacaaagagaggacagcaaaccttttcagcacttctctcagagcaaatggaaacacacagtaagtagctttctgactacattattttctggtcacttttaaagaaagtttacaacctgttctgaaactatttgtcttttcactggttgtaagtgtaccccaatctcagggagtatatctgtagtgccacaggcaaaagatccactccttcccacactcatttgcctgaacttactcgaagggctgcatttctctgagtttacgaaattgtgtcattatggtccccatacagtggtatttaacttttaaagcaacttttaagaaaactcgacttgttttttgttcattttaagtgtgtggtactaaaaagacatgttagactttttttaaaaaagcacttatgttttgaaaatagaataaataataagaatttccaattaaatcatgtctggtgccaatgtgcaaaacttc

SEQ ID NO: 22587 - DNA, 1431 bp, Homo sapiens
  source 1..1431: mol_type = unassigned DNA
acgttagcctccggtcatcaaatagcaaaacccaaaacaacagcagatgatatcttccaagtgtctgctcgggacacggcttcagccctctgtggtcccctctccccggggggctttgggattcttgtcaagctccttcaagagcctgcaagcacttaaccagccacccagagttccctcactgaagatctgagcatgacccgggacgaggcactgccggactctcattctgcacaggacttctatgagaattatgagcccaaagagatcctgggcaggggcgttagcagtgtggtcaggcgatgcatccacaagcccacgagccaggagtacgccgtgaaggtcatcgacgtcaccggtggaggcagcttcagcccggaggaggtgcgggagctgcgagaagccacgctgaaggaggtggacatcctgcgcaaggtctcagggcaccccaacatcatacagctgaaggacacttatgagaccaacactttcttcttcttggtgtttgacctgatgaagagaggggagctctttgactacctcactgagaaggtcaccttgagtgagaaggaaaccagaaagatcatgcgagctctgctggaggtgatctgcaccttgcacaaactcaacatcgtgcaccgggacctgaagcccgagaacattctcttggatgacaacatgaacatcaagctcacagactttggcttttcctgccagctggagccgggagagaggctgcgagaggtctgcgggacccccagttacctggcccctgagattatcgagtgctccatgaatgaggaccacccgggctacgggaaagaggtggacatgtggagcactggcgtcatcatgtacacgctgctggccggctccccgcccttctggcaccggaagcagatgctgatgctgaggatgatcatgagcggcaactaccagtttggctcgcccgagtgggatgattactcggacaccgtgaaggacctggtctcccgattcctggtggtgcaaccccagaaccgctacacagcggaagaggccttggcacaccccttcttccagcagtacttggtggaggaagtgcggcacttcagcccccgggggaagttcaaggtgatcgctctgaccgtgctggcttcagtgcggatctactaccagtaccgccgggtgaagcctgtgacccgggagatcgtcatccgagacccctatgccctccggcctctgcgccggctcatcgacgcctacgctttccgaatctatggccactgggtgaagaaggggcagcagcagaaccgggcagcccttttcgagaacacacccaaggccgtgctcctctccctggccgaggaggactactgaggggctggccagtcagggagggctagggggcaggtggggaggggaagccatggaaatacaagtcaaaggggt

SEQ ID NO: 22588 - DNA, 1717 bp, Homo sapiens
  source 1..1717: mol_type = unassigned DNA
gatgatatcttccaagtgtctgctcgggacacggcttcagccctctgtggtcccctctccccggggggctttgggattcttgtcaagctccttcaagagcctgcaagcacttaaccagccacccagagttccctcactgaagatctgagcatgacccgggacgaggcactgccggactctcattctgcacaggacttctatgagaattatgagcccaaagagatcctgggcaggggcgttagcagtgtggtcaggcgatgcatccacaagcccacgagccaggagtacgccgtgaaggtcatcgacgtcaccggtggaggcagcttcagcccggaggaggtgcgggagctgcgagaagccacgctgaaggaggtggacatcctgcgcaaggtctcagggcaccccaacatcatacagctgaaggacacttatgagaccaacactttcttcttcttggtgtttgacctatgggaagacactgatacaatggagatggaacagaaatggtgcttgggctgggactctcccaagtccaccaacttcagggcccagggcagggcaaggatgaagagaggggagctctttgactacctcactgagaaggtcaccttgagtgagaaggaaaccagaaagatcatgcgagctctgctggaggtgatctgcaccttgcacaaactcaacatcgtgcaccgggacctgaagcccgagaacattctcttggatgacaacatgaacatcaagctcacagactttggcttttcctgccagctggagccgggagagaggctgcgagaggtctgcgggacccccagttacctggcccctgagattatcgagtgctccatgaatgaggaccacccgggctacgggaaagaggtggacatgtggagcactggcgtcatcatgtacacgctgctggccggctccccgcccttctggcaccggaagcagatgctgatgctgaggatgatcatgagcggcaactaccagtttggctcgcccgagtgggatgattactcggacaccgtgaaggacctggtctcccgattcctggtggtgcaaccccagaaccgctacacagcggaagaggccttggcacaccccttcttccagcagtacttggtggaggaagtgcggcacttcagcccccgggggaagttcaaggtgatcgctctgaccgtgctggcttcagtgcggatctactaccagtaccgccgggtgaagcctgtgacccgggagatcgtcatccgagacccctatgccctccggcctctgcgccggctcatcgacgcctacgctttccgaatctatggccactgggtgaagaaggggcagcagcagaaccgggcagcccttttcgagaacacacccaaggccgtgctcctctccctggccgaggaggactactgaggggctggccagtcagggagggctagggggcaggtggggaggggaagccatggaaatacaagtcaaaggggtgagatgcgtgcaggcctctgcagaaggagcacttggccctggccaggaacccctggaactgaggccacgatcccctctcaaaggctgtgcacaagggaagtgggtgttcccaccacacagcaatacctgcaggctggggcaggccctgggtgggcagagatcacacgtggcctgagaaccaggaaccccctgctcctctacttcctagatgagccaccatctccatttctcttta

SEQ ID NO: 22589 - DNA, 1566 bp, Homo sapiens
  source 1..1566: mol_type = unassigned DNA
gatgatatcttccaagtgtctgctcgggacacggcttcagccctctgtggtcccctctccccggggggctttgggattcttgtcaagctccttcaagagcctgcaagcacttaaccagccacccagagttccctcactgaagatctgagcatgacccgggacgaggcactgccggactctcattctgcacaggacttctatgagaattatgagcccaaagagatcctgggcaggggcgttagcagtgtggtcaggcgatgcatccacaagcccacgagccaggagtacgccgtgaaggtcatcgacgtcaccggtggaggcagcttcagcccggaggaggtgcgggagctgcgagaagccacgctgaaggaggtggacatcctgcgcaaggtctcagggcaccccaacatcagatgaagagaggggagctctttgactacctcactgagaaggtcaccttgagtgagaaggaaaccagaaagatcatgcgagctctgctggaggtgatctgcaccttgcacaaactcaacatcgtgcaccgggacctgaagcccgagaacattctcttggatgacaacatgaacatcaagctcacagactttggcttttcctgccagctggagccgggagagaggctgcgagaggtctgcgggacccccagttacctggcccctgagattatcgagtgctccatgaatgaggaccacccgggctacgggaaagaggtggacatgtggagcactggcgtcatcatgtacacgctgctggccggctccccgcccttctggcaccggaagcagatgctgatgctgaggatgatcatgagcggcaactaccagtttggctcgcccgagtgggatgattactcggacaccgtgaaggacctggtctcccgattcctggtggtgcaaccccagaaccgctacacagcggaagaggccttggcacaccccttcttccagcagtacttggtggaggaagtgcggcacttcagcccccgggggaagttcaaggtgatcgctctgaccgtgctggcttcagtgcggatctactaccagtaccgccgggtgaagcctgtgacccgggagatcgtcatccgagacccctatgccctccggcctctgcgccggctcatcgacgcctacgctttccgaatctatggccactgggtgaagaaggggcagcagcagaaccgggcagcccttttcgagaacacacccaaggccgtgctcctctccctggccgaggaggactactgaggggctggccagtcagggagggctagggggcaggtggggaggggaagccatggaaatacaagtcaaaggggtgagatgcgtgcaggcctctgcagaaggagcacttggccctggccaggaacccctggaactgaggccacgatcccctctcaaaggctgtgcacaagggaagtgggtgttcccaccacacagcaatacctgcaggctggggcaggccctgggtgggcagagatcacacgtggcctgagaaccaggaaccccctgctcctctacttcctagatgagccaccatctccatttctcttta

SEQ ID NO: 22590 - DNA, 3198 bp, Homo sapiens
  source 1..3198: mol_type = unassigned DNA
ccatcctggttcagccactgacagacagctccccaatccagcactctgcctgctccttcttgtatccaaccctccaaaaggcagggacaagggacagaagaccatgtgcaaggcctggaggaagtgggtcagcacaggcctgtgaacaagccaggccagtcttggcggcccaagtggagctcacctctccctcccctctcctctcctccccttgccctcaaaatagctccctgagctgccaggccaagaccctcccattgcaggggaggcggggcgtgctgcccagagccaggctttaaatccccttgaggctggggagctccactccttggctggaggcagtgctgaggccgccgtcccctctaccatcagtccagtccggcccgccctcctgcagccatgtcccggcccctgtcagaccaagagaaaagaaagcaaatcagtgtgcgtggcctggccggcgtggagaacgtgactgagctgaaaaagaacttcaaccggcacctgcatttcacactcgtaaaggaccgcaatgtggccaccccacgagactactactttgctctggcccataccgtgcgcgaccacctcgtggggcgctggatccgcacgcagcagcactactatgagaaggaccccaagaggatctactacctgtctttagagttctatatgggacggacgctacagaacaccatggtgaacctggccttagagaatgcctgtgacgaggccacctaccagctgggcctggacatggaggagctggaggaaattgaggaggatgcggggctgggcaacgggggcctgggccggctggcagcctgctttcttgactccatggcaacactgggcctggccgcctatggctacgggattcgctatgagtttgggatttttaaccagaagatctccgggggctggcagatggaggaggccgatgactggcttcgctacggcaacccctgggagaaggcccggcccgagttcacgctacctgtgcacttctacggccatgtggagcacaccagccagggtgccaagtgggtggacacacaggtggtactggccatgccctacgatacgcccgtgcctggctatcgcaacaatgttgtcaacaccatgcgcctctggtctgccaaggctcccaatgacttcaacctcaaggacttcaatgtcggtggctacatccaggctgtgttggaccgaaacctggcggagaacatctctcgtgtcctgtaccccaatgataatttcttcgaagggaaggagctgcggctgaagcaggagtatttcgtggtggctgccaccctccaggacatcatccgtcgcttcaagtcttccaagttcggctgccgtgatcccgtgcgcacgaacttcgatgccttcccagataaggtggccatccagctcaatgacacccacccctccctggccatccccgagctgatgaggatcctggtggacctggaacggatggactgggacaaggcgtgggatgtgacagtgaggacctgtgcctacaccaaccacacggtgctgcccgaggccctggagcgctggccggtgcacctcttggagacgctgctgccgcggcacctccagatcatctacgagatcaaccagcgcttcctcaaccgggtggcggccgcattcccaggggacgtagaccggctgcggcgcatgtcgctggtggaggagggcgcagtgaagcgcatcaacatggcacacctgtgcatcgcggggtcgcacgccgtcaacggcgtggcgcgcatccactccgagatcctcaagaagaccatcttcaaagacttctatgagctggagcctcataagttccagaataagaccaacggcatcacccctcggcgctggctggttctgtgtaaccccgggctggcagaggtcattgctgagcgcatcggggaggacttcatctctgacctggaccagctgcgcaaactgctctcctttgtggatgatgaagctttcattcgggatgtggccaaagtgaagcaggaaaacaagttgaagtttgctgcctacctagagagggaatacaaagtccacatcaaccccaactcactcttcgacatccaggtgaagcggattcacgaatataaacgacagctcctcaactgcctccatgtcatcaccctgtacaaccgcatcaagagggagcccaataagttttttgtgcctcggactgtgatgattggagggaaggctgcacctgggtaccacatggccaagatgatcatcagactcgtcacagccatcggggatgtggtcaaccatgacccggcagtgggtgaccgcctccgtgtcatcttcctggagaactaccgagtctcactggccgagaaagtgatcccagctgcagacctctctgagcagatctccactgcgggcactgaagcctcaggcaccggcaacatgaagttcatgctcaacggggctctgaccattggcaccatggacggggccaatgtggagatggcagaagaggcgggagaggaaaacttcttcatctttggcatgcgggtggaggatgtggataagcttgaccaaagagggtacaatgcccaggagtactacgatcgcattcctgagcttcggcaggtcattgagcagctgagcagtggcttcttctcccccaaacagcccgacctgttcaaggacattgtcaatatgctcatgcaccatgaccggtttaaagtcttcgcagattatgaagactacattaaatgccaggagaaagtcagcgccttgtacaagaacccaagagagtggacgcggatggtgatccggaacatagccacctctggcaagttctccagtgaccgcaccattgcccagtatgcccgggagatctggggtgtggagccttcccgccagcgcctgccagccccggatgaggccatctgagcctccagaccagaccccaaaccagcccttgagtctgtcacactctcttgggccagccccagcacctcatgcagagggtggggtactggagttagatctctaagcccctcctggaaccctcattttccccactctcaatgtcccagtgtccagcgtgactaaggacacgggcccccttccgtcctcgggctcccggtcccctcctatttatggggtctgaccaactgcacccactccctaataaattcattctccttgggagcctcctta

SEQ ID NO: 22591 - DNA, 2594 bp, Homo sapiens
  source 1..2594: mol_type = unassigned DNA
actccttggctggaggcagtgctgaggccgccgtcccctctaccatcagtccagtccggcccgccctcctgcagccatgtcccggcccctgtcagaccaagagaaaagaaagcaaatcagtgtgcgtggcctggccggcgtggagaacgtgactgagctgaaaaagaacttcaaccggcacctgcatttcacactcgtaaaggaccgcaatgtggccaccccacgagactactactttgctctggcccataccgtgcgcgaccacctcgtggggcgctggatccgcacgcagcagcactactatgagaaggaccccaagaggatctactacctgtctttagagttctatatgggacggacgctacagaacaccatggtgaacctggccttagagaatgcctgtgacgaggccacctaccaggtgggcctgggccggctggcagcctgctttcttgactccatggcaacactgggcctggccgcctatggctacgggattcgctatgagtttgggatttttaaccagaagatctccgggggctggcagatggaggaggccgatgactggcttcgctacggcaacccctgggagaaggcccggcccgagttcacgctacctgtgcacttctacggccatgtggagcacaccagccagggtgccaagtgggtggacacacaggtggtactggccatgccctacgatacgcccgtgcctggctatcgcaacaatgttgtcaacaccatgcgcctctggtctgccaaggctcccaatgacttcaacctcaaggacttcaatgtcggtggctacatccaggctgtgttggaccgaaacctggcggagaacatctctcgtgtcctgtaccccaatgataatttcttcgaagggaaggagctgcggctgaagcaggagtatttcgtggtggctgccaccctccaggacatcatccgtcgcttcaagtcttccaagttcggctgccgtgatcccgtgcgcacgaacttcgatgccttcccagataaggtggccatccagctcaatgacacccacccctccctggccatccccgagctgatgaggatcctggtggacctggaacggatggactgggacaaggcgtgggatgtgacagtgaggacctgtgcctacaccaaccacacggtgctgcccgaggccctggagcgctggccggtgcacctcttggagacgctgctgccgcggcacctccagatcatctacgagatcaaccagcgcttcctcaaccgggtggcggccgcattcccaggggacgtagaccggctgcggcgcatgtcgctggtggaggagggcgcagtgaagcgcatcaacatggcacacctgtgcatcgcggggtcgcacgccgtcaacggcgtggcgcgcatccactccgagatcctcaagaagaccatcttcaaagacttctatgagctggagcctcataagttccagaataagaccaacggcatcacccctcggcgctggctggttctgtgtaaccccgggctggcagaggtcattgctgagcgcatcggggaggacttcatctctgacctggaccagctgcgcaaactgctctcctttgtggatgatgaagctttcattcgggatgtggccaaagtgaagcaggaaaacaagttgaagtttgctgcctacctagagagggaatacaaagtccacatcaaccccaactcactcttcgacatccaggtgaagcggattcacgaatataaacgacagctcctcaactgcctccatgtcatcaccctgtacaaccgcatcaagagggagcccaataagttttttgtgcctcggactgtgatgattggagggaaggctgcacctgggtaccacatggccaagatgatcatcagactcgtcacagccatcggggatgtggtcaaccatgacccggcagtgggtgaccgcctccgtgtcatcttcctggagaactaccgagtctcactggccgagaaagtgatcccagctgcagacctctctgagcagatctccactgcgggcactgaagcctcaggcaccggcaacatgaagttcatgctcaacggggctctgaccattggcaccatggacggggccaatgtggagatggcagaagaggcgggagaggaaaacttcttcatctttggcatgcgggtggaggatgtggataagcttgaccaaagagggtacaatgcccaggagtactacgatcgcattcctgagcttcggcaggtcattgagcagctgagcagtggcttcttctcccccaaacagcccgacctgttcaaggacattgtcaatatgctcatgcaccatgaccggtttaaagtcttcgcagattatgaagactacattaaatgccaggagaaagtcagcgccttgtacaagaacccaagagagtggacgcggatggtgatccggaacatagccacctctggcaagttctccagtgaccgcaccattgcccagtatgcccgggagatctggggtgtggagccttcccgccagcgcctgccagccccagcacctcatgcagagggtggggtactggagttagatctctaagcccctcctggaaccctca

SEQ ID NO: 22592 - DNA, 4134 bp, Homo sapiens
  source 1..4134: mol_type = unassigned DNA
cgcagtgccgggcgccagagcagcggcgccagagcagctgcaccatcccggcgttcgcgtgtgccgccgctttcctcctccatctcttttcctccgcctccgccggcgcgatggcgaagccgctgacggacagcgagaagcggaagcagatcagcgtgcgcggcctggcggggctaggcgacgtggccgaggtgcggaagagcttcaaccggcacttgcacttcacgctggtcaaggaccgcaatgtggccacgccccgcgactacttcttcgcgctggcgcacacggtgcgcgaccacctcgtgggccgctggatccgcacgcagcagcactactacgagcgcgaccccaagcgcatttattatctttccctggaattctacatgggtcgcacgctgcagaacacgatggtgaacctgggccttcagaatgcctgcgatgaagccatctatcagttggggttagacttggaggaactcgaggagatagaagaagatgctggccttgggaatggaggcctggggaggctggcagcgtgtttccttgactcaatggctaccttgggcctggcagcatacggctatggaatccgctatgaatttgggatttttaaccagaagattgtcaatggctggcaggtagaggaggccgatgactggctgcgctacggcaacccctgggagaaagcgcggcctgagtatatgcttcccgtgcacttctacggacgcgtggagcacacccccgacggcgtgaagtggctggacacacaggtggtgctggccatgccctacgacaccccagtgcccggctacaagaacaacaccgtcaacaccatgcggctgtggtccgccaaggctcccaacgacttcaagctgcaggacttcaacgtgggagactacatcgaggcggtcctggaccggaacttggctgagaacatctccagggtcctgtatccaaatgataacttctttgaggggaaggagctgcggctgaagcaggagtacttcgtggtggccgccacgctccaggacatcatccgccgcttcaagtcgtccaagttcggctgccgggaccctgtgagaacctgtttcgagacgttcccagacaaggtggccatccagctgaacgacacccaccccgccctctccatccctgagctcatgcggatcctggtggacgtggagaaggtggactgggacaaggcctgggaaatcacgaagaagacctgtgcatacaccaaccacactgtgctgcctgaggccttggagcgctggcccgtgtccatgtttgagaagctgctgccgcggcacctggagataatctatgccatcaaccagcggcacctggaccacgtggccgcgctgtttcccggcgatgtggaccgcctgcgcaggatgtctgtgatcgaggagggggactgcaagcggatcaacatggcccacctgtgtgtgattgggtcccatgctgtcaatggtgtggcgaggatccactcggagatcgtgaaacagtcggtctttaaggatttttatgaactggagccagagaagttccagaataagaccaatggcatcaccccccgccggtggctgctgctgtgcaacccggggctggccgataccatcgtggagaaaattggggaggagttcctgactgacctgagccagctgaagaagctgctgccgctggtcagtgacgaggtgttcatcagggacgtggccaaggtcaaacaggagaacaagctcaagttctcggccttcctggagaaggagtacaaggtgaagatcaacccctcctccatgttcgatgtgcatgtgaagaggatccacgagtacaagcggcagctgctcaactgcctgcacgtcgtcaccctgtacaatcgaatcaagagagacccggccaaggcttttgtgcccaggactgttatgattgggggcaaggcagcgcccggttaccacatggccaagctgatcatcaagttggtcacctccatcggcgacgtcgtcaatcatgacccagttgtgggtgacaggttgaaagtgatcttcctggagaactaccgtgtgtccttggctgagaaagtgatcccggccgctgatctgtcgcagcagatctccactgcaggcaccgaggcctcaggcacaggcaacatgaagttcatgctcaacggggccctcaccatcggcaccatggacggcgccaacgtggagatggccgaggaggccggggccgagaacctcttcatcttcggcctgcgggtggaggatgtcgaggccttggaccggaaagggtacaatgccagggagtactacgaccacctgcccgagctgaagcaggccgtggaccagatcagcagtggctttttttctcccaaggagccagactgcttcaaggacatcgtgaacatgctgatgcaccatgacaggttcaaggtgtttgcagactatgaagcctacatgcagtgccaggcacaggtggaccagctgtaccggaaccccaaggagtggaccaagaaggtcatcaggaacatcgcctgctcgggcaagttctccagtgaccggaccatcacggagtatgcacgggagatctggggtgtggagccctccgacctgcagatcccgccccccaacatcccccgggactaggcacaccctgccttggcgggaccagcgggcatttgttttcttgctgactttgcacctccttttttccccaaacactttgccagccactggtggtccctgcttttctgagtaccatgtttccaggaggggccatgggggtcagggtggttttgagagagcagggtaaggaaggaatgtgctagaagtgctcctagtttcttgtaaaggaagccagagttgacagtacaaagggtcgtggccagccctgcagcttcagcacctgccccacccagagtgggagtcaggtggagccacctgctgggctcccccagaactttgcacacatcttgctatgtattagccgatgtctttagtgttgagcctctggattctggggtctgggccagtggccatagtgaagcctgggaatgagtgttactgcagcatctgggctgccagccacagggaagggccaagccccatgtagccccagtcatcctgcccagccctgcctcctggccatgccgggaggggtcggatcctctaggcatcgccttcacagccccctgccccctgccctctgtcctggctctgcacctggtatatgggtcatggacccagatggggctttccctttgtagccatccaatgggcattgtgtgggtgcttggaacccgggatgactgagggggacactggagtgggtgcttgtgtctgctgtctcagaggccttggtcaggatgaagttggctgacacagcttagcttggttttgcttattcaaaagagaaaataactacacatggaaatgaaactagctgaagccttttcttgttttagcaactgaaaattgtacttggtcacttttgtgcttgaggaggcccattttctgcctggcagggggcaggtctgtgccctcccgctgactcctgctgtgtcctgaggtgcatttcctgttgtacacacaagggccaggctccattctccctccctttccaccagtgccacagcctcgtctggaaaaaggaccaggggtcccggaggaacccatttgtgctctgcttggacagcaggcctggcactgggaggtgggggtgagcccctcacagccttgcccctccccaaggctggcaacctgcctcccattgcccaagagagagggcagggaacaggctactgtccttccctgtggaattgccgagaaatctagcaccttgcatgctggatctgggctgcggggaggctctttttctccctggcctccagtgcccaccaggaggatctgcgcacggtgcacagcccaccagagcactacagccttttattgagtggggcaagtgctgggctgtggtcgtgccctgacagcatcttccccaggcagcggctctgtggaggaggccatactcccctagttggccactggggccaccaccctgaccaccactgtgcccctcattgttactgccttgtgagataaaaactgattaaacctttgtggctgtggttggctgaca

SEQ ID NO: 22593 - DNA, 734 bp, Homo sapiens
  source 1..734: mol_type = unassigned DNA
tgaaacatcaccacacagtaccaccatccgtcacacctaaagcattggacaggagtcctccgtgtcctgaaatgttcactcgggcagcgcccggttaccacatggccaagctgatcatcaagttggtcacctccatcggcgacgtcgtcaatcatgacccagttgtgggtgacaggttgaaagtgatcttcctggagaactaccgtgtgtccttggctgagaaagtgatcccggccgctgatctgtcgcagcagatctccactgcaggcaccgaggcctcaggcacaggcaacatgaagttcatgctcaacggggccctcaccatcggcaccatggacggcgccaacgtggagatggccgaggaggccggggccgagaacctcttcatcttcggcctgcgggtggaggatgtcgaggccttggaccggaaagggtacaatgccagggagtactacgaccacctgcccgagctgaagcaggccgtggaccagatcagcagtggctttttttctcccaaggagccagactgcttcaaggacatcgtgaacatgctgatgcaccatgacaggttcaaggtgtttgcagactatgaagcctacatgcagtgccaggcacaggtggaccagctgtaccggaaccccaaggagtggaccaagaaggtcatcaggaacatcgcctgctcgggcaagttctccagtgaccggaccatcacggagtatgcacgggagatctgg

SEQ ID NO: 22594 - DNA, 1411 bp, Homo sapiens
  source 1..1411: mol_type = unassigned DNA
ggccaggaacgccagccgttcacgcgttcggtcctccttggctgactcaccgccctggccgccgcaccatggacgcccccaggcaggtggtcaactttgggcctggtcccgccaagctgccgcactcagtgttgttagagatacaaaaggaattattagactacaaaggagttggcattagtgttcttgaaatgagtcacaggtcatcagattttgccaagattattaacaatacagagaatcttgtgcgggaattgctagctgttccagacaactataaggtgatttttctgcaaggaggtgggtgcggccagttcagtgctgtccccttaaacctcattggcttgaaagcaggaaggtgtgctgactatgtggtgacaggagcttggtcagctaaggccgcagaagaagccaagaagtttgggactataaatatcgttcaccctaaacttgggagttatacaaaaattccagatccaagcacctggaacctcaacccagatgcctcctacgtgtattattgcgcaaatgagacggtgcatggtgtggagtttgactttatacccgatgtcaagggagcagtactggtttgtgacatgtcctcaaacttcctgtccaagccagtggatgtttccaagtttggtgtgatttttgctggtgcccagaagaatgttggctctgctggggtcaccgtggtgattgtccgtgatgacctgctggggtttgccctccgagagtgcccctcggtcctggaatacaaggtgcaggctggaaacagctccttgtacaacacgcctccatgtttcagcatctacgtcatgggcttggttctggagtggattaaaaacaatggaggtgccgcggccatggagaagcttagctccatcaaatctcaaacaatttatgagattattgataattctcaaggattctacgtgtctgtgggaggcatccgggcctctctgtataatgctgtcacaattgaagacgttcagaagctggccgccttcatgaaaaaatttttggagatgcatcagctatgaacacatcctaaccaggatatactctgttcttgaacaacatacaaagtttaaagtaacttggggatggctacaaaaagttaacacagtatttttctcaaatgaacatgtttattgcagattcttcttttttgaaagaacaacagcaaaacatccacaactctgtaaagctggtgggacctaatgtcaccttaattctgacttgaactggaagcattttaagaaatcttgttgcttttctaacaaattcccgcgtattttgcctttgctgctactttttctagttagatttcaaacttgcctgtggacttaataatgcaagttgcgattaattatttctggagtcatgggaacacacagcacagagggta

SEQ ID NO: 22595 - DNA, 2188 bp, Homo sapiens
  source 1..2188: mol_type = unassigned DNA
ggccaggaacgccagccgttcacgcgttcggtcctccttggctgactcaccgccctggccgccgcaccatggacgcccccaggcaggtggtcaactttgggcctggtcccgccaagctgccgcactcagtgttgttagagatacaaaaggaattattagactacaaaggagttggcattagtgttcttgaaatgagtcacaggtcatcagattttgccaagattattaacaatacagagaatcttgtgcgggaattgctagctgttccagacaactataaggtgatttttctgcaaggaggtgggtgcggccagttcagtgctgtccccttaaacctcattggcttgaaagcaggaaggtgtgctgactatgtggtgacaggagcttggtcagctaaggccgcagaagaagccaagaagtttgggactataaatatcgttcaccctaaacttgggagttatacaaaaattccagatccaagcacctggaacctcaacccagatgcctcctacgtgtattattgcgcaaatgagacggtgcatggtgtggagtttgactttatacccgatgtcaagggagcagtactggtttgtgacatgtcctcaaacttcctgtccaagccagtggatgtttccaagtttggtgtgatttttgctggtgcccagaagaatgttggctctgctggggtcaccgtggtgattgtccgtgatgacctgctggggtttgccctccgagagtgcccctcggtcctggaatacaaggtgcaggctggaaacagctccttgtacaacacgcctccatgtttcagcatctacgtcatgggcttggttctggagtggattaaaaacaatggaggtgccgcggccatggagaagcttagctccatcaaatctcaaacaatttatgagattattgataattctcaaggattctacgtttgtccagtggagccccaaaatagaagcaagatgaatattccattccgcattggcaatgccaaaggagatgatgctttagaaaaaagatttcttgataaagctcttgaactcaatatgttgtccttgaaagggcataggtctgtgggaggcatccgggcctctctgtataatgctgtcacaattgaagacgttcagaagctggccgccttcatgaaaaaatttttggagatgcatcagctatgaacacatcctaaccaggatatactctgttcttgaacaacatacaaagtttaaagtaacttggggatggctacaaaaagttaacacagtatttttctcaaatgaacatgtttattgcagattcttcttttttgaaagaacaacagcaaaacatccacaactctgtaaagctggtgggacctaatgtcaccttaattctgacttgaactggaagcattttaagaaatcttgttgcttttctaacaaattcccgcgtattttgcctttgctgctactttttctagttagatttcaaacttgcctgtggacttaataatgcaagttgcgattaattatttctggagtcatgggaacacacagcacagagggtaggggggccctctaggtgctgaatctacacatctgtggggtctcctgggttcagcggctgttgattcaaggtcaacattgaccattggaggagtggtttaagagtgccaggcgaagggcaaactgtagatcgatctttatgctgttattacaggagaagtgacatactttatatatgtttatattagcaaggtctgtttttaataccatatactttatatttctatacatttatatttctaataatacagttatcactgatatatgtagacacttttagaatttattaaatccttgaccttgtgcattatagcattccattagcaagagttgtaccccctccccagtcttcgccttcctctttttaagctgttttatgaaaaagacctagaagttcttgattcatttttaccattctttccataggtagaagagaaagttgattggttggttgtttttcaattatgccattaaactaaacatttctgttaaattaccctatcctttgttctctactgttttctttgtaatgtatgactacgagagtgatactttgctgaaaagtctttcccctattgtttatctattgtcagtattttatgttgaatatgtaaagaacattaaagtcctaaaacatctaa

SEQ ID NO: 22596 - DNA, 1476 bp, Homo sapiens
  source 1..1476: mol_type = unassigned DNA
agactctcaccgcagcggccaggaacgccagccgttcacgcgttcggtcctccttggctgactcaccgccctggccgccgcaccatggacgcccccaggcaggtggtcaactttgggcctggtcccgccaagctgccgcactcagtgttgttagagatacaaaaggaattattagactacaaaggagttggcattagtgttcttgaaatgagtcacaggtcatcagattttgccaagattattaacaatacagagaatcttgtgcgggaattgctagctgttccagacaactataaggtgatttttctgcaaggaggtgggtgcggccagttcagtgctgtccccttaaacctcattggcttgaaagcaggaaggtgtgctgactatgtggtgacaggagcttggtcagctaaggccgcagaagaagccaagaagtttgggactataaatatcgttcaccctaaacttgggagttatacaaaaattccagatccaagcacctggaacctcaacccagatacccgatgtcaagggagcagtactggtttgtgacatgtcctcaaacttcctgtccaagccagtggatgtttccaagtttggtgtgatttttgctggtgcccagaagaatgttggctctgctggggtcaccgtggtgattgtccgtgatgacctgctggggtttgccctccgagagtgcccctcggtcctggaatacaaggtgcaggctggaaacagctccttgtacaacacgcctccatgtttcagcatctacgtcatgggcttggttctggagtggattaaaaacaatggaggtgccgcggccatggagaagcttagctccatcaaatctcaaacaatttatgagattattgataattctcaaggattctacgtttgtccagtggagccccaaaatagaagcaagatgaatattccattccgcattggcaatgccaaaggagatgatgctttagaaaaaagatttcttgataaagctcttgaactcaatatgttgtccttgaaagggcataggtctgtgggaggcatccgggcctctctgtataatgctgtcacaattgaagacgttcagaagctggccgccttcatgaaaaaatttttggagatgcatcagctatgaacacatcctaaccaggatatactctgttcttgaacaacatacaaagtttaaagtaacttggggatggctacaaaaagttaacacagtatttttctcaaatgaacatgtttattgcagattcttcttttttgaaagaacaacagcaaaacatccacaactctgtaaagctggtgggacctaatgtcaccttaattctgacttgaactggaagcattttaagaaatcttgttgcttttctaacaaattcccgcgtattttgcctttgctgctactttttctagttagatttcaaacttgcctgtggacttaataatgcaagttgcgattaattatttctg

SEQ ID NO: 22597 - DNA, 3584 bp, Homo sapiens
  source 1..3584: mol_type = unassigned DNA
tttagaaaaaagaaatcctctttttagaacatctcttggtggtaccatcagaaatgtcttccttaagtggaaaagtccaaaccgttttgggccttgtagagccaagcaaactgggccgtaccctgacccatgaacacctggccatgacctttgactgctgttactgtccacctcccccgtgccaggaagctatttccaaagaacctatcgtgatgaaaaatttatattggattcagaaaaacgcctattcccataaagaaaaccttcaattaaatcaggagacagaagccataaaggaagaactgttgtattttaaagctaatggtggaggggctttggtggaaaacacaaccactgggattagccgagacacacagacgttgaagaggcttgcagaagagactggcgtccatatcatatctggagccgggttttatgtggatgcaactcactcctcagagaccagggccatgtcagtggagcagcttaccgatgtccttatgaatgaaattctccatggagctgatggaaccagtatcaagtgtggcattattggagaaattggttgctcctggcctttgactgagagtgaaagaaaggttctccaggccacagctcatgcccaggctcagcttggttgtcctgttattatccatcctggacggagctccagggcaccatttcagattatccgaatattgcaagaagcaggcgcagacatctccaaaacagtcatgtcacacctggataggactattcttgataagaaagagctcttggagtttgctcaacttggctgctacttggaatatgatctctttggtactgaactacttcattaccaactcggcccagatattgacatgcctgatgataacaaaagaattagaagggtgcgtctcctggtggaagagggctgtgaagatcgaattctggtagcacatgacatacatacgaaaacccggctgatgaaatatggaggtcacggctattctcatatactcaccaatgttgttcctaaaatgttgctgagaggcataactgagaatgtgcttgataagattctaatagagaaccctaagcaatggctaactttcaaataggatggttgcttatgaattcacaccttgagtataaaacttgcagagaacattcagcgatttccagtccactgtgagatattaatcagttacctaggactaatgacagatcatttccttctgatgagaactaggagggtttgccttctctgagaccagctattacaactgtgcctctagggagttactcagcctaattgagccctattattttaacttaacaaaataaatacagaagtacctatttctaaacaatgatttaaagtctatatcccctaagcggagttgttgtttttctccctaatctatcagctgcactacttgagaaaatttaaagtgtttctagttaaattatttccttcttgagcgatctaatgtttcttgtaatattgatgatcctactaattatcctgctgttctttaattaatgcttaatgaataatatggcactgtaaaatagcttctgcaacaagggaagttaaattttgagacttttttccccaaaggatactgactgtaatacaattaccaattcacaatgataaaaatattttgaaaggttaattttatactgtccacctatctatatattcttctactgaaatgattttgatatctttggctttccggtatctatttttgccatacattttgctgttttgcaaagtttgtataagaacacataacactactgaattataaaaattcaatcataaaagtcaaaatatattacataatatagtttaatgaatcattacatttataataacaaaggccacaatttaattaattggtaagatataatgcaaaaaaaaaaagagaaatgtttgccttatgtatattccctttatttcctttaccttttgtttttccttggacctaaacagagaaaataatgcttatgtatctgaagaaaaggtcagatctattggaaatgacagcccgatacttgagcctcctctttaaaaggtatccagccctgatattttgtgtaaataaaatgtttttaaaacctgttagttaaaacacttaggtgatgggcactgctgcttataaattcatcttttggttgaatcctcactatgctatttggtacctaaaaatattctccaaacccttgctgccagttcctctttgataaatatatagttaattcgaaataaaatccattgcaattcatttatgagttatcttacatatcacaaagaccaattagaattagtcattattcttgatgaagagtctgtttttaatcataaaaatcatgacagttactcagacccaggcatttcaacagagctaacaccaccttcagataggcacaccatgcataactcttgggaagttgagctttgctaaataaaagatatttctgctgatcaaagatgatcaagctttctgtgtattggaacagaaagtaacaaagaggaatgagccaggagaacaaactaattcctttaaataaataaaaaaaaaaaatgcaaatgtccttcaccagtaaagcaagcaaatttttaaaatctctgtttttgaaatctactcgtcaaagagttttcagaggcaatgaaaggggaacagatttttcattgtaatagtggaagttgtgtgatagttaggagatatcaacatgcatttttaatcttttccttagatgaaagagatggcttttggcagtgtgttctaaccagaaagaaaggatttgtattactctccaaatctactgtactgtcagcttcactccacctgagaaaaaagaaaaaaaaattgatagctcaaatgcatgtaattcataaacactgcaaaggagagccacttggtgtctgcagtcctcatattaacagtctgtcacagaatgcagttaaagtattgattggcatatggtaatagagcaaccatagccttaacttacagacctgtgaaataaagggcattttgacctaatacaattaattttctggataactcttaaagagaagtcattttaactgtttttgctactccatatattgtcattcaaaatatattttaacccaaaataagttaaataatttgtgcatgtttgtgtgtgtatatatgcatacacttttttatattaaaattttgaggctatacagccactgtgccctgtggaataaagccatatatataaatgttttatatgtatatgttttatacataaataaaacatttcatctaatatatatatgtgtgtgtgagtatatgtgtgcatgtttagcagatatttgtataaaatataaacactctgttgtcatataggctatatgcgaaattgttaattttaaaataacctcaggccacagacttgtagtaatcatttgaaggcctcacctagtgtccccttggtgacgtatgcagcagctcaaattaaacctttgtgcattgggttatgaataatcttttcttccaaagatggcaaaagcctcggtttgatttgatactaaagaataaatttctctgactttc

SEQ ID NO: 22598 - DNA, 3709 bp, Homo sapiens
  source 1..3709: mol_type = unassigned DNA
ggagggcacaggggagactaaaaaggccagggaagttggcctgccggaagttcccagggagaaggcagcgcgttgtacccgagatttgttttttaagattagaagaagactcagggagagacacattcttaaaaaagaaatcctctttttagaacatctcttggtggtaccatcagaaatgtcttccttaagtggaaaagtccaaaccgttttgggccttgtagagccaagcaaactgggccgtaccctgacccatgaacacctggccatgacctttgactgctgttactgtccacctcccccgtgccaggaagctatttccaaagaacctatcgtgatgaaaaatttatattggattcagaaaaacgcctattcccataaagaaaaccttcaattaaatcaggagacagaagccataaaggaagaactgttgtattttaaagctaatggtggaggggctttggtggaaaacacaaccactgggattagccgagacacacagacgttgaagaggcttgcagaagagactggcgtccatatcatatctggagccgggttttatgtggatgcaactcactcctcagagaccagggccatgtcagtggagcagcttaccgatgtccttatgaatgaaattctccatggagctgatggaaccagtatcaagtgtggcattattggagaaattggttgctcctggcctttgactgagagtgaaagaaaggttctccaggccacagctcatgcccaggctcagcttggttgtcctgttattatccatcctggacggagctccagggcaccatttcagattatccgaatattgcaagaagcaggcgcagacatctccaaaacagtcatgtcacacctggataggactattcttgataagaaagagctcttggagtttgctcaacttggctgctacttggaatatgatctctttggtactgaactacttcattaccaactcggcccagatattgacatgcctgatgataacaaaagaattagaagggtgcgtctcctggtggaagagggctgtgaagatcgaattctggtagcacatgacatacatacgaaaacccggctgatgaaatatggaggtcacggctattctcatatactcaccaatgttgttcctaaaatgttgctgagaggcataactgagaatgtgcttgataagattctaatagagaaccctaagcaatggctaactttcaaataggatggttgcttatgaattcacaccttgagtataaaacttgcagagaacattcagcgatttccagtccactgtgagatattaatcagttacctaggactaatgacagatcatttccttctgatgagaactaggagggtttgccttctctgagaccagctattacaactgtgcctctagggagttactcagcctaattgagccctattattttaacttaacaaaataaatacagaagtacctatttctaaacaatgatttaaagtctatatcccctaagcggagttgttgtttttctccctaatctatcagctgcactacttgagaaaatttaaagtgtttctagttaaattatttccttcttgagcgatctaatgtttcttgtaatattgatgatcctactaattatcctgctgttctttaattaatgcttaatgaataatatggcactgtaaaatagcttctgcaacaagggaagttaaattttgagacttttttccccaaaggatactgactgtaatacaattaccaattcacaatgataaaaatattttgaaaggttaattttatactgtccacctatctatatattcttctactgaaatgattttgatatctttggctttccggtatctatttttgccatacattttgctgttttgcaaagtttgtataagaacacataacactactgaattataaaaattcaatcataaaagtcaaaatatattacataatatagtttaatgaatcattacatttataataacaaaggccacaatttaattaattggtaagatataatgcaaaaaaaaaaagagaaatgtttgccttatgtatattccctttatttcctttaccttttgtttttccttggacctaaacagagaaaataatgcttatgtatctgaagaaaaggtcagatctattggaaatgacagcccgatacttgagcctcctctttaaaaggtatccagccctgatattttgtgtaaataaaatgtttttaaaacctgttagttaaaacacttaggtgatgggcactgctgcttataaattcatcttttggttgaatcctcactatgctatttggtacctaaaaatattctccaaacccttgctgccagttcctctttgataaatatatagttaattcgaaataaaatccattgcaattcatttatgagttatcttacatatcacaaagaccaattagaattagtcattattcttgatgaagagtctgtttttaatcataaaaatcatgacagttactcagacccaggcatttcaacagagctaacaccaccttcagataggcacaccatgcataactcttgggaagttgagctttgctaaataaaagatatttctgctgatcaaagatgatcaagctttctgtgtattggaacagaaagtaacaaagaggaatgagccaggagaacaaactaattcctttaaataaataaaaaaaaaaaatgcaaatgtccttcaccagtaaagcaagcaaatttttaaaatctctgtttttgaaatctactcgtcaaagagttttcagaggcaatgaaaggggaacagatttttcattgtaatagtggaagttgtgtgatagttaggagatatcaacatgcatttttaatcttttccttagatgaaagagatggcttttggcagtgtgttctaaccagaaagaaaggatttgtattactctccaaatctactgtactgtcagcttcactccacctgagaaaaaagaaaaaaaaattgatagctcaaatgcatgtaattcataaacactgcaaaggagagccacttggtgtctgcagtcctcatattaacagtctgtcacagaatgcagttaaagtattgattggcatatggtaatagagcaaccatagccttaacttacagacctgtgaaataaagggcattttgacctaatacaattaattttctggataactcttaaagagaagtcattttaactgtttttgctactccatatattgtcattcaaaatatattttaacccaaaataagttaaataatttgtgcatgtttgtgtgtgtatatatgcatacacttttttatattaaaattttgaggctatacagccactgtgccctgtggaataaagccatatatataaatgttttatatgtatatgttttatacataaataaaacatttcatctaatatatatatgtgtgtgtgagtatatgtgtgcatgtttagcagatatttgtataaaatataaacactctgttgtcatataggctatatgcgaaattgttaattttaaaataacctcaggccacagacttgtagtaatcatttgaaggcctcacctagtgtccccttggtgacgtatgcagcagctcaaattaaacctttgtgcattgggttatgaataatcttttcttccaaagatggcaaaagcctcggtttgatttgatactaaagaataaatttctctgactttc

SEQ ID NO: 22599 - DNA, 3777 bp, Homo sapiens
  source 1..3777: mol_type = unassigned DNA
aaaaaggccagggaagttggcctgccggaagttcccagggagaaggcagcgcgttgtacccgagattcagggtctggctctgcttcccaggctagagtgcatttggcgcgatcacagctcactgcagcctcgacctcctgagctcaagcgaacttcctgcctcagcctcctgagcttcctgagtagctgcgactacagaaaaaagaaatcctctttttagaacatctcttggtggtaccatcagaaatgtcttccttaagtggaaaagtccaaaccgttttgggccttgtagagccaagcaaactgggccgtaccctgacccatgaacacctggccatgacctttgactgctgttactgtccacctcccccgtgccaggaagctatttccaaagaacctatcgtgatgaaaaatttatattggattcagaaaaacgcctattcccataaagaaaaccttcaattaaatcaggagacagaagccataaaggaagaactgttgtattttaaagctaatggtggaggggctttggtggaaaacacaaccactgggattagccgagacacacagacgttgaagaggcttgcagaagagactggcgtccatatcatatctggagccgggttttatgtggatgcaactcactcctcagagaccagggccatgtcagtggagcagcttaccgatgtccttatgaatgaaattctccatggagctgatggaaccagtatcaagtgtggcattattggagaaattggttgctcctggcctttgactgagagtgaaagaaaggttctccaggccacagctcatgcccaggctcagcttggttgtcctgttattatccatcctggacggagctccagggcaccatttcagattatccgaatattgcaagaagcaggcgcagacatctccaaaacagtcatgtcacacctggataggactattcttgataagaaagagctcttggagtttgctcaacttggctgctacttggaatatgatctctttggtactgaactacttcattaccaactcggcccagatattgacatgcctgatgataacaaaagaattagaagggtgcgtctcctggtggaagagggctgtgaagatcgaattctggtagcacatgacatacatacgaaaacccggctgatgaaatatggaggtcacggctattctcatatactcaccaatgttgttcctaaaatgttgctgagaggcataactgagaatgtgcttgataagattctaatagagaaccctaagcaatggctaactttcaaataggatggttgcttatgaattcacaccttgagtataaaacttgcagagaacattcagcgatttccagtccactgtgagatattaatcagttacctaggactaatgacagatcatttccttctgatgagaactaggagggtttgccttctctgagaccagctattacaactgtgcctctagggagttactcagcctaattgagccctattattttaacttaacaaaataaatacagaagtacctatttctaaacaatgatttaaagtctatatcccctaagcggagttgttgtttttctccctaatctatcagctgcactacttgagaaaatttaaagtgtttctagttaaattatttccttcttgagcgatctaatgtttcttgtaatattgatgatcctactaattatcctgctgttctttaattaatgcttaatgaataatatggcactgtaaaatagcttctgcaacaagggaagttaaattttgagacttttttccccaaaggatactgactgtaatacaattaccaattcacaatgataaaaatattttgaaaggttaattttatactgtccacctatctatatattcttctactgaaatgattttgatatctttggctttccggtatctatttttgccatacattttgctgttttgcaaagtttgtataagaacacataacactactgaattataaaaattcaatcataaaagtcaaaatatattacataatatagtttaatgaatcattacatttataataacaaaggccacaatttaattaattggtaagatataatgcaaaaaaaaaaagagaaatgtttgccttatgtatattccctttatttcctttaccttttgtttttccttggacctaaacagagaaaataatgcttatgtatctgaagaaaaggtcagatctattggaaatgacagcccgatacttgagcctcctctttaaaaggtatccagccctgatattttgtgtaaataaaatgtttttaaaacctgttagttaaaacacttaggtgatgggcactgctgcttataaattcatcttttggttgaatcctcactatgctatttggtacctaaaaatattctccaaacccttgctgccagttcctctttgataaatatatagttaattcgaaataaaatccattgcaattcatttatgagttatcttacatatcacaaagaccaattagaattagtcattattcttgatgaagagtctgtttttaatcataaaaatcatgacagttactcagacccaggcatttcaacagagctaacaccaccttcagataggcacaccatgcataactcttgggaagttgagctttgctaaataaaagatatttctgctgatcaaagatgatcaagctttctgtgtattggaacagaaagtaacaaagaggaatgagccaggagaacaaactaattcctttaaataaataaaaaaaaaaaatgcaaatgtccttcaccagtaaagcaagcaaatttttaaaatctctgtttttgaaatctactcgtcaaagagttttcagaggcaatgaaaggggaacagatttttcattgtaatagtggaagttgtgtgatagttaggagatatcaacatgcatttttaatcttttccttagatgaaagagatggcttttggcagtgtgttctaaccagaaagaaaggatttgtattactctccaaatctactgtactgtcagcttcactccacctgagaaaaaagaaaaaaaaattgatagctcaaatgcatgtaattcataaacactgcaaaggagagccacttggtgtctgcagtcctcatattaacagtctgtcacagaatgcagttaaagtattgattggcatatggtaatagagcaaccatagccttaacttacagacctgtgaaataaagggcattttgacctaatacaattaattttctggataactcttaaagagaagtcattttaactgtttttgctactccatatattgtcattcaaaatatattttaacccaaaataagttaaataatttgtgcatgtttgtgtgtgtatatatgcatacacttttttatattaaaattttgaggctatacagccactgtgccctgtggaataaagccatatatataaatgttttatatgtatatgttttatacataaataaaacatttcatctaatatatatatgtgtgtgtgagtatatgtgtgcatgtttagcagatatttgtataaaatataaacactctgttgtcatataggctatatgcgaaattgttaattttaaaataacctcaggccacagacttgtagtaatcatttgaaggcctcacctagtgtccccttggtgacgtatgcagcagctcaaattaaacctttgtgcattgggttatgaataatcttttcttccaaagatggcaaaagcctcggtttgatttgatactaaagaataaatttctctgactttc

SEQ ID NO: 22600 - DNA, 3225 bp, Homo sapiens
  source 1..3225: mol_type = unassigned DNA
acaggggagactaaaaaggccagggaagttggcctgccggaagttcccagggagaaggcagcgcgttgtacccgagaaaaaagaaatcctctttttagaacatctcttggtggtaccatcagaaatgtcttccttaagtggaaaagtccaaaccgttttgggccttgtagagccaagcaaactgggccgtaccctgacccatgaacacctggccatgacctttgactgctgttactgtccacctcccccgtgccaggaagctatttccaaagaacctatcgtgatgaaaaatttatattggattcagaaaaacgcctattcccataaagaaaaccttcaattaaatcaggagacagaagccataaaggaagaactgttgtattttaaagctaatggtggaggggctttggtggaaaacacaaccactgggattagccgagacacacagacgttgaagaggcttgcagaagagactggcgtccatatcatatctggagccgggttttatgtggatgcaactcactcctcagagaccagggccatgtcagtggagcagcttaccgatgtccttatgaatgaaattctccatggagctgatggaaccagtatcaagtgtggcattattggagaaattggttgctcctggcctttgactgagagtgaaagaaaggttctccaggccacagctcatgcccaggctcagcttggttgtcctgttattatccatcctggacggagctccagggcaccatttcagattatccgaatattgcaagaagcaggcgcagacatctccaaaacagtcatgtcacacctggatagggtgcgtctcctggtggaagagggctgtgaagatcgaattctggtagcacatgacatacatacgaaaacccggctgatgaaatatggaggtcacggctattctcatatactcaccaatgttgttcctaaaatgttgctgagaggcataactgagaatgtgcttgataagattctaatagagaaccctaagcaatggctaactttcaaataggatggttgcttatgaattcacaccttgagtataaaacttgcagagaacattcagcgatttccagtccactgtgagatattaatcagttacctaggactaatgacagatcatttccttctgatgagaactaggagggtttgccttctctgagaccagctattacaactgtgcctctagggagttactcagcctaattgagccctattattttaacttaacaaaataaatacagaagtacctatttctaaacaatgatttaaagtctatatcccctaagcggagttgttgtttttctccctaatctatcagctgcactacttgagaaaatttaaagtgtttctagttaaattatttccttcttgagcgatctaatgtttcttgtaatattgatgatcctactaattatcctgctgttctttaattaatgcttaatgaataatatggcactgtaaaatagcttctgcaacaagggaagttaaattttgagacttttttccccaaaggatactgactgtaatacaattaccaattcacaatgataaaaatattttgaaaggttaattttatactgtccacctatctatatattcttctactgaaatgattttgatatctttggctttccggtatctatttttgccatacattttgctgttttgcaaagtttgtataagaacacataacactactgaattataaaaattcaatcataaaagtcaaaatatattacataatatagtttaatgaatcattacatttataataacaaaggccacaatttaattaattggtaagatataatgcaaaaaaaaaaagagaaatgtttgccttatgtatattccctttatttcctttaccttttgtttttccttggacctaaacagagaaaataatgcttatgtatctgaagaaaaggtcagatctattggaaatgacagcccgatacttgagcctcctctttaaaaggtatccagccctgatattttgtgtaaataaaatgtttttaaaacctgttagttaaaacacttaggtgatgggcactgctgcttataaattcatcttttggttgaatcctcactatgctatttggtacctaaaaatattctccaaacccttgctgccagttcctctttgataaatatatagttaattcgaaataaaatccattgcaattcatttatgagttatcttacatatcacaaagaccaattagaattagtcattattcttgatgaagagtctgtttttaatcataaaaatcatgacagttactcagacccaggcatttcaacagagctaacaccaccttcagataggcacaccatgcataactcttgggaagttgagctttgctaaataaaagatatttctgctgatcaaagatgatcaagctttctgtgtattggaacagaaagtaacaaagaggaatgagccaggagaacaaactaattcctttaaataaataaaaaaaaaaaatgcaaatgtccttcaccagtaaagcaagcaaatttttaaaatctctgtttttgaaatctactcgtcaaagagttttcagaggcaatgaaaggggaacagatttttcattgtaatagtggaagttgtgtgatagttaggagatatcaacatgcatttttaatcttttccttagatgaaagagatggcttttggcagtgtgttctaaccagaaagaaaggatttgtattactctccaaatctactgtactgtcagcttcactccacctgagaaaaaagaaaaaaaaattgatagctcaaatgcatgtaattcataaacactgcaaaggagagccacttggtgtctgcagtcctcatattaacagtctgtcacagaatgcagttaaagtattgattggcatatggtaatagagcaaccatagccttaacttacagacctgtgaaataaagggcattttgacctaatacaattaattttctggataactcttaaagagaagtcattttaactgtttttgctactccatatattgtcattcaaaatatattttaacccaaaataagttaaataatttgtgcatgtttgtgtgtgtatatatgcatacacttttttatattaaaattttgaggctatacagccactgtgccctgtggaataaagccatatatataaatgttttatatgtatatgttttatacataaataaaacatttcatct

SEQ ID NO: 22601 - DNA, 3366 bp, Homo sapiens
  source 1..3366: mol_type = unassigned DNA
acaggggagactaaaaaggccagggaagttggcctgccggaagttcccagggagaaggcagcgcgttgtacccgagaaaaaagaaatcctctttttagaacatctcttggtggtaccatcagaaatgtcttccttaagtggaaaagtccaaaccgttttgggccttgtagagccaagcaaactgggccgtaccctgacccatgaacacctggccatgacctttgactgctgttactgtccacctcccccgtgccaggaagctatttccaaagaacctatcgtgatgaaaaatttatattggattcagaaaaacgcctattcccataaagaaaaccttcaattaaatcaggagacagaagccataaaggaagaactgttgtattttaaagctaatggtggaggggctttggtggaaaacacaaccactgggattagccgagacacacagacgttgaagaggcttgcagaagagactggcgtccatatcatatctggagccgggttttatgtggatgcaactcactcctcagagaccagggccatgtcagtggagcagcttaccgatgtccttatgaatgaaattctccatggagctgatggaaccagtatcaagtgtggcattattggagaaattggttgctcctggcctttgactgagagtgaaagaaaggttctccaggccacagctcatgcccaggctcagcttggttgtcctgttattatccatcctggacggagctccagggcaccatttcagattatccgaatattgcaagaagcaggcgcagacatctccaaaacagtcatgtcacacctggataggactattcttgataagaaagagctcttggagtttgctcaacttggctgctacttggaatatgatctctttggtactgaactacttcattaccaactcggcccagatattgacatgcctgatgataacaaaagaattagaagggtgcgtctcctggtggaagagggctgtgaagatcgaattctggtagcacatgacatacatacgaaaacccggctgatgaaatatggaggtcacggctattctcatatactcaccaatgttgttcctaaaatgttgctgagaggcataactgagaatgtgcttgataagattctaatagagaaccctaagcaatggctaactttcaaataggatggttgcttatgaattcacaccttgagtataaaacttgcagagaacattcagcgatttccagtccactgtgagatattaatcagttacctaggactaatgacagatcatttccttctgatgagaactaggagggtttgccttctctgagaccagctattacaactgtgcctctagggagttactcagcctaattgagccctattattttaacttaacaaaataaatacagaagtacctatttctaaacaatgatttaaagtctatatcccctaagcggagttgttgtttttctccctaatctatcagctgcactacttgagaaaatttaaagtgtttctagttaaattatttccttcttgagcgatctaatgtttcttgtaatattgatgatcctactaattatcctgctgttctttaattaatgcttaatgaataatatggcactgtaaaatagcttctgcaacaagggaagttaaattttgagacttttttccccaaaggatactgactgtaatacaattaccaattcacaatgataaaaatattttgaaaggttaattttatactgtccacctatctatatattcttctactgaaatgattttgatatctttggctttccggtatctatttttgccatacattttgctgttttgcaaagtttgtataagaacacataacactactgaattataaaaattcaatcataaaagtcaaaatatattacataatatagtttaatgaatcattacatttataataacaaaggccacaatttaattaattggtaagatataatgcaaaaaaaaaaagagaaatgtttgccttatgtatattccctttatttcctttaccttttgtttttccttggacctaaacagagaaaataatgcttatgtatctgaagaaaaggtcagatctattggaaatgacagcccgatacttgagcctcctctttaaaaggtatccagccctgatattttgtgtaaataaaatgtttttaaaacctgttagttaaaacacttaggtgatgggcactgctgcttataaattcatcttttggttgaatcctcactatgctatttggtacctaaaaatattctccaaacccttgctgccagttcctctttgataaatatatagttaattcgaaataaaatccattgcaattcatttatgagttatcttacatatcacaaagaccaattagaattagtcattattcttgatgaagagtctgtttttaatcataaaaatcatgacagttactcagacccaggcatttcaacagagctaacaccaccttcagataggcacaccatgcataactcttgggaagttgagctttgctaaataaaagatatttctgctgatcaaagatgatcaagctttctgtgtattggaacagaaagtaacaaagaggaatgagccaggagaacaaactaattcctttaaataaataaaaaaaaaaaatgcaaatgtccttcaccagtaaagcaagcaaatttttaaaatctctgtttttgaaatctactcgtcaaagagttttcagaggcaatgaaaggggaacagatttttcattgtaatagtggaagttgtgtgatagttaggagatatcaacatgcatttttaatcttttccttagatgaaagagatggcttttggcagtgtgttctaaccagaaagaaaggatttgtattactctccaaatctactgtactgtcagcttcactccacctgagaaaaaagaaaaaaaaattgatagctcaaatgcatgtaattcataaacactgcaaaggagagccacttggtgtctgcagtcctcatattaacagtctgtcacagaatgcagttaaagtattgattggcatatggtaatagagcaaccatagccttaacttacagacctgtgaaataaagggcattttgacctaatacaattaattttctggataactcttaaagagaagtcattttaactgtttttgctactccatatattgtcattcaaaatatattttaacccaaaataagttaaataatttgtgcatgtttgtgtgtgtatatatgcatacacttttttatattaaaattttgaggctatacagccactgtgccctgtggaataaagccatatatataaatgttttatatgtatatgttttatacataaataaaacatttcatct

SEQ ID NO: 22602 - DNA, 839 bp, Homo sapiens
  source 1..839: mol_type = unassigned DNA
atgaaaagccttgtacaagaggcttcgtgccatgttcagcctgccccttagccttccactgtgtgaggacacagcattccttccttccaagtgctgcagctctcacaagacaatcaaacaagcccgcaccttgatcatgatcttcctagcctccggaacgcactttcagaccatgctgaagtctaaattgaatgtcttaacactgaaaaaggaacctctcccagcggtcatcttccatgagccggaggccattgagctgtgcacgaccacaccgctgatgaagacaaggactcacagtggctgcaaggttacctacctgggcaaagtctccaccactggcatgcagtttttgtcaggctgcacagaaaagccagtcattgagctctggaagaagcacacgctagcccgagaggatgtctttccggccaatgccctcctggaaatccggccattccaagtttggctccatcatctcgaccacaaaggggaggccacagtgcacatggataccttccaggtggcccgcatcgcctactgcaccgccgaccacaacgtgagccccaacatcttcgcctgggtctacagggagatcaatgatgacctgtcctaccagatggactgccacgccgtggagtgcgagagcaagctcgaggccaagaaactggcccacgccatgatggaggccttcaggaagactttccacagtatgaagagcgacgggcggatccacagcaacagctcctccgaagaggtttcccaggaattggaatccgatgatggctgaatgaacttgagacgcttcagcaaaggcagcattggtcacggagttcaagggaata

SEQ ID NO: 22603 - DNA, 2745 bp, Homo sapiens
  source 1..2745: mol_type = unassigned DNA
aggacagccggcgcgcggccgtgcccacaagttgccggcagctgagcgccgcgcctcctcctgctcgcagccccctacgcccacccggcggcggtggccagcgccaggacgcacatcccgcggacaccgaccccagatgtaaagcgggaccccagcccctcgccccccggcgcgatcgacagtctcgccagcgtctcctctgccaaaacccagggctggaagatgtggcagccggccacggagcgcctgcaggagagatttgcagacacagaagcggcacagagaaggccattgtgaagatcaaggcagaaaccggagttatggcatcataagccaaggaatgccaaggattgctggcaaccacctgatgttagaagagtcgaggacatgttcttctccagagcttttggatggtgtgtggccctgccaacctttacattttggacttccagcctccgaaatgcactttcagaccatgctgaagtctaaattgaatgtcttaacactgaaaaaggaacctctcccagcggtcatcttccatgagccggaggccattgagctgtgcacgaccacaccgctgatgaagacaaggactcacagtggctgcaaggttacctacctgggcaaagtctccaccactggcatgcagtttttgtcaggctgcacagaaaagccagtcattgagctctggaagaagcacacgctagcccgagaggatgtctttccggccaatgccctcctggaaatccggccattccaagtttggctccatcatctcgaccacaaaggggaggccacagtgcacatggataccttccaggtggcccgcatcgcctactgcaccgccgaccacaacgtgagccccaacatcttcgcctgggtctacagggagatcaatgatgacctgtcctaccagatggactgccacgccgtggagtgcgagagcaagctcgaggccaagaaactggcccacgccatgatggaggccttcaggaagactttccacagtatgaagagcgacgggcggatccacagcaacagctcctccgaagaggtttcccaggaattggaatccgatgatggctgaatgaacttgagacgcttcagcaaaggcagcattggtcacggagttcaagggaatagatgagtaagcaacgtttcaaatttgggatgaaaagactgccaaactattggctgaccaaggtttttaaattcagaagagcaattctaaatctaaagaaatgtatcattaaagtaattacgttacattgaaacctgctgctgctgtgactgtgaggagggtgggagtgtggatggggaggaaggttctaggctctcttatttttctcatttcccaatgcctctctgtgggagagctccatgccagttttcaccacgctcaggcaaatactctgcagctgttattggatgggccattccgatctgccttatgaaattccacaagaatgttaggggcacctatgggatctctagtggggtgggcagggtgctgatggggacgctggccgcagggaggaaggaacatctcgggagggccctctgttcctctcccacggcagatgccctcctctgtatgcaaatcagcacagcctttattgagctttacaactaacaacctgatagttggcagttaattcacagttacagataatgcttttatttacataaatataccaagtagtaccctcttattgtattcacttcatctattttcttagaatacttgcaattactaatgaccccttccctttccctcctgctgccctgtccaccctctttccccttctaacatccttagagggatgaaatctcagcatatgttgcaggacaccaaaaggaagaaaacaatcaagcaaataaaataaacagtcaaacaaaccaggagtttaaaacaacaaccccaacaacagaagccttggcaaagaggaataagtgatcagcaagtgaacacactctatgtcaactctccttttatccagctgagatttatggtaacttatttaattaatggtcctgtctgatgcatccttgatggcaagcttcaaatctgatttggtatcaccgaggaaaccttgcccccatcactcagcattgcacttagatacagaatgagttagataaacttggcttgtctagagacccatgtcatcttaacctaaagggaaatcttattgcgttatcataaaattgatgatatcttagggtcagaattgccctttttttttattttgaatgggaagttctcactaaaacaatcctgagatttcttaatttcatggttctttaaatattataaacacagagtcaacatagaatgaaattgtatttgttaaaatacacacattggaggacaagagcagatgactacttttcgaagtaatgctgctccttcctaaaagtctgttttcaatcctggtaatattaggggcactgcggcacctaagaagccttaaatgagagctaatccaatctagagagcgatggtgtcagcatttcggtctgcatatctgtgtgtccgtatctgcgtttgtgtgcgtgtacgtgtgcccctgtgtgtgggcccagttttcaggcatgtagaataagcatggagtcatattgaggaggactcacttcttgaagatatgcttgttgctttacaacatatgtaagctattctttagcataaatgcattcattctttaataaaaatatgtttgcattaataaagctgaggagtttcat

SEQ ID NO: 22604 - DNA, 2533 bp, Homo sapiens
  source 1..2533: mol_type = unassigned DNA
agtcctctcgcagctgcgccaggacagccggcgcgcggccgtgcccacaagttgccggcagctgagcgccgcgcctcctcctgctcgcagccccctacgcccacccggcggcggtggccagcgccaggacgcacatcccgcggacaccgaccccagatgtaaagcgggaccccagcccctcgccccccggcgcgatcgacagtctcgccagcgtctcctctgccaaaacccagggctggaagatgtggcagccggccacggagcgcctgcagcactttcagaccatgctgaagtctaaattgaatgtcttaacactgaaaaaggaacctctcccagcggtcatcttccatgagccggaggccattgagctgtgcacgaccacaccgctgatgaagacaaggactcacagtggctgcaaggttacctacctgggcaaagtctccaccactggcatgcagtttttgtcaggctgcacagaaaagccagtcattgagctctggaagaagcacacgctagcccgagaggatgtctttccggccaatgccctcctggaaatccggccattccaagtttggctccatcatctcgaccacaaaggggaggccacagtgcacatggataccttccaggtggcccgcatcgcctactgcaccgccgaccacaacgtgagccccaacatcttcgcctgggtctacagggagatcaatgatgacctgtcctaccagatggactgccacgccgtggagtgcgagagcaagctcgaggccaagaaactggcccacgccatgatggaggccttcaggaagactttccacagtatgaagagcgacgggcggatccacagcaacagctcctccgaagaggtttcccaggaattggaatccgatgatggctgaatgaacttgagacgcttcagcaaaggcagcattggtcacggagttcaagggaatagatgagtaagcaacgtttcaaatttgggatgaaaagactgccaaactattggctgaccaaggtttttaaattcagaagagcaattctaaatctaaagaaatgtatcattaaagtaattacgttacattgaaacctgctgctgctgtgactgtgaggagggtgggagtgtggatggggaggaaggttctaggctctcttatttttctcatttcccaatgcctctctgtgggagagctccatgccagttttcaccacgctcaggcaaatactctgcagctgttattggatgggccattccgatctgccttatgaaattccacaagaatgttaggggcacctatgggatctctagtggggtgggcagggtgctgatggggacgctggccgcagggaggaaggaacatctcgggagggccctctgttcctctcccacggcagatgccctcctctgtatgcaaatcagcacagcctttattgagctttacaactaacaacctgatagttggcagttaattcacagttacagataatgcttttatttacataaatataccaagtagtaccctcttattgtattcacttcatctattttcttagaatacttgcaattactaatgaccccttccctttccctcctgctgccctgtccaccctctttccccttctaacatccttagagggatgaaatctcagcatatgttgcaggacaccaaaaggaagaaaacaatcaagcaaataaaataaacagtcaaacaaaccaggagtttaaaacaacaaccccaacaacagaagccttggcaaagaggaataagtgatcagcaagtgaacacactctatgtcaactctccttttatccagctgagatttatggtaacttatttaattaatggtcctgtctgatgcatccttgatggcaagcttcaaatctgatttggtatcaccgaggaaaccttgcccccatcactcagcattgcacttagatacagaatgagttagataaacttggcttgtctagagacccatgtcatcttaacctaaagggaaatcttattgcgttatcataaaattgatgatatcttagggtcagaattgccctttttttttattttgaatgggaagttctcactaaaacaatcctgagatttcttaatttcatggttctttaaatattataaacacagagtcaacatagaatgaaattgtatttgttaaaatacacacattggaggacaagagcagatgactacttttcgaagtaatgctgctccttcctaaaagtctgttttcaatcctggtaatattaggggcactgcggcacctaagaagccttaaatgagagctaatccaatctagagagcgatggtgtcagcatttcggtctgcatatctgtgtgtccgtatctgcgtttgtgtgcgtgtacgtgtgcccctgtgtgtgggcccagttttcaggcatgtagaataagcatggagtcatattgaggaggactcacttcttgaagatatgcttgttgctttacaacatatgtaagctattctttagcataaatgcattcattctttaataaaaatatgtttgcatt

SEQ ID NO: 22605 - DNA, 2387 bp, Homo sapiens
  source 1..2387: mol_type = unassigned DNA
tctcgcagctgcgccaggacagccggcgcgcggccgtgcccacaagttgccggcagctgagcgccgcgcctcctcctgctcgcagccccctacgcccacccggcggcggtggccagcgccaggacgcacatcccgcggacaccgaccccagatgtaaagcgggaccccagcccctcgccccccggcgcgatcgacagtctcgccagcgtctcctctgccaaaacccagggctggaagatgtggcagccggccacggagcgcctgcaggttacctacctgggcaaagtctccaccactggcatgcagtttttgtcaggctgcacagaaaagccagtcattgagctctggaagaagcacacgctagcccgagaggatgtctttccggccaatgccctcctggaaatccggccattccaagtttggctccatcatctcgaccacaaaggggaggccacagtgcacatggataccttccaggtggcccgcatcgcctactgcaccgccgaccacaacgtgagccccaacatcttcgcctgggtctacagggagatcaatgatgacctgtcctaccagatggactgccacgccgtggagtgcgagagcaagctcgaggccaagaaactggcccacgccatgatggaggccttcaggaagactttccacagtatgaagagcgacgggcggatccacagcaacagctcctccgaagaggtttcccaggaattggaatccgatgatggctgaatgaacttgagacgcttcagcaaaggcagcattggtcacggagttcaagggaatagatgagtaagcaacgtttcaaatttgggatgaaaagactgccaaactattggctgaccaaggtttttaaattcagaagagcaattctaaatctaaagaaatgtatcattaaagtaattacgttacattgaaacctgctgctgctgtgactgtgaggagggtgggagtgtggatggggaggaaggttctaggctctcttatttttctcatttcccaatgcctctctgtgggagagctccatgccagttttcaccacgctcaggcaaatactctgcagctgttattggatgggccattccgatctgccttatgaaattccacaagaatgttaggggcacctatgggatctctagtggggtgggcagggtgctgatggggacgctggccgcagggaggaaggaacatctcgggagggccctctgttcctctcccacggcagatgccctcctctgtatgcaaatcagcacagcctttattgagctttacaactaacaacctgatagttggcagttaattcacagttacagataatgcttttatttacataaatataccaagtagtaccctcttattgtattcacttcatctattttcttagaatacttgcaattactaatgaccccttccctttccctcctgctgccctgtccaccctctttccccttctaacatccttagagggatgaaatctcagcatatgttgcaggacaccaaaaggaagaaaacaatcaagcaaataaaataaacagtcaaacaaaccaggagtttaaaacaacaaccccaacaacagaagccttggcaaagaggaataagtgatcagcaagtgaacacactctatgtcaactctccttttatccagctgagatttatggtaacttatttaattaatggtcctgtctgatgcatccttgatggcaagcttcaaatctgatttggtatcaccgaggaaaccttgcccccatcactcagcattgcacttagatacagaatgagttagataaacttggcttgtctagagacccatgtcatcttaacctaaagggaaatcttattgcgttatcataaaattgatgatatcttagggtcagaattgccctttttttttattttgaatgggaagttctcactaaaacaatcctgagatttcttaatttcatggttctttaaatattataaacacagagtcaacatagaatgaaattgtatttgttaaaatacacacattggaggacaagagcagatgactacttttcgaagtaatgctgctccttcctaaaagtctgttttcaatcctggtaatattaggggcactgcggcacctaagaagccttaaatgagagctaatccaatctagagagcgatggtgtcagcatttcggtctgcatatctgtgtgtccgtatctgcgtttgtgtgcgtgtacgtgtgcccctgtgtgtgggcccagttttcaggcatgtagaataagcatggagtcatattgaggaggactcacttcttgaagatatgcttgttgctttacaacatatgtaagctattctttagcataaatgcattcattctttaataaaaatatgtttgcattaataaa

SEQ ID NO: 22606 - DNA, 1524 bp, Homo sapiens
  source 1..1524: mol_type = unassigned DNA
atgaaaagccttgtacaagaggcttcgtgccatgttcagcctgccccttagccttccactgtgtgaggacacagcattccttccttccaagtgctgcagctctcacaagacaatcaaacaagcccgcaccttgatcatgatcttcctagcctccggaacgcactttcagaccatgctgaagtctaaattgaatgtcttaacactgaaaaaggaacctctcccagcggtcatcttccatgagccggaggccattgagctgtgcacgaccacaccgctgatgaagacaaggactcacagtggctgcaaggttacctacctgggcaaagtctccaccactggcatgcagtttttgtcaggctgcacagaaaagccagtcattgagctctggaagaagcacacgctagcccgagaggatgtctttccggccaatgccctcctggaaatccggccattccaagtttggctccatcatctcgaccacaaaggggaggccacagtgcacatggataccttccaggtggcccgcatcgcctactgcaccgccgaccacaacgtgagccccaacatcttcgcctgggtctacagggagatcaatgatgacctgtcctaccagatggactgccacgccgtggagtgcgagagcaagctcgaggccaagaaactggcccacgccatgatggaggccttcaggaagactttccacagtatgaagagcgacgggcggatccacagcaacagctcctccgaagaggtttcccaggaattggaatccgatgatggctgaatgaacttgagacgcttcagcaaaggcagcattggtcacggagttcaagggaatagatgagtaagcaacgtttcaaatttgggatgaaaagactgccaaactattggctgaccaaggtttttaaattcagaagagcaattctaaatctaaagaaatgtatcattaaagtaattacgttacattgaaacctgctgctgctgtgactgtgaggagggtgggagtgtggatggggaggaaggttctaggctctcttatttttctcatttcccaatgcctctctgtgggagagctccatgccagttttcaccacgctcaggcaaatactctgcagctgttattggatgggccattccgatctgccttatgaaattccacaagaatgttaggggcaccctctttccccttctaacatccttagagggatgaaatctcagcatatgttgcaggacaccaaaaggaagaaaacaatcaagcaaataaaataaacagtcaaacaaaccaggagtttaaaacaacaaccccaacaacagaagccttggcaaagaggaataagtgatcagcaagtgaacacactctatgtcaactctccttttatccagctgagatttatggtaacttatttaattaatggtcctgtctgatgcatccttgatggcaagcttcaaatctgatttggtatcaccgaggaaaccttgcccccatcactcagcattgcacttagatacagaatgagttagata

SEQ ID NO: 22607 - DNA, 1577 bp, Homo sapiens
  source 1..1577: mol_type = unassigned DNA
gcccgctgggctaaatggggcagaggccgggaggggtgggggttccccgcgccgcagccatggagcagcttcgcgccgccgcccgtctgcagattgttctgggccacctcggccgcccctcggccggggctgtcgtagctcatcccacttcagggactatttcctctgccagtttccatcctcaacaattccagtatactctggataataacgttctaaccctggaacagagaaaattttatgaagaaaatgggtttctagtaatcaaaaatcttgtacctgatgccgatattcaacgctttcggaatgagtttgaaaaaatctgcagaaaggaggtgaaaccattaggattaacagtaatgagagatgtgaccatttcgaaatccgaatatgctccaagtgagaagatgatcacgaaggtccaggatttccaggaagataaggagctcttcagatactgcactctccccgagattctgaaatatgtggagtgcttcactggacctaatattatggccatgcacacaatgttgataaacaaacctccagattctggcaagaagacgtcccgtcaccccctgcaccaggacctgcactatttccccttcaggcccagcgatctcatcgtttgcgcctggacggcgatggagcacatcagccggaacaacggctgtctggttgtgctcccaggcacacacaagggctccctgaagccccacgattaccccaagtgggaggggggagttaacaaaatgttccacgggatccaggactacgaggaaaacaaggcccgggtgcacctggtgatggagaagggcgacactgttttcttccatcctttgctcatccacggatctggtcagaataaaacccagggattccggaaggcaatttcctgccatttcgccagtgccgattgccactacattgacgtgaagggcaccagtcaagaaaacatcgagaaggaagttgtaggaatagcacataaattctttggagctgaaaatagcgtgaacttgaaggatatttggatgtttcgagctcgacttgtgaaaggagaaagaaccaatctttgaaatagccatctgctataactctttcaacagaaaaccaaaaccaaacgaaatgtctaaggaaaatgttttcttaatgagatgatgtaaccttttctatcacttgttaaaagcagaaaacatgtatcaggtacttaattgcatagagttagttttgcagcacaatggtgttgctttaatggaaaaaaaaaacagtaaaagtgaaatattactgttttaaggaaaactaatttagggtggcagccaataaaggtggttggtgtctaatttaagtgttaaatcaatttctttcattcagttagctctttacccaagaagaagtgaatgatttggagcttagggtatgttttgtatcccctttctgataaacccattccctaccaattttatgtcataagagatttttttcccccaaatctagaacaatgtataatacattcacatctagtcaagggcataggaacggtgtcatggagtccaaataaagtggatattcctgctcgg

SEQ ID NO: 22608 - DNA, 1732 bp, Homo sapiens
  source 1..1732: mol_type = unassigned DNA
cggccgccctggggtcggggcaattgccgcgttgccctgccctccgggatccctgggggcctctgctcctctctttgtggagacgtcgtttcaccggcggcgcgtgaccccggcagctgtccagagacccagagatgtccaatcacaggcgcacggtgcacaggcgcgcagggctgcctggaaccggcccaggcaggcagtgaccgggacctctccggaggggagaggacggtgccctcccgggcaggagctggccaggcaggcgctgcccagggcggcctccctgctggactacggcattgccactgagttatataaagacactatttggggaaggacagcgggtatactctggataataacgttctaaccctggaacagagaaaattttatgaagaaaatgggtttctagtaatcaaaaatcttgtacctgatgccgatattcaacgctttcggaatgagtttgaaaaaatctgcagaaaggaggtgaaaccattaggattaacagtaatgagagatgtgaccatttcgaaatccgaatatgctccaagtgagaagatgatcacgaaggtccaggatttccaggaagataaggagctcttcagatactgcactctccccgagattctgaaatatgtggagtgcttcactggacctaatattatggccatgcacacaatgttgataaacaaacctccagattctggcaagaagacgtcccgtcaccccctgcaccaggacctgcactatttccccttcaggcccagcgatctcatcgtttgcgcctggacggcgatggagcacatcagccggaacaacggctgtctggttgtgctcccaggcacacacaagggctccctgaagccccacgattaccccaagtgggaggggggagttaacaaaatgttccacgggatccaggactacgaggaaaacaaggcccgggtgcacctggtgatggagaagggcgacactgttttcttccatcctttgctcatccacggatctggtcagaataaaacccagggattccggaaggcaatttcctgccatttcgccagtgccgattgccactacattgacgtgaagggcaccagtcaagaaaacatcgagaaggaagttgtaggaatagcacataaattctttggagctgaaaatagcgtgaacttgaaggatatttggatgtttcgagctcgacttgtgaaaggagaaagaaccaatctttgaaatagccatctgctataactctttcaacagaaaaccaaaaccaaacgaaatgtctaaggaaaatgttttcttaatgagatgatgtaaccttttctatcacttgttaaaagcagaaaacatgtatcaggtacttaattgcatagagttagttttgcagcacaatggtgttgctttaatggaaaaaaaaaacagtaaaagtgaaatattactgttttaaggaaaactaatttagggtggcagccaataaaggtggttggtgtctaatttaagtgttaaatcaatttctttcattcagttagctctttacccaagaagaagtgaatgatttggagcttagggtatgttttgtatcccctttctgataaacccattccctaccaattttatgtcataagagatttttttcccccaaatctagaacaatgtataatacattcacatctagtcaagggcataggaacggtgtcatggagtccaaataaagtggatattcctgctcggacaa

SEQ ID NO: 22609 - DNA, 16216 bp, Homo sapiens
  source 1..16216: mol_type = unassigned DNA
gcggtgcgcggtgggaggggcggacggcgcccggctggcaccgctcagatctgcttctccccggctcggggcgccgaggcggcgtccgggaggtgtcttctgcaaaggttgcctggcgctgtccaacatggaggaggcaccggcagcgggcgttacctgcgagcgggactaacccctgcctggcgttccgggcggcagtgcctggtccagagtccagggactcggctgcctgcacgccccgaggcggaccccggctctgactgctcccctggccgcgggcttctcgactgggacgcggcgcgaggagggagcgcggcggccccgagtctccctgagccatgggcaacgaggcgagcttggaaggggaagggctccccgaagggctggcggcggccgcagcggctggaggaggagctagcggggcggggagcccctctcacaccgcgatcccggccggcatggaggcggatttgagccagctgagcgaagaggagaggagacagatcgccgctgtcatgtcaagggcgcaggggctgcccaagggaagcgtccccccggccgctgcggagtcgccttccatgcacaggaaacaagagttggatagtagtcatcctccaaagcaatcaggaagacccccggaccctgggcgtccagctcaacctggtctcagtaaaagtagaactacagacactttcaggtcagagcagaaattgcctgggaggagtccttccactattagcttgaaagaatcaaagtccagaactgatttaaaggaagagcacaagtctagtatgatgcctggcttcctctcagaggttaacgctttaagtgctgtttcctctgttgtaaataaattcaacccttttgatttgatatcagactctgaggcatcccaggaagaaaccaccaagaaacaaaaagtggttcagaaggagcaaggaaaacctgaaggaatcataaaacctcctttacaacaacagccacccaagccgattcctaagcagcaaggacctggtagggatccgcttcagcaggatggcactcccaaatcaatatcttctcaacaaccagaaaaaattaaatcacaacctccaggtacaggaaagccaattcagggtcctacccagactcctcagacagaccatgcaaaattgccacttcaacgagatgcatccaggcctcagactaaacaggcagacatagtaaggggagaatcagttaaaccctcactgccaagcccatccaaaccacctattcagcaaccaactcctggaaaacctccagcacagcagcctggacatgaaaaatcacagcctgggcctgcaaagcccccagctcagccctcagggctaacaaagccattggctcaacaaccagggacagtgaaacccccagtccagccaccagggacaacaaagcctccagctcagcctcttggtcctgctaagcctccagctcagcagactgggtcagagaagccttcatcggagcagcctgggccaaaggctttagctcagcctcctggagttggaaagactccagctcaacagccagggccagcaaagcctccaacccagcaggtggggacaccaaaacccctagctcaacaacctgggctacagtctccagctaaggcacctgggcctacaaagactccagttcagcagcctgggccaggaaagattccagctcaacaggcaggacccggaaagacttctgcccagcagactggcccaacaaagcctccttcacaactgcctggcccagcaaagcccccacctcaacagcctggcccagcaaagcccccacctcaacagcctggctcagcaaagcccccatctcaacagcctggctcaacaaaacccccacctcaacagcctggcccagcaaagccctcacctcaacagcctggctcaacaaaacccccatctcaacagcctggctcagcaaaaccctcagctcaacagcctagcccagcaaagccctcggctcagcaatctacaaaaccagtaagccaaacaggatctggaaaacctctgcagccaccaacagtgtctccatctgcaaaacagcctccttcacaaggcctccctaaaaccatctgtcctctttgcaataccactgaacttctgttgcatgttccagaaaaggccaattttaacacatgcactgagtgtcaaaccactgtctgtagtctctgtggttttaatcccaatcctcatttaacggaggtaaaagagtggctctgtttgaactgtcaaatgaaaagagctctaggcggggatctggctccagttccgtcatcaccccagcccaaactgaagactgcacctgttaccactacatcagcagtgagcaaatcatccccacagccacagcagacttccccaaagaaggatgctgcaccaaaacaggatctctccaaggcacctgagcctaaaaagccaccaccactagtgaaacaaccaacccttcatggctctccttcagccaaggccaagcagccccctgaggcagattctttgtccaagccagcccctcccaaagaaccttctgtcccatctgagcaggacaaggcccctgttgctgatgataaaccaaagcagcccaagatggtaaagccaaccactgaccttgtatcttcatcatcagcaacaacaaaacctgatattccaagctccaaagtacagtcacaagctgaagagaaaacaacccctcctctaaaaacagactctgccaaaccctcacagagttttccaccaacaggggaaaaagtcagcccatttgattctaaagccatacctcgacctgcatcagattcaaaaattatttcacatcctggtcccagttcagagagcaaaggtcaaaaacaagttgaccccgtacaaaagaaggaagaacccaagaaagcacaaaccaaaatgagtcctaaaccagatgccaagccaatgccaaaagggtcaccaacaccccctggcccacgacctaccgctggccaaactgtccccacacctcaacagtccccaaagcctcaggagcagtcaaggcgtttcagtctgaatctgggaagtattactgatgcccccaaatcacagcctacaactcctcaagagaccgtgactgggaaactctttgggtttggagcatcaatcttcagccaggcatcaaatttaatttccactgcaggccaacctggacctcattcacaaagtggaccaggggccccaatgaaacaagcccctgccccttcacagccacctacttcacaagggccacccaaatccacaggtcaagcaccaccagcacctgcaaaaagtatacctgtgaaaaaggaaacaaaagccccagcagctgaaaaattagagcccaaagctgaacaagctccaacagtaaaaagaacagaaacagaaaaaaagccaccacctattaaggatagcaaatctttaacagctgagcctcaaaaggctgtccttcccacaaaactggagaaatcgcccaaaccagaatcaacctgtcctctctgcaaaactgaactcaacataggttctaaggatcctcctaacttcaatacttgcactgaatgcaagaatcaagtgtgtaatctctgtggatttaaccctacaccacatttgactgagattcaagaatggctttgtttaaattgccaaacccagagagcaatatcaggacagcttggagacatacgcaaaatgccacctgcaccatcaggacccaaagcatctcctatgcctgttcctacagaatcatcatctcagaaaacagcagtgcctccccaagtaaaattagtgaaaaagcaagaacaagaagtaaaaacggaagctgaaaaagtcattctggaaaaagtaaaggaaacactatcaatggaaaaaattcctcctatggtaaccacagatcaaaaacaagaagagagtaaactagagaaagacaaagcttcagctcttcaagaaaaaaagccactccctgaagaaaaaaaactaatccctgaagaagaaaagatacgttctgaagaaaaaaagccactcctagaagaaaaaaagccaacccctgaagacaaaaagctactcccagaggcaaaaacatcagccccagaagaacagaaacatgacttacttaaatctcaagtacaaattgctgaagaaaagcttgaaggcagagtggctccaaagacagtgcaagaagggaaacaaccacagaccaagatggaaggtttaccatctggcacacctcagagtttacctaaagaagatgataagacaaccaaaacaataaaagaacagccacagccaccatgcacagcaaaacctgatcaggtggaacctgggaaagaaaaaacagaaaaggaagatgacaaatcagacacctcaagttctcagcagcctaaaagcccccaaggtctgagcgacacgggatattcttccgatggaatatcaagctcacttggtgaaattccaagtcttattccaactgatgaaaaggatattctcaagggactcaaaaaggactctttttcacaagaaagcagcccttccagcccctcagatttggctaagttagaaagtacagtcctatctattttggaagctcaagcaagtacacttgctgatgaaaagtcagaaaagaaaacacaaccccatgaagtttctcctgaacagcctaaagaccaagagaaaactcagagtttatctgaaaccttggaaattactatttcagaagaggagatcaaagagagtcaagaagaaaggaaagacacttttaaaaaagatagccaacaagatattccttccagcaaggaccataaagagaagtctgagtttgttgatgacataactactagaagagagccttatgattcagttgaagagagtagtgaaagtgaaaactcacctgttccacaaagaaaacgaagaactagtgttggctcatcaagcagtgatgagtataaacaggaagacagccaaggatcaggggaagaggaggacttcattcgaaaacaaatcatagaaatgagtgctgatgaagatgcttcaggttctgaagatgatgagttcatcagaaaccagctcaaagagattagtagcagtactgagagccagaagaaggaagaaacaaagggaaaaggcaaaataacagcagggaaacacagacgactgactcgaaaaagtagcacaagcattgatgaagatgcaggaagacgtcactcatggcatgatgaagacgatgaagcatttgatgaaagtcctgaacttaaatacagagaaactaaaagtcaggaaagtgaagaacttgtagttactggaggaggagggctacgccgatttaaaacaattgagctcaacagtacaatagcagataaatattctgcagagtcatcacagaaaaaaacaagtttgtattttgacgaagagccagaattggaaatggaaagcctgacagactcacctgaagataggtcaaggggagagggatcttcgagtctgcatgcttccagcttcactcctggtacatcccctacatcagtatcatcacttgatgaggacagtgacagtagcccgagtcacaaaaaaggagagagcaaacagcaacgcaaagctcggcacagaccacatggccctcttttgcctactattgaagattcttcagaggaagaagaattgagagaggaagaagaattattaaaggagcaagaaaagcagagggaaatagaacagcaacaaagaaagagttctagtaaaaaatcaaagaaagacaaagatgaacttcgagctcagagaagaagggaaaggccaaagacaccacctagtaatctctctcccattgaagatgcatctccgacagaagagttacgtcaggctgcagaaatggaggagctccatagatcttcttgttctgaatattcacctagcatagagtcagacccagaaggttttgaaataagcccggaaaaaataatagaagtacaaaaagtttataaattgcccacagctgtttcattatactcaccaacagatgagcaatctattatgcagaaagaaggtagccaaaaggcgttaaaaagtgctgaggagatgtatgaagaaatgatgcataaaacacacaaatacaaagcttttccagctgcaaatgaacgagatgaagtgtttgaaaaagagcctttgtatggtgggatgctaatagaggattatatttatgaatctttagtagaagacacgtacaatggatcggtagatggcagtctgctaacaaggcaagaagaagaaaatggatttatgcagcagaaaggaagagagcaaaagataagactttcagaacagatttatgaagatcctatgcagaaaattacagacctccagaaagagttttatgagttagaaagcttacattctgttgtgcctcaggaagatattgtttcaagctcttttatcatcccagaaagccatgagatagtggacctgggtactatggtaacttctacagaagaagaaaggaaactactagatgctgatgctgcctatgaagaacttatgaagaggcaacagatgcaattaacacctggatctagcccaacccaggcccccattggtgaggatatgacagagtccaccatggactttgacagaatgccagatgcctctttgacatcaagtgttctctcaggagcgtctcttacagattcgaccagcagtgcaacactctctatcccagatgttaaaataacccaacatttttcaacagaagaaattgaggatgaatatgtaaccgattatacaagagaaattcaagagataattgcccatgaatcgctgattttgacctactcggagccttcagaaagtgctacatctgtcccaccctctgacacaccttctctcacatcatctgtttcttcggtctgtaccacagatagctcttcacccattactaccctggatagcataaccacagtttatacagagccagtggacatgataactaaatttgaagattctgaggaaatttcttcatcaacttattttccaggcagcattatagactatccagaagaaataagtgtatctttagatcggactgccccaccagatggtagagctagtgctgatcatattgttatttccttatctgatatggcatcttctatcatagaatctgtagtacctaaacctgaagggccagttgctgacactgtttctactgacttacttatatctgaaaaggacccagtgaagaaagccaagaaggaaactgggaatggaatcattctggaagttttggaagcttacagagataaaaaggagttggaggccgaacgaacaaaaagtagcttatccgaaaccgtgtttgatcacccaccttcttctgtaatagcccttccaatgaaagagcagctttcaactacatactttacatctggagagacctttggtcaggaaaaacctgcatctcagttaccatctggcagtccttctgtttcctctcttccagctaaacctcgcccattctttagaagttcttctttggatatatcagctcaacctcctccccctcctccccctccccctcctcctcctcctccaccaccaccccctcctcccccaccacttcctccaccaacttcacctaaaccaactattcttcctaaaaaaaagttaacagttgcatctccagtgactacagctacacctctgtttgatgctgttactactctagagaccacagctgttctgagaagtaatggattacctgttacaagaatatgtactactgcacctcctcctgttcctcctaagccatcttcaattccatctggacttgtatttacccacaggcctgagccaagcaaacctccaatcgcccccaaaccagtgattcctcagcttccaacaactacacaaaaaccaacagatatacaccccaaaccaacaggcctatctttaacttcaagtatgaccttaaatttagtgacttcagcagattataaattgccttcccctacctccccactttccccacactccaacaagtcttcaccaagattttccaaatccctcacagaaacttatgtagttattacattgccatctgaaccagggactccaacagattcttctgctagtcaagcaattaccagttggcccttgggatcaccctccaaagatctggtttctgttgaacctgtgttttctgtagttcctcctgtgacagctgtagaaattccaatttcttcagaacagaccttctacatctctggagctttacagacattttctgctacccctgtcacagcaccctcttcatttcaagcagctcccacatcagttacacagtttctcactactgaagtttccaagactgaggtttcagcaaccagaagtacagctcctagtgttggtctcagcagcatttccataacaattcctccagagcctcttgctctagataacatacatttagagaagcctcagtataaagaagatggaaaattgcaacttgttggtgatgtaattgatttgcgtacagtaccaaaggtagaagttaaaacaactgataaatgtattgatctttctgcttctacaatggatgtgaaaaggcagatcacagcaaatgaagtttatgggaaacaaattagtgctgtccaaccctctattataaatcttagtgtgacatcatcaatagtgactcctgtatctctggccactgagacagtgacctttgtcacatgcacagctagtgcaagttacactacaggcacagaaagcctagtgggtgcagaacatgcaatgacaacaccactccaacttacaacatcaaagcatgctgagcccccatacaggataccaagtgaccaggtctttcctatagctagggaagaagcaccaataaacttatctctaggtactccagcacatgcagtgacattggctattacaaaacctgtcactgtgcctcctgttggtgtcacaaatggatggactgatagcaccgtatcccagggaatcactgatggggaagtagtggatctcagtacaaccaagtctcacagaacagtcgtaacaatggatgagtctacttcaagtgtgatgaccaaaataatagaagatgaaaaacccgttgatttaaccgcagggagaagagctgtgtgctgtgatgtggtttataaattaccatttggaaggagctgcacagcacagcagcctgcaactactcttcctgaggatcgttttggttatagggatgaccactatcagtatgatcgatcagggccatatggttatagagggattgggggaatgaagccttccatgtctgacacaaatttagcagaagctggacattttttctataaaagtaagaatgcttttgattattctgaaggaactgacacagcagtagatctgacttcagggagagttactacaggtgaggtaatggattattcaagcaagactacaggtccatatccagaaacacgacaagtcatttcaggagctgggattagtaccccacagtattccacagcaagaatgacaccaccaccaggaccccagtattgtgtggggagtgttttgaggtcatctaatggtgttgtctattcttcagtagcaactccaacaccctctacatttgctatcaccacacaacctggctccattttcagcaccacagtgagggatttgtctggtattcatacggctgatgcagtgacttcattacctgccatgcaccatagccagccaatgcctagatcatattttataacaacaggtgcatctgaaacggacattgcagtaactggtattgatatcagtgccagtttgcaaactattactatggagtctcttactgctgagacgatagactctgttcccactttaaccacagcatccgaagtgtttcctgaagtggtgggagatgaaagtgctcttttaattgtccctgaagaagataaacaacagcagcagctagacttggagcgtgagctcctggaactggagaaaattaagcaacagcgctttgctgaggaattggagtgggaacgtcaggaaattcaaaggttccgagaacaagaaaagatcatggttcagaaaaagttggaggagctgcagtctatgaagcaacaccttctctttcagcaagaagaagagcggcaagcccagttcatgatgaggcaggagacgttagctcagcaacagttacagcttgagcagatccaacagctgcaacaacagcttcaccagcagctggaggagcaaaagattcggcagatctaccagtataactatgacccttctggaactgcttctccacaaaccactacagagcaggcaattttggaaggtcagtatgctgctctggaaggcagtcaattttgggcaactgaagatgcaaccaccacagcttcagctgttgtggcaattgaaataccacaaagccaaggatggtacaccgttcagtctgatggtgttactcagtacattgccccacctggtatcctgagcactgtttcagaaatacctctaacagatgttgttgtgaaagaggaaaaacaacccaaaaagagaagttctggagctaaagtccgaggacagtatgatgacatgggagaaaatatgacagatgatccccgaagttttaaaaagatagtggacagtggtgtacaaacggatgacgaagatgccacagatcggagctatgtgagtaggagaaggagaactaaaaagagtgtggatacaagcgtccaaactgatgatgaagatcaggatgagtgggatatgcctactagatcaaggaggaaagctcgtgtagggaaatatggtgacagcatgacagaggctgacaagaccaaacccctttccaaagtctccagcatagcagttcaaacggtagcagagatatctgtgcaaactgaaccagttggaaccataagaacaccctccatacgggcacgagtggatgccaaggtagaaataattaaacacatttcagcacctgaaaagacttacaaagggggcagtttaggatgtcaaacagaagcagattcagacacacaaagtcctcaatatctgagtgccacatctccacccaaagacaagaaacgcccaacacctttagagattggttattcatctcacctccgggcagattccacagtacagctggctccttccccacccaaatcccccaaagtcctttactcacccatctcaccactttcaccaggcaaagccttagaatcagcctttgtaccttatgaaaaacccctccctgatgatataagtccacagaaagtactgcatccagatatggctaaagttcccccagcaagtcctaagacagccaagatgatgcagcgttctatgtctgaccccaagcctctgagtccaacagcagacgaaagttccagggctccttttcagtataccgagggctatacgactaaaggttctcaaaccatgacatcctctggagcccagaaaaaagttaaaagaactctgccaaatccacctcctgaggagatttccacaggaactcaatccacattcagcacaatgggcacagtttccaggagaaggatctgcagaaccaacacaatggcacgagccaagattctccaggacatagacagagagcttgatcttgtggaaagggagtctgcaaaacttcgaaagaaacaagcagagcttgatgaagaagaaaaggagattgatgctaagctacgatacctggaaatgggaattaacaggaggaaagaggccctattaaaggagagagaaaagagagaacgagcctacctccagggagtagctgaggatcgtgattacatgtctgacagtgaagtgagtagcacaagaccaacccgaatagaaagtcagcatggcattgagcgaccaagaactgctccccaaactgaattcagccagtttataccaccacaaacccaaacagaatctcaactagttcctccgacaagtccttacacacaataccagtactcttcccctgctcttcctacccaagcacccacctcatacactcaacagtctcattttgagcaacaaactttgtaccatcagcaagtttcaccttatcagactcagccaacattccaagctgtggcaacaatgtccttcacacctcaagttcaacctacaccaaccccacagccttcttatcagttaccttcacagatgatggtgatacaacagaagccacggcaaactacattatatttggagcccaagataacctcaaactatgaagtgattcgcaaccaaccccttatgatagcacctgtttctacggataacacatttgctgtttcccatcttggtagtaagtacaatagtttagacttgagaataggtttggaggaaagaagtagcatggcaagcagtccaatatcaagcatatctgcagattctttctatgcagatattgatcaccatactccacgaaattatgtcctaattgacgacattggagagatcaccaaaggaacagcggcattaagcaccgcatttagccttcatgaaaaggatctgtcaaaaacagaccgtctccttcgaaccactgagacacgccggtctcaagaagtgacagatttcctagcacctttacagtcttcctctagattgcatagttatgtgaaggcggaggaagacccaatggaggatccttacgagttaaagcttctgaaacatcagattaaacaggaatttcgtagagggacagagagcttagatcaccttgctggtctttctcattattaccatgctgatactagctacagacattttccaaaatctgagaagtatagcatcagtagactcacacttgaaaaacaagcagcaaaacaactgccagcagccatactttatcaaaagcagtcaaagcataagaaatcactaattgaccctaaaatgtcaaaattttcacctattcaagaaagtagagaccttgaacctgattattcaagctatatgacttctagcacttcatctattggtggcatttcctccagggcaaggctccttcaagatgacatcacttttggcctcagaaaaaatattacagaccaacaaaaatttatgggatcttctcttggcacaggactgggcacattaggaaataccatacgctcagctctgcaggatgaagcggataagccatacagtagtggcagcaggtccagaccttcctccagaccttcctctgtctatgggcttgatttatcaattaaaagggattcttctagctcttccctaagactgaaagctcaagaggctgaagctctagatgtttcctttagtcatgcatcatcctctgccagaactaagccgaccagtttgccaattagtcaaagtagaggaagaataccaattgtggcccagaattctgaagaagaaagcccactcagtcctgttggccagccaatgggaatggccagggctgcagctggacccctgccaccaatatctgcagacaccagggatcagtttggatcaagccactcattgcctgaagttcagcaacacatgagggaagaatcacggactcgaggctatgaccgtgacatagcattcatcatggatgacttccaacatgccatgtcagacagtgaagcctatcatctgcgtcgtgaggaaacagattggtttgataaacccagggagtctcgtttggaaaatggacatggtctggaccgaaaactgccggaaagattggtccactctagaccactcagtcaacatcaagagcaaattatacagatgaacgggaaaactatgcactacatctttcctcacgcaaggataaaaataacaagagactcaaaggatcacacagtttcaggtaatggattaggaattagaattgtgggtggtaaagaaatcccgggacatagtggagaaattggagcctatattgccaagattcttcctgggggaagtgcggaacagacggggaagcttatggaagggatgcaagtattggaatggaatggaattcccttgacttctaaaacatatgaagaagttcagagtatcattagtcagcaaagtggggaagcagaaatatgtgtaagactggacctcaatatgctatcagattctgaaaattcccagcatctggaacttcatgagccaccaaaagctgtggataaggcgaaatccccaggggttgatcctaagcagttggcagcagaactccagaaggtttcactacagcagtcaccgctggttctgtcatcagttgttgaaaaaggatctcatgttcattcaggtcctacatcagcaggatccagttccgttcccagccctgggcaaccagggtccccctcagtgagcaaaaagaagcacggcagcagcaagcctaccgatggaacaaaggttgtctctcatccaattacaggagaaattcagcttcaaattaactatgatcttggaaatctcataatacatattctccaagcaagaaatcttgttcctcgagacaacaatggttattctgacccttttgtgaaagtgtaccttcttccagggagaggtcaagtcatggttgtccagaatgcaagtgctgagtacaagagaaggactaaacatgtccagaaaagtcttaatcctgagtggaatcaaacagtaatttataaaagtatttccatggaacagctcaagaagaaaacactggaggtgacagtttgggattatgatagattttcatccaacgacttccttggggaggtattgattgatttatctagcacatctcacctcgataacactccaaggtggtatcctctcaaagaacagactgaaagcattgatcatggcaagtctcattccagtcagagcagccagcagtccccaaagccatctgttatcaaaagcagaagccatggtatcttccctgacccatcaaaggacatgcaggttcccaccattgagaaatcccatagtagtcctggtagctcaaaatcatcatcagaaggccatctccgttctcatggaccatctcgcagtcaaagcaaaaccagcgtcactcagacccacctggaagatgcaggggctgccatagctgctgccgaagctgccgtgcaacaactccgcattcaaccaacaaagcctcccaatcaccggcctgcagaaagctctgtgtccaccggctcctcgggcagcagctttggcagtgggtatagcgtggacagtgaaggaagcagcagcactgcaggggagactaatctatttcctattccgaggatagggaagatgggacagaatggacaagagcctgtaaaacagccaggggtaggagtaggactagcagacactgaagctaaaactcaggtaatgggagaaatcaagattgcattgaagaaggaaatgaagacagatggtgaacaactaatagttgaaattctccaatgcagaaatattacatacaaatttaagtctcctgatcatctaccagatttatatgtgaaaatatatgtgatgaatatttctacccaaaaaaaggtgatcaagaaaaaaacaagagtatgcagacatgatcgagagccttcgtttaatgaaacttttcgattcagtctaagtcctgcaggacattctcttcagattttacttttctccaatggagggaagtttatgaaaaagaccttgattggtgaagcctgtatctggcttgacaaagtggatctcagaaaaagaatagtcaactggcacaaacttttggtcagtcctactcaaacgcattgaagaaacatgtcttctcagggtatagaaactgctctaaatagcctcacatcaagactatagttgaatactattgtacaaagctaagttttgagaggcaaacataagagtgggaacaacaagcaaaaacatacttaagaccttgtacatttattgttgtggatcacacaaagatattcaactgaaaaagttcacatactgaaaacaagaagaatggagttctgagaccttgaatttcccatggctgtgaagagaaactgtgaaacaaattttgattacttaagacaataatctttgagtagagttgagctatagcttaagacaggctcaaagattaatgtggttttcatgcagcacaaaggtaattctttatgcaaaggagccttggttgaaaggaaaggactgatgtaacaaatctcagttttcaaaacttcaaaaatcttccttcatcg

SEQ ID NO: 22610 - DNA, 3267 bp, Homo sapiens
  source 1..3267: mol_type = unassigned DNA
acaaaagtttggaatagtaatggattaggaattagaattgtgggtggtaaagaaatcccgggacatagtggagaaattggagcctatattgccaagattcttcctgggggaagtgcggaacagacggggaagcttatggaagggatgcaagtattggaatggaatggaattcccttgacttctaaaacatatgaagaagttcagagtatcattagtcagcaaagtggggaagcagaaatatgtgtaagactggacctcaatatgctatcagattctgaaaattcccagcatctggaacttcatgagccaccaaaagctgtggataaggcgaaatccccaggggttgatcctaagcagttggcagcagaactccagaaggtttcactacagcagtcaccgctggttctgtcatcagttgttgaaaaaggatctcatgttcattcaggtcctacatcagcaggatccagttccgttcccagccctgggcaaccagggtccccctcagtgagcaaaaagaagcacggcagcagcaagcctaccgatggaacaaaggttgtctctcatccaattacaggagaaattcagcttcaaattaactatgatcttggaaatctcataatacatattctccaagcaagaaatcttgttcctcgagacaacaatggttattctgacccttttgtgaaagtgtaccttcttccagggagaggtgctgagtacaagagaaggactaaacatgtccagaaaagtcttaatcctgagtggaatcaaacagtaatttataaaagtatttccatggaacagctcaagaagaaaacactggaggtgacagtttgggattatgatagattttcatccaacgacttccttggggaggtattgattgatttatctagcacatctcacctcgataacactccaaggtggtatcctctcaaagaacagactgaaagcattgatcatggcaagtctcattccagtcagagcagccagcagtccccaaagccatctgttatcaaaagcagaagccatggtatcttccctgacccatcaaaggacatgcaggttcccaccattgagaaatcccatagtagtcctggtagctcaaaatcatcatcagaaggccatctccgttctcatggaccatctcgcagtcaaagcaaaaccagcgtcactcagacccacctggaagatgcaggggctgccatagctgctgccgaagctgccgtgcaacaactccgcattcaaccaagtaaaagacgcaaataaattcctcagcatggcagcttaatgttcatctgttgcctttctttcctgctgtcctttcctgtttgctttcagttttcaacatcctctgctcaccctgttctctgtccctttgtctgtgtaagaacgatataaatacattaatatgctctttcttatttagattttttttatttacatagactgaaataaaactggctgtttctcctttgtttccaccatccatccaacctggctcatagcatttgatacagtgtctgtgatgtttggaagcaaagcaatgttgtgtgtcctttttgtttgcgcttaaatatcttttagaatacagaaattataagcacaagtggctgccagttttccaggacttataccaaaaaaaaaaaagtgcacacatataagtatttagagcagatttgcaattagattcttgtatctgaaaacactcaaaaagtctaggcagaagataatgcaaccaacagtcaacttctagaaccttggaggaaaagccatttcaagacagtgctttaaaacactaacaaattttgcttctgaaatatggtagctttccatgtgcaaaaaattgtagtcttctgaaaaatctgtgaagaaaatcttatttcttacattctcaaaaaactacattaaattaatatatgtataagcatatgtgataaggcaatgcaacctcactgaggagcacaattgggtccattctgttggatcacactttgtatgtgatgacagattttacagatattttttctaaccattggaaatcaagatatactatgtctggtagctataagtcaatcaaagtataacaattgacctatcttaactgctgtattttcatttcatttgtgaaaatttagtcgattgatataattatataaaaacttaatatgtgcaaatatttcacaaatgtaggtaccctgttacttctaaaaggcattagccaggcaatggagatagatcattgttctctccatctccctagtcatcattttcaaagaaacagccagttttaaacccctttagtgctgtgcatgtggtgtcattttggcatttgaaaacacaacctatttaaatagagcaaaagagcacttctgtttgcatgaataacatttaagctggttccatctgaggatacatactctgggtttccatttcacccacactgccacagcagcacataaaagcggtcagtctaatcatgccaggaagcagcacagacacagcatagcaggagtcctccccattcaaagaactcagtctgataatctgcctccaccagccaatggcaaccaagaccaaagccagctagccctcaggaaggtgatgtctgatggaccagtcaagccagaaggaggtgagcagaaaggccctgttcaaagcacacagcaagaacatccccaaatttaaagctctcatctttaatttttagagattgtctgataaaatatgtttatccactttttaatgtgcttttgtgggcatggcatttcaggacttcatcatcaccatgtaagtcccaagatcagtcccgtaatatattgactacagtgatttgtatttttctatgcactgggcatcttttgacttttgttgggaaatagattaacaatattcatattgcagaatggaatgcatgctactaacctaatctgttcaagcatgactataaatatgtttcattgtgataaaagtttaaattgctcacagttcaagttagcctaccagttggaatgtggatcagtgttttttgcctattatttcaagtgtaacttttaaaaatttagtggattttgaaaattcttagaggaaagtaaaggaaaaattgttaatgcactcatttacctttacatggtgaaagttctctcttgatcctacaaacagacattttccactcgtgtttccatagttgttaagtgtatcagatgtgttgggcatgtgaatctccaagtgcctgtgtaataaataaagtatctttatttcattcat

SEQ ID NO: 22611 - DNA, 17144 bp, Homo sapiens
  source 1..17144: mol_type = unassigned DNA
gcggtgcgcggtgggaggggcggacggcgcccggctggcaccgctcagatctgcttctccccggctcggggcgccgaggcggcgtccgggaggtgtcttctgcaaaggttgcctggcgctgtccaacatggaggaggcaccggcagcgggcgttacctgcgagcgggactaacccctgcctggcgttccgggcggcagtgcctggtccagagtccagggactcggctgcctgcacgccccgaggcggaccccggctctgactgctcccctggccgcgggcttctcgactgggacgcggcgcgaggagggagcgcggcggccccgagtctccctgagccatgggcaacgaggcgagcttggaaggggaagggctccccgaagggctggcggcggccgcagcggctggaggaggagctagcggggcggggagcccctctcacaccgcgatcccggccggcatggaggcggatttgagccagctgagcgaagaggagaggagacagatcgccgctgtcatgtcaagggcgcaggggctgcccaagggaagcgtccccccggccgctgcggagtcgccttccatgcacaggaaacaagagttggatagtagtcatcctccaaagcaatcaggaagacccccggaccctgggcgtccagctcaacctggtctcagtaaaagtagaactacagacactttcaggtcagagcagaaattgcctgggaggagtccttccactattagcttgaaagaatcaaagtccagaactgatttaaaggaagagcacaagtctagtatgatgcctggcttcctctcagaggttaacgctttaagtgctgtttcctctgttgtaaataaattcaacccttttgatttgatatcagactctgaggcatcccaggaagaaaccaccaagaaacaaaaagtggttcagaaggagcaaggaaaacctgaaggaatcataaaacctcctttacaacaacagccacccaagccgattcctaagcagcaaggacctggtagggatccgcttcagcaggatggcactcccaaatcaatatcttctcaacaaccagaaaaaattaaatcacaacctccaggtacaggaaagccaattcagggtcctacccagactcctcagacagaccatgcaaaattgccacttcaacgagatgcatccaggcctcagactaaacaggcagacatagtaaggggagaatcagttaaaccctcactgccaagcccatccaaaccacctattcagcaaccaactcctggaaaacctccagcacagcagcctggacatgaaaaatcacagcctgggcctgcaaagcccccagctcagccctcagggctaacaaagccattggctcaacaaccagggacagtgaaacccccagtccagccaccagggacaacaaagcctccagctcagcctcttggtcctgctaagcctccagctcagcagactgggtcagagaagccttcatcggagcagcctgggccaaaggctttagctcagcctcctggagttggaaagactccagctcaacagccagggccagcaaagcctccaacccagcaggtggggacaccaaaacccctagctcaacaacctgggctacagtctccagctaaggcacctgggcctacaaagactccagttcagcagcctgggccaggaaagattccagctcaacaggcaggacccggaaagacttctgcccagcagactggcccaacaaagcctccttcacaactgcctggcccagcaaagcccccacctcaacagcctggcccagcaaagcccccacctcaacagcctggctcagcaaagcccccatctcaacagcctggctcaacaaaacccccacctcaacagcctggcccagcaaagccctcacctcaacagcctggctcaacaaaacccccatctcaacagcctggctcagcaaaaccctcagctcaacagcctagcccagcaaagccctcggctcagcaatctacaaaaccagtaagccaaacaggatctggaaaacctctgcagccaccaacagtgtctccatctgcaaaacagcctccttcacaaggcctccctaaaaccatctgtcctctttgcaataccactgaacttctgttgcatgttccagaaaaggccaattttaacacatgcactgagtgtcaaaccactgtctgtagtctctgtggttttaatcccaatcctcatttaacggaggtaaaagagtggctctgtttgaactgtcaaatgaaaagagctctaggcggggatctggctccagttccgtcatcaccccagcccaaactgaagactgcacctgttaccactacatcagcagtgagcaaatcatccccacagccacagcagacttccccaaagaaggatgctgcaccaaaacaggatctctccaaggcacctgagcctaaaaagccaccaccactagtgaaacaaccaacccttcatggctctccttcagccaaggccaagcagccccctgaggcagattctttgtccaagccagcccctcccaaagaaccttctgtcccatctgagcaggacaaggcccctgttgctgatgataaaccaaagcagcccaagatggtaaagccaaccactgaccttgtatcttcatcatcagcaacaacaaaacctgatattccaagctccaaagtacagtcacaagctgaagagaaaacaacccctcctctaaaaacagactctgccaaaccctcacagagttttccaccaacaggggaaaaagtcagcccatttgattctaaagccatacctcgacctgcatcagattcaaaaattatttcacatcctggtcccagttcagagagcaaaggtcaaaaacaagttgaccccgtacaaaagaaggaagaacccaagaaagcacaaaccaaaatgagtcctaaaccagatgccaagccaatgccaaaagggtcaccaacaccccctggcccacgacctaccgctggccaaactgtccccacacctcaacagtccccaaagcctcaggagcagtcaaggcgtttcagtctgaatctgggaagtattactgatgcccccaaatcacagcctacaactcctcaagagaccgtgactgggaaactctttgggtttggagcatcaatcttcagccaggcatcaaatttaatttccactgcaggccaacctggacctcattcacaaagtggaccaggggccccaatgaaacaagcccctgccccttcacagccacctacttcacaagggccacccaaatccacaggtcaagcaccaccagcacctgcaaaaagtatacctgtgaaaaaggaaacaaaagccccagcagctgaaaaattagagcccaaagctgaacaagctccaacagtaaaaagaacagaaacagaaaaaaagccaccacctattaaggatagcaaatctttaacagctgagcctcaaaaggctgtccttcccacaaaactggagaaatcgcccaaaccagaatcaacctgtcctctctgcaaaactgaactcaacataggttctaaggatcctcctaacttcaatacttgcactgaatgcaagaatcaagtgtgtaatctctgtggatttaaccctacaccacatttgactgagattcaagaatggctttgtttaaattgccaaacccagagagcaatatcaggacagcttggagacatacgcaaaatgccacctgcaccatcaggacccaaagcatctcctatgcctgttcctacagaatcatcatctcagaaaacagcagtgcctccccaagtaaaattagtgaaaaagcaagaacaagaagtaaaaacggaagctgaaaaagtcattctggaaaaagtaaaggaaacactatcaatggaaaaaattcctcctatggtaaccacagatcaaaaacaagaagagagtaaactagagaaagacaaagcttcagctcttcaagaaaaaaagccactccctgaagaaaaaaaactaatccctgaagaagaaaagatacgttctgaagaaaaaaagccactcctagaagaaaaaaagccaacccctgaagacaaaaagctactcccagaggcaaaaacatcagccccagaagaacagaaacatgacttacttaaatctcaagtacaaattgctgaagaaaagcttgaaggcagagtggctccaaagacagtgcaagaagggaaacaaccacagaccaagatggaaggtttaccatctggcacacctcagagtttacctaaagaagatgataagacaaccaaaacaataaaagaacagccacagccaccatgcacagcaaaacctgatcaggtggaacctgggaaagaaaaaacagaaaaggaagatgacaaatcagacacctcaagttctcagcagcctaaaagcccccaaggtctgagcgacacgggatattcttccgatggaatatcaagctcacttggtgaaattccaagtcttattccaactgatgaaaaggatattctcaagggactcaaaaaggactctttttcacaagaaagcagcccttccagcccctcagatttggctaagttagaaagtacagtcctatctattttggaagctcaagcaagtacacttgctgatgaaaagtcagaaaagaaaacacaaccccatgaagtttctcctgaacagcctaaagaccaagagaaaactcagagtttatctgaaaccttggaaattactatttcagaagaggagatcaaagagagtcaagaagaaaggaaagacacttttaaaaaagatagccaacaagatattccttccagcaaggaccataaagagaagtctgagtttgttgatgacataactactagaagagagccttatgattcagttgaagagagtagtgaaagtgaaaactcacctgttccacaaagaaaacgaagaactagtgttggctcatcaagcagtgatgagtataaacaggaagacagccaaggatcaggggaagaggaggacttcattcgaaaacaaatcatagaaatgagtgctgatgaagatgcttcaggttctgaagatgatgagttcatcagaaaccagctcaaagagattagtagcagtactgagagccagaagaaggaagaaacaaagggaaaaggcaaaataacagcagggaaacacagacgactgactcgaaaaagtagcacaagcattgatgaagatgcaggaagacgtcactcatggcatgatgaagacgatgaagcatttgatgaaagtcctgaacttaaatacagagaaactaaaagtcaggaaagtgaagaacttgtagttactggaggaggagggctacgccgatttaaaacaattgagctcaacagtacaatagcagataaatattctgcagagtcatcacagaaaaaaacaagtttgtattttgacgaagagccagaattggaaatggaaagcctgacagactcacctgaagataggtcaaggggagagggatcttcgagtctgcatgcttccagcttcactcctggtacatcccctacatcagtatcatcacttgatgaggacagtgacagtagcccgagtcacaaaaaaggagagagcaaacagcaacgcaaagctcggcacagaccacatggccctcttttgcctactattgaagattcttcagaggaagaagaattgagagaggaagaagaattattaaaggagcaagaaaagcagagggaaatagaacagcaacaaagaaagagttctagtaaaaaatcaaagaaagacaaagatgaacttcgagctcagagaagaagggaaaggccaaagacaccacctagtaatctctctcccattgaagatgcatctccgacagaagagttacgtcaggctgcagaaatggaggagctccatagatcttcttgttctgaatattcacctagcatagagtcagacccagaaggttttgaaataagcccggaaaaaataatagaagtacaaaaagtttataaattgcccacagctgtttcattatactcaccaacagatgagcaatctattatgcagaaagaaggtagccaaaaggcgttaaaaagtgctgaggagatgtatgaagaaatgatgcataaaacacacaaatacaaagcttttccagctgcaaatgaacgagatgaagtgtttgaaaaagagcctttgtatggtgggatgctaatagaggattatatttatgaatctttagtagaagacacgtacaatggatcggtagatggcagtctgctaacaaggcaagaagaagaaaatggatttatgcagcagaaaggaagagagcaaaagataagactttcagaacagatttatgaagatcctatgcagaaaattacagacctccagaaagagttttatgagttagaaagcttacattctgttgtgcctcaggaagatattgtttcaagctcttttatcatcccagaaagccatgagatagtggacctgggtactatggtaacttctacagaagaagaaaggaaactactagatgctgatgctgcctatgaagaacttatgaagaggcaacagatgcaattaacacctggatctagcccaacccaggcccccattggtgaggatatgacagagtccaccatggactttgacagaatgccagatgcctctttgacatcaagtgttctctcaggagcgtctcttacagattcgaccagcagtgcaacactctctatcccagatgttaaaataacccaacatttttcaacagaagaaattgaggatgaatatgtaaccgattatacaagagaaattcaagagataattgcccatgaatcgctgattttgacctactcggagccttcagaaagtgctacatctgtcccaccctctgacacaccttctctcacatcatctgtttcttcggtctgtaccacagatagctcttcacccattactaccctggatagcataaccacagtttatacagagccagtggacatgataactaaatttgaagattctgaggaaatttcttcatcaacttattttccaggcagcattatagactatccagaagaaataagtgtatctttagatcggactgccccaccagatggtagagctagtgctgatcatattgttatttccttatctgatatggcatcttctatcatagaatctgtagtacctaaacctgaagggccagttgctgacactgtttctactgacttacttatatctgaaaaggacccagtgaagaaagccaagaaggaaactgggaatggaatcattctggaagttttggaagcttacagagataaaaaggagttggaggccgaacgaacaaaaagtagcttatccgaaaccgtgtttgatcacccaccttcttctgtaatagcccttccaatgaaagagcagctttcaactacatactttacatctggagagacctttggtcaggaaaaacctgcatctcagttaccatctggcagtccttctgtttcctctcttccagctaaacctcgcccattctttagaagttcttctttggatatatcagctcaacctcctccccctcctccccctccccctcctcctcctcctccaccaccaccccctcctcccccaccacttcctccaccaacttcacctaaaccaactattcttcctaaaaaaaagttaacagttgcatctccagtgactacagctacacctctgtttgatgctgttactactctagagaccacagctgttctgagaagtaatggattacctgttacaagaatatgtactactgcacctcctcctgttcctcctaagccatcttcaattccatctggacttgtatttacccacaggcctgagccaagcaaacctccaatcgcccccaaaccagtgattcctcagcttccaacaactacacaaaaaccaacagatatacaccccaaaccaacaggcctatctttaacttcaagtatgaccttaaatttagtgacttcagcagattataaattgccttcccctacctccccactttccccacactccaacaagtcttcaccaagattttccaaatccctcacagaaacttatgtagttattacattgccatctgaaccagggactccaacagattcttctgctagtcaagcaattaccagttggcccttgggatcaccctccaaagatctggtttctgttgaacctgtgttttctgtagttcctcctgtgacagctgtagaaattccaatttcttcagaacagaccttctacatctctggagctttacagacattttctgctacccctgtcacagcaccctcttcatttcaagcagctcccacatcagttacacagtttctcactactgaagtttccaagactgaggtttcagcaaccagaagtacagctcctagtgttggtctcagcagcatttccataacaattcctccagagcctcttgctctagataacatacatttagagaagcctcagtataaagaagatggaaaattgcaacttgttggtgatgtaattgatttgcgtacagtaccaaaggtagaagttaaaacaactgataaatgtattgatctttctgcttctacaatggatgtgaaaaggcagatcacagcaaatgaagtttatgggaaacaaattagtgctgtccaaccctctattataaatcttagtgtgacatcatcaatagtgactcctgtatctctggccactgagacagtgacctttgtcacatgcacagctagtgcaagttacactacaggcacagaaagcctagtgggtgcagaacatgcaatgacaacaccactccaacttacaacatcaaagcatgctgagcccccatacaggataccaagtgaccaggtctttcctatagctagggaagaagcaccaataaacttatctctaggtactccagcacatgcagtgacattggctattacaaaacctgtcactgtgcctcctgttggtgtcacaaatggatggactgatagcaccgtatcccagggaatcactgatggggaagtagtggatctcagtacaaccaagtctcacagaacagtcgtaacaatggatgagtctacttcaagtgtgatgaccaaaataatagaagatgaaaaacccgttgatttaaccgcagggagaagagctgtgtgctgtgatgtggtttataaattaccatttggaaggagctgcacagcacagcagcctgcaactactcttcctgaggatcgttttggttatagggatgaccactatcagtatgatcgatcagggccatatggttatagagggattgggggaatgaagccttccatgtctgacacaaatttagcagaagctggacattttttctataaaagtaagaatgcttttgattattctgaaggaactgacacagcagtagatctgacttcagggagagttactacaggtgaggtaatggattattcaagcaagactacaggtccatatccagaaacacgacaagtcatttcaggagctgggattagtaccccacagtattccacagcaagaatgacaccaccaccaggaccccagtattgtgtggggagtgttttgaggtcatctaatggtgttgtctattcttcagtagcaactccaacaccctctacatttgctatcaccacacaacctggctccattttcagcaccacagtgagggatttgtctggtattcatacggctgatgcagtgacttcattacctgccatgcaccatagccagccaatgcctagatcatattttataacaacaggtgcatctgaaacggacattgcagtaactggtattgatatcagtgccagtttgcaaactattactatggagtctcttactgctgagacgatagactctgttcccactttaaccacagcatccgaagtgtttcctgaagtggtgggagatgaaagtgctcttttaattgtccctgaagaagataaacaacagcagcagctagacttggagcgtgagctcctggaactggagaaaattaagcaacagcgctttgctgaggaattggagtgggaacgtcaggaaattcaaaggttccgagaacaagaaaagatcatggttcagaaaaagttggaggagctgcagtctatgaagcaacaccttctctttcagcaagaagaagagcggcaagcccagttcatgatgaggcaggagacgttagctcagcaacagttacagcttgagcagatccaacagctgcaacaacagcttcaccagcagctggaggagcaaaagattcggcagatctaccagtataactatgacccttctggaactgcttctccacaaaccactacagagcaggcaattttggaaggtcagtatgctgctctggaaggcagtcaattttgggcaactgaagatgcaaccaccacagcttcagctgttgtggcaattgaaataccacaaagccaaggatggtacaccgttcagtctgatggtgttactcagtacattgccccacctggtatcctgagcactgtttcagaaatacctctaacagatgttgttgtgaaagaggaaaaacaacccaaaaagagaagttctggagctaaagtccgaggacagtatgatgacatgggagaaaatatgacagatgatccccgaagttttaaaaagatagtggacagtggtgtacaaacggatgacgaagatgccacagatcggagctatgtgagtaggagaaggagaactaaaaagagtgtggatacaagcgtccaaactgatgatgaagatcaggatgagtgggatatgcctactagatcaaggaggaaagctcgtgtagggaaatatggtgacagcatgacagaggctgacaagaccaaacccctttccaaagtctccagcatagcagttcaaacggtagcagagatatctgtgcaaactgaaccagttggaaccataagaacaccctccatacgggcacgagtggatgccaaggtagaaataattaaacacatttcagcacctgaaaagacttacaaagggggcagtttaggatgtcaaacagaagcagattcagacacacaaagtcctcaatatctgagtgccacatctccacccaaagacaagaaacgcccaacacctttagagattggttattcatctcacctccgggcagattccacagtacagctggctccttccccacccaaatcccccaaagtcctttactcacccatctcaccactttcaccaggcaaagccttagaatcagcctttgtaccttatgaaaaacccctccctgatgatataagtccacagaaagtactgcatccagatatggctaaagttcccccagcaagtcctaagacagccaagatgatgcagcgttctatgtctgaccccaagcctctgagtccaacagcagacgaaagttccagggctccttttcagtataccgagggctatacgactaaaggttctcaaaccatgacatcctctggagcccagaaaaaagttaaaagaactctgccaaatccacctcctgaggagatttccacaggaactcaatccacattcagcacaatgggcacagtttccaggagaaggatctgcagaaccaacacaatggcacgagccaagattctccaggacatagacagagagcttgatcttgtggaaagggagtctgcaaaacttcgaaagaaacaagcagagcttgatgaagaagaaaaggagattgatgctaagctacgatacctggaaatgggaattaacaggaggaaagaggccctattaaaggagagagaaaagagagaacgagcctacctccagggagtagctgaggatcgtgattacatgtctgacagtgaagtgagtagcacaagaccaacccgaatagaaagtcagcatggcattgagcgaccaagaactgctccccaaactgaattcagccagtttataccaccacaaacccaaacagaatctcaactagttcctccgacaagtccttacacacaataccagtactcttcccctgctcttcctacccaagcacccacctcatacactcaacagtctcattttgagcaacaaactttgtaccatcagcaagtttcaccttatcagactcagccaacattccaagctgtggcaacaatgtccttcacacctcaagttcaacctacaccaaccccacagccttcttatcagttaccttcacagatgatggtgatacaacagaagccacggcaaactacattatatttggagcccaagataacctcaaactatgaagtgattcgcaaccaaccccttatgatagcacctgtttctacggataacacatttgctgtttcccatcttggtagtaagtacaatagtttagacttgagaataggtttggaggaaagaagtagcatggcaagcagtccaatatcaagcatatctgcagattctttctatgcagatattgatcaccatactccacgaaattatgtcctaattgacgacattggagagatcaccaaaggaacagcggcattaagcaccgcatttagccttcatgaaaaggatctgtcaaaaacagaccgtctccttcgaaccactgagacacgccggtctcaagaagtgacagatttcctagcacctttacagtcttcctctagattgcatagttatgtgaaggcggaggaagacccaatggaggatccttacgagttaaagcttctgaaacatcagattaaacaggaatttcgtagagggacagagagcttagatcaccttgctggtctttctcattattaccatgctgatactagctacagacattttccaaaatctgagaagtatagcatcagtagactcacacttgaaaaacaagcagcaaaacaactgccagcagccatactttatcaaaagcagtcaaagcataagaaatcactaattgaccctaaaatgtcaaaattttcacctattcaagaaagtagagaccttgaacctgattattcaagctatatgacttctagcacttcatctattggtggcatttcctccagggcaaggctccttcaagatgacatcacttttggcctcagaaaaaatattacagaccaacaaaaatttatgggatcttctcttggcacaggactgggcacattaggaaataccatacgctcagctctgcaggatgaagcggataagccatacagtagtggcagcaggtccagaccttcctccagaccttcctctgtctatgggcttgatttatcaattaaaagggattcttctagctcttccctaagactgaaagctcaagaggctgaagctctagatgtttcctttagtcatgcatcatcctctgccagaactaagccgaccagtttgccaattagtcaaagtagaggaagaataccaattgtggcccagaattctgaagaagaaagcccactcagtcctgttggccagccaatgggaatggccagggctgcagctggacccctgccaccaatatctgcagacaccagggatcagtttggatcaagccactcattgcctgaagttcagcaacacatgagggaagaatcacggactcgaggctatgaccgtgacatagcattcatcatggatgacttccaacatgccatgtcagacagtgaagcctatcatctgcgtcgtgaggaaacagattggtttgataaacccagggagtctcgtttggaaaatggacatggtctggaccgaaaactgccggaaagattggtccactctagaccactcagtcaacatcaagagcaaattatacagatgaacgggaaaactatgcactacatctttcctcacgcaaggataaaaataacaagagactcaaaggatcacacagtttcaggtaatggattaggaattagaattgtgggtggtaaagaaatcccgggacatagtggagaaattggagcctatattgccaagattcttcctgggggaagtgcggaacagacggggaagcttatggaagggatgcaagtattggaatggaatggaattcccttgacttctaaaacatatgaagaagttcagagtatcattagtcagcaaagtggggaagcagaaatatgtgtaagactggacctcaatatgctatcagattctgaaaattcccagcatctggaacttcatgagccaccaaaagctgtggataaggcgaaatccccaggggttgatcctaagcagttggcagcagaactccagaaggtttcactacagcagtcaccgctggttctgtcatcagttgttgaaaaaggatctcatgttcattcaggtcctacatcagcaggatccagttccgttcccagccctgggcaaccagggtccccctcagtgagcaaaaagaagcacggcagcagcaagcctaccgatggaacaaaggttgtctctcatccaattacaggagaaattcagcttcaaattaactatgatcttggaaatctcataatacatattctccaagcaagaaatcttgttcctcgagacaacaatggttattctgacccttttgtgaaagtgtaccttcttccagggagaggtcaagtcatggttgtccagaatgcaagtgctgagtacaagagaaggactaaacatgtccagaaaagtcttaatcctgagtggaatcaaacagtaatttataaaagtatttccatggaacagctcaagaagaaaacactggaggtgacagtttgggattatgatagattttcatccaacgacttccttggggaggtattgattgatttatctagcacatctcacctcgataacactccaaggtggtatcctctcaaagaacagactgaaagcattgatcatggcaagtctcattccagtcagagcagccagcagtccccaaagccatctgttatcaaaagcagaagccatggtatcttccctgacccatcaaaggacatgcaggttcccaccattgagaaatcccatagtagtcctggtagctcaaaatcatcatcagaaggccatctccgttctcatggaccatctcgcagtcaaagcaaaaccagcgtcactcagacccacctggaagatgcaggggctgccatagctgctgccgaagctgccgtgcaacaactccgcattcaaccaagtaaaagacgcaaataaattcctcagcatggcagcttaatgttcatctgttgcctttctttcctgctgtcctttcctgtttgctttcagttttcaacatcctctgctcaccctgttctctgtccctttgtctgtgtaagaacgatataaatacattaatatgctctttcttatttagattttttttatttacatagactgaaataaaactggctgtttctcctttgtttccaccatccatccaacctggctcatagcatttgatacagtgtctgtgatgtttggaagcaaagcaatgttgtgtgtcctttttgtttgcgcttaaatatcttttagaatacagaaattataagcacaagtggctgccagttttccaggacttataccaaaaaaaaaaaagtgcacacatataagtatttagagcagatttgcaattagattcttgtatctgaaaacactcaaaaagtctaggcagaagataatgcaaccaacagtcaacttctagaaccttggaggaaaagccatttcaagacagtgctttaaaacactaacaaattttgcttctgaaatatggtagctttccatgtgcaaaaaattgtagtcttctgaaaaatctgtgaagaaaatcttatttcttacattctcaaaaaactacattaaattaatatatgtataagcatatgtgataaggcaatgcaacctcactgaggagcacaattgggtccattctgttggatcacactttgtatgtgatgacagattttacagatattttttctaaccattggaaatcaagatatactatgtctggtagctataagtcaatcaaagtataacaattgacctatcttaactgctgtattttcatttcatttgtgaaaatttagtcgattgatataattatataaaaacttaatatgtgcaaatatttcacaaatgtaggtaccctgttacttctaaaaggcattagccaggcaatggagatagatcattgttctctccatctccctagtcatcattttcaaagaaacagccagttttaaacccctttagtgctgtgcatgtggtgtcattttggcatttgaaaacacaacctatttaaatagagcaaaagagcacttctgtttgcatgaataacatttaagctggttccatctgaggatacatactctgggtttccatttcacccacactgccacagcagcacataaaagcggtcagtctaatcatgccaggaagcagcacagacacagcatagcaggagtcctccccattcaaagaactcagtctgataatctgcctccaccagccaatggcaaccaagaccaaagccagctagccctcaggaaggtgatgtctgatggaccagtcaagccagaaggaggtgagcagaaaggccctgttcaaagcacacagcaagaacatccccaaatttaaagctctcatctttaatttttagagattgtctgataaaatatgtttatccactttttaatgtgcttttgtgggcatggcatttcaggacttcatcatcaccatgtaagtcccaagatcagtcccgtaatatattgactacagtgatttgtatttttctatgcactgggcatcttttgacttttgttgggaaatagattaacaatattcatattgcagaatggaatgcatgctactaacctaatctgttcaagcatgactataaatatgtttcattgtgataaaagtttaaattgctcacagttcaagttagcctaccagttggaatgtggatcagtgttttttgcctattatttcaagtgtaacttttaaaaatttagtggattttgaaaattcttagaggaaagtaaaggaaaaattgttaatgcactcatttacctttacatggtgaaagttctctcttgatcctacaaacagacattttccactcgtgtttccatagttgttaagtgtatcagatgtgttgggcatgtgaatctccaagtgcctgtgtaataaataaagtatctttatttcattcat

SEQ ID NO: 22612 - DNA, 20081 bp, Homo sapiens
  source 1..20081: mol_type = unassigned DNA
tctgcttctccccggctcggggcgccgaggcggcgtccgggaggtgtcttctgcaaaggttgcctggcgctgtccaacatggaggaggcaccggcagcgggcgttacctgcgagcgggactaacccctgcctggcgttccgggcggcagtgcctggtccagagtccagggactcggctgcctgcacgccccgaggcggaccccggctctgactgctcccctggccgcgggcttctcgactgggacgcggcgcgaggagggagcgcggcggccccgagtctccctgagccatgggcaacgaggcgagcttggaaggggaagggctccccgaagggctggcggcggccgcagcggctggaggaggagctagcggggcggggagcccctctcacaccgcgatcccggccggcatggaggcggatttgagccagctgagcgaagaggagaggagacagatcgccgctgtcatgtcaagggcgcaggggctgcccaagggaagcgtccccccggccgctgcggagtcgccttccatgcacaggaaacaagagttggatagtagtcatcctccaaagcaatcaggaagacccccggaccctgggcgtccagctcaacctggtctcagtaaaagtagaactacagacactttcaggtcagagcagaaattgcctgggaggagtccttccactattagcttgaaagaatcaaagtccagaactgatttaaaggaagagcacaagtctagtatgatgcctggcttcctctcagaggttaacgctttaagtgctgtttcctctgttgtaaataaattcaacccttttgatttgatatcagactctgaggcatcccaggaagaaaccaccaagaaacaaaaagtggttcagaaggagcaaggaaaacctgaaggaatcataaaacctcctttacaacaacagccacccaagccgattcctaagcagcaaggacctggtagggatccgcttcagcaggatggcactcccaaatcaatatcttctcaacaaccagaaaaaattaaatcacaacctccaggtacaggaaagccaattcagggtcctacccagactcctcagacagaccatgcaaaattgccacttcaacgagatgcatccaggcctcagactaaacaggcagacatagtaaggggagaatcagttaaaccctcactgccaagcccatccaaaccacctattcagcaaccaactcctggaaaacctccagcacagcagcctggacatgaaaaatcacagcctgggcctgcaaagcccccagctcagccctcagggctaacaaagccattggctcaacaaccagggacagtgaaacccccagtccagccaccagggacaacaaagcctccagctcagcctcttggtcctgctaagcctccagctcagcagactgggtcagagaagccttcatcggagcagcctgggccaaaggctttagctcagcctcctggagttggaaagactccagctcaacagccagggccagcaaagcctccaacccagcaggtggggacaccaaaacccctagctcaacaacctgggctacagtctccagctaaggcacctgggcctacaaagactccagttcagccaaagcccccatctcaacagcctggctcaacaaaacccccacctcaacagcctggcccagcaaagccctcacctcaacagcctggctcaacaaaacccccatctcaacagcctggctcagcaaaaccctcagctcaacagcctagcccagcaaagccctcggctcagcaatctacaaaaccagtaagccaaacaggatctggaaaacctctgcagccaccaacagtgtctccatctgcaaaacagcctccttcacaaggcctccctaaaaccatctgtcctctttgcaataccactgaacttctgttgcatgttccagaaaaggccaattttaacacatgcactgagtgtcaaaccactgtctgtagtctctgtggttttaatcccaatcctcatttaacggaggtaaaagagtggctctgtttgaactgtcaaatgaaaagagctctaggcggggatctggctccagttccgtcatcaccccagcccaaactgaagactgcacctgttaccactacatcagcagtgagcaaatcatccccacagccacagcagacttccccaaagaaggatgctgcaccaaaacaggatctctccaaggcacctgagcctaaaaagccaccaccactagtgaaacaaccaacccttcatggctctccttcagccaaggccaagcagccccctgaggcagattctttgtccaagccagcccctcccaaagaaccttctgtcccatctgagcaggacaaggcccctgttgctgatgataaaccaaagcagcccaagatggtaaagccaaccactgaccttgtatcttcatcatcagcaacaacaaaacctgatattccaagctccaaagtacagtcacaagctgaagagaaaacaacccctcctctaaaaacagactctgccaaaccctcacagagttttccaccaacaggggaaaaagtcagcccatttgattctaaagccatacctcgacctgcatcagattcaaaaattatttcacatcctggtcccagttcagagagcaaaggtcaaaaacaagttgaccccgtacaaaagaaggaagaacccaagaaagcacaaaccaaaatgagtcctaaaccagatgccaagccaatgccaaaagggtcaccaacaccccctggcccacgacctaccgctggccaaactgtccccacacctcaacagtccccaaagcctcaggagcagtcaaggcgtttcagtctgaatctgggaagtattactgatgcccccaaatcacagcctacaactcctcaagagaccgtgactgggaaactctttgggtttggagcatcaatcttcagccaggcatcaaatttaatttccactgcaggccaacctggacctcattcacaaagtggaccaggggccccaatgaaacaagcccctgccccttcacagccacctacttcacaagggccacccaaatccacaggtcaagcaccaccagcacctgcaaaaagtatacctgtgaaaaaggaaacaaaagccccagcagctgaaaaattagagcccaaagctgaacaagctccaacagtaaaaagaacagaaacagaaaaaaagccaccacctattaaggatagcaaatctttaacagctgagcctcaaaaggctgtccttcccacaaaactggagaaatcgcccaaaccagaatcaacctgtcctctctgcaaaactgaactcaacataggttctaaggatcctcctaacttcaatacttgcactgaatgcaagaatcaagtgtgtaatctctgtggatttaaccctacaccacatttgactgagaattgccaaacccagagagcaatatcaggacagcttggagacatacgcaaaatgccacctgcaccatcaggacccaaagcatctcctatgcctgttcctacagaatcatcatctcagaaaacagcagtgcctccccaagtaaaattagtgaaaaagcaagaacaagaagtaaaaacggaagctgaaaaagtcattctggaaaaagtaaaggaaacactatcaatggaaaaaattcctcctatggtaaccacagatcaaaaacaagaagagagtaaactagagaaagacaaagcttcagctcttcaagaaaaaaagccactccctgaagaaaaaaaactaatccctgaagaagaaaagatacgttctgaagaaaaaaagccactcctagaagaaaaaaagccaacccctgaagacaaaaagctactcccagaggcaaaaacatcagccccagaagaacagaaacatgacttacttaaatctcaagtacaaattgctgaagaaaagcttgaaggcagagtggctccaaagacagtgcaagaagggaaacaaccacagaccaagatggaaggtttaccatctggcacacctcagagtttacctaaagaagatgataagacaaccaaaacaataaaagaacagccacagccaccatgcacagcaaaacctgatcaggaaaaggaagatgacaaatcagacacctcaagttctcagcagcctaaaagcccccaaggtctgagcgacacgggatattcttccgatggaatatcaagctcacttggtgaaattccaagtcttattccaactgatgaaaaggatattctcaagggactcaaaaaggactctttttcacaagaaagcagcccttccagcccctcagatttggctaagttagaaagtacagtcctatctattttggaagctcaagcaagtacacttgctgatgaaaagtcagaaaagaaaacacaaccccatgaagtttctcctgaacagcctaaagaccaagagaaaactcagagtttatctgaaaccttggaaattactatttcagaagaggagatcaaagagagtcaagaagaaaggaaagacacttttaaaaaagatagccaacaagatattccttccagcaaggaccataaagagaagtctgagtttgttgatgacataactactagaagagagccttatgattcagttgaagagagtagtgaaagtgaaaactcacctgttccacaaagaaaacgaagaactagtgttggctcatcaagcagtgatgagtataaacaggaagacagccaaggatcaggggaagaggaggacttcattcgaaaacaaatcatagaaatgagtgctgatgaagatgcttcaggttctgaagatgatgagttcatcagaaaccagctcaaagagattagtagcagtactgagagccagaagaaggaagaaacaaagggaaaaggcaaaataacagcagggaaacacagacgactgactcgaaaaagtagcacaagcattgatgaagatgcaggaagacgtcactcatggcatgatgaagacgatgaagcatttgatgaaagtcctgaacttaaatacagagaaactaaaagtcaggaaagtgaagaacttgtagttactggaggaggagggctacgccgatttaaaacaattgagctcaacagtacaatagcagataaatattctgcagagtcatcacagaaaaaaacaagtttgtattttgacgaagagccagaattggaaatggaaagcctgacagactcacctgaagataggtcaaggggagagggatcttcgagtctgcatgcttccagcttcactcctggtacatcccctacatcagtatcatcacttgatgaggacagtgacagtagcccgagtcacaaaaaaggagagagcaaacagcaacgcaaagctcggcacagaccacatggccctcttttgcctactattgaagattcttcagaggaagaagaattgagagaggaagaagaattattaaaggagcaagaaaagcagagggaaatagaacagcaacaaagaaagagttctagtaaaaaatcaaagaaagacaaagatgaacttcgagctcagagaagaagggaaaggccaaagacaccacctagtaatctctctcccattgaagatgcatctccgacagaagagttacgtcaggctgcagaaatggaggagctccatagatcttcttgttctgaatattcacctagcatagagtcagacccagaaggttttgaaataagcccggaaaaaataatagaagtacaaaaagtttataaattgcccacagctgtttcattatactcaccaacagatgagcaatctattatgcagaaagaaggtagccaaaaggcgttaaaaagtgctgaggagatgtatgaagaaatgatgcataaaacacacaaatacaaagcttttccagctgcaaatgaacgagatgaagtgtttgaaaaagagcctttgtatggtgggatgctaatagaggattatatttatgaatctttagtagaagacacgtacaatggatcggtagatggcagtctgctaacaaggcaagaagaagaaaatggatttatgcagcagaaaggaagagagcaaaagataagactttcagaacagatttatgaagatcctatgcagaaaattacagacctccagaaagagttttatgagttagaaagcttacattctgttgtgcctcaggaagatattgtttcaagctcttttatcatcccagaaagccatgagatagtggacctgggtactatggtaacttctacagaagaagaaaggaaactactagatgctgatgctgcctatgaagaacttatgaagaggcaacagatgcaattaacacctggatctagcccaacccaggcccccattggtgaggatatgacagagtccaccatggactttgacagaatgccagatgcctctttgacatcaagtgttctctcaggagcgtctcttacagattcgaccagcagtgcaacactctctatcccagatgttaaaataacccaacatttttcaacagaagaaattgaggatgaatatgtaaccgattatacaagagaaattcaagagataattgcccatgaatcgctgattttgacctactcggagccttcagaaagtgctacatctgtcccaccctctgacacaccttctctcacatcatctgtttcttcggtctgtaccacagatagctcttcacccattactaccctggatagcataaccacagtttatacagagccagtggacatgataactaaatttgaagattctgaggaaatttcttcatcaacttattttccaggcagcattatagactatccagaagaaataagtgtatctttagatcggactgccccaccagatggtagagctagtgctgatcatattgttatttccttatctgatatggcatcttctatcatagaatctgtagtacctaaacctgaagggccagttgctgacactgtttctactgacttacttatatctgaaaaggacccagtgaagaaagccaagaaggaaactgggaatggaatcattctggaagttttggaagcttacagagataaaaaggagttggaggccgaacgaacaaaaagtagcttatccgaaaccgtgtttgatcacccaccttcttctgtaatagcccttccaatgaaagagcagctttcaactacatactttacatctggagagacctttggtcaggaaaaacctgcatctcagttaccatctggcagtccttctgtttcctctcttccagctaaacctcgcccattctttagaagttcttctttggatatatcagctcaacctcctccccctcctccccctccccctcctcctcctcctccaccaccaccccctcctcccccaccacttcctccaccaacttcacctaaaccaactattcttcctaaaaaaaagttaacagttgcatctccagtgactacagctacacctctgtttgatgctgttactactctagagaccacagctgttctgagaagtaatggattacctgttacaagaatatgtactactgcacctcctcctgttcctcctaagccatcttcaattccatctggacttgtatttacccacaggcctgagccaagcaaacctccaatcgcccccaaaccagtgattcctcagcttccaacaactacacaaaaaccaacagatatacaccccaaaccaacaggcctatctttaacttcaagtatgaccttaaatttagtgacttcagcagattataaattgccttcccctacctccccactttccccacactccaacaagtcttcaccaagattttccaaatccctcacagaaacttatgtagttattacattgccatctgaaccagggactccaacagattcttctgctagtcaagcaattaccagttggcccttgggatcaccctccaaagatctggtttctgttgaacctgtgttttctgtagttcctcctgtgacagctgtagaaattccaatttcttcagaacagaccttctacatctctggagctttacagacattttctgctacccctgtcacagcaccctcttcatttcaagcagctcccacatcagttacacagtttctcactactgaagtttccaagactgaggtttcagcaaccagaagtacagctcctagtgttggtctcagcagcatttccataacaattcctccagagcctcttgctctagataacatacatttagagaagcctcagtataaagaagatggaaaattgcaacttgttggtgatgtaattgatttgcgtacagtaccaaaggtagaagttaaaacaactgataaatgtattgatctttctgcttctacaatggatgtgaaaaggcagatcacagcaaatgaagtttatgggaaacaaattagtgctgtccaaccctctattataaatcttagtgtgacatcatcaatagtgactcctgtatctctggccactgagacagtgacctttgtcacatgcacagctagtgcaagttacactacaggcacagaaagcctagtgggtgcagaacatgcaatgacaacaccactccaacttacaacatcaaagcatgctgagcccccatacaggataccaagtgaccaggtctttcctatagctagggaagaagcaccaataaacttatctctaggtactccagcacatgcagtgacattggctattacaaaacctgtcactgtgcctcctgttggtgtcacaaatggatggactgatagcaccgtatcccagggaatcactgatggggaagtagtggatctcagtacaaccaagtctcacagaacagtcgtaacaatggatgagtctacttcaagtgtgatgaccaaaataatagaagatgaaaaacccgttgatttaaccgcagggagaagagctgtgtgctgtgatgtggtttataaattaccatttggaaggagctgcacagcacagcagcctgcaactactcttcctgaggatcgttttggttatagggatgaccactatcagtatgatcgatcagggccatatggttatagagggattgggggaatgaagccttccatgtctgacacaaatttagcagaagctggacattttttctataaaagtaagaatgcttttgattattctgaaggaactgacacagcagtagatctgacttcagggagagttactacaggtgaggtaatggattattcaagcaagactacaggtccatatccagaaacacgacaagtcatttcaggagctgggattagtaccccacagtattccacagcaagaatgacaccaccaccaggaccccagtattgtgtggggagtgttttgaggtcatctaatggtgttgtctattcttcagtagcaactccaacaccctctacatttgctatcaccacacaacctggctccattttcagcaccacagtgagggatttgtctggtattcatacggctgatgcagtgacttcattacctgccatgcaccatagccagccaatgcctagatcatattttataacaacaggtgcatctgaaacggacattgcagtaactggtattgatatcagtgccagtttgcaaactattactatggagtctcttactgctgagacgatagactctgttcccactttaaccacagcatccgaagtgtttcctgaagtggtgggagatgaaagtgctcttttaattgtccctgaagaagataaacaacagcagcagctagacttggagcgtgagctcctggaactggagaaaattaagcaacagcgctttgctgaggaattggagtgggaacgtcaggaaattcaaaggttccgagaacaagaaaagatcatggttcagaaaaagttggaggagctgcagtctatgaagcaacaccttctctttcagcaagaagaagagcggcaagcccagttcatgatgaggcaggagacgttagctcagcaacagttacagcttgagcagatccaacagctgcaacaacagcttcaccagcagctggaggagcaaaagattcggcagatctaccagtataactatgacccttctggaactgcttctccacaaaccactacagagcaggcaattttggaaggtcagtatgctgctctggaaggcagtcaattttgggcaactgaagatgcaaccaccacagcttcagctgttgtggcaattgaaataccacaaagccaaggatggtacaccgttcagtctgatggtgttactcagtacattgccccacctggtatcctgagcactgtttcagaaatacctctaacagatgttgttgtgaaagaggaaaaacaacccaaaaagagaagttctggagctaaagtccgaggacagtatgatgacatgggagaaaatatgacagatgatccccgaagttttaaaaagatagtggacagtggtgtacaaacggatgacgaagatgccacagatcggagctatgtgagtaggagaaggagaactaaaaagagtgtggatacaagcgtccaaactgatgatgaagatcaggatgagtgggatatgcctactagatcaaggaggaaagctcgtgtagggaaatatggtgacagcatgacagaggctgacaagaccaaacccctttccaaagtctccagcatagcagttcaaacggtagcagagatatctgtgcaaactgaaccagttggaaccataagaacaccctccatacgggcacgagtggatgccaaggtagaaataattaaacacatttcagcacctgaaaagacttacaaagggggcagtttaggatgtcaaacagaagcagattcagacacacaaagtcctcaatatctgagtgccacatctccacccaaagacaagaaacgcccaacacctttagagattggttattcatctcacctccgggcagattccacagtacagctggctccttccccacccaaatcccccaaagtcctttactcacccatctcaccactttcaccaggcaaagccttagaatcagcctttgtaccttatgaaaaacccctccctgatgatataagtccacagaaagtactgcatccagatatggctaaagttcccccagcaagtcctaagacagccaagatgatgcagcgttctatgtctgaccccaagcctctgagtccaacagcagacgaaagttccagggctccttttcagtataccgagggctatacgactaaaggttctcaaaccatgacatcctctggagcccagaaaaaagttaaaagaactctgccaaatccacctcctgaggagatttccacaggaactcaatccacattcagcacaatgggcacagtttccaggagaaggatctgcagaaccaacacaatggcacgagccaagattctccaggacatagacagagagcttgatcttgtggaaagggagtctgcaaaacttcgaaagaaacaagcagagcttgatgaagaagaaaaggagattgatgctaagctacgatacctggaaatgggaattaacaggaggaaagaggccctattaaaggagagagaaaagagagaacgagcctacctccagggagtagctgaggatcgtgattacatgtctgacagtgaagtgagtagcacaagaccaacccgaatagaaagtcagcatggcattgagcgaccaagaactgctccccaaactgaattcagccagtttataccaccacaaacccaaacagaatctcaactagttcctccgacaagtccttacacacaataccagtactcttcccctgctcttcctacccaagcacccacctcatacactcaacagtctcattttgagcaacaaactttgtaccatcagcaagtttcaccttatcagactcagccaacattccaagctgtggcaacaatgtccttcacacctcaagttcaacctacaccaaccccacagccttcttatcagttaccttcacagatgatggtgatacaacagaagccacggcaaactacattatatttggagcccaagataacctcaaactatgaagtgattcgcaaccaaccccttatgatagcacctgtttctacggataacacatttgctgtttcccatcttggtagtaagtacaatagtttagacttgagaataggtttggaggaaagaagtagcatggcaagcagtccaatatcaagcatatctgcagattctttctatgcagatattgatcaccatactccacgaaattatgtcctaattgacgacattggagagatcaccaaaggaacagcggcattaagcaccgcatttagccttcatgaaaaggatctgtcaaaaacagaccgtctccttcgaaccactgagacacgccggtctcaagaagtgacagatttcctagcacctttacagtcttcctctagattgcatagttatgtgaaggcggaggaagacccaatggaggatccttacgagttaaagcttctgaaacatcagattaaacaggaatttcgtagagggacagagagcttagatcaccttgctggtctttctcattattaccatgctgatactagctacagacattttccaaaatctgagaagtatagcatcagtagactcacacttgaaaaacaagcagcaaaacaactgccagcagccatactttatcaaaagcagtcaaagcataagaaatcactaattgaccctaaaatgtcaaaattttcacctattcaagaaagtagagaccttgaacctgattattcaagctatatgacttctagcacttcatctattggtggcatttcctccagggcaaggctccttcaagatgacatcacttttggcctcagaaaaaatattacagaccaacaaaaatttatgggatcttctcttggcacaggactgggcacattaggaaataccatacgctcagctctgcaggatgaagcggataagccatacagtagtggcagcaggtccagaccttcctccagaccttcctctgtctatgggcttgatttatcaattaaaagggattcttctagctcttccctaagactgaaagctcaagaggctgaagctctagatgtttcctttagtcatgcatcatcctctgccagaactaagccgaccagtttgccaattagtcaaagtagaggaagaataccaattgtggcccagaattctgaagaagaaagcccactcagtcctgttggccagccaatgggaatggccagggctgcagctggacccctgccaccaatatctgcagacaccagggatcagtttggatcaagccactcattgcctgaagttcagcaacacatgagggaagaatcacggactcgaggctatgaccgtgacatagcattcatcatggatgacttccaacatgccatgtcagacagtgaagcctatcatctgcgtcgtgaggaaacagattggtttgataaacccagggagtctcgtttggaaaatggacatggtctggaccgaaaactgccggaaagattggtccactctagaccactcagtcaacatcaagagcaaattatacagatgaacgggaaaactatgcactacatctttcctcacgcaaggataaaaataacaagagactcaaaggatcacacagtttcaggtaatggattaggaattagaattgtgggtggtaaagaaatcccgggacatagtggagaaattggagcctatattgccaagattcttcctgggggaagtgcggaacagacggggaagcttatggaagggatgcaagtattggaatggaatggaattcccttgacttctaaaacatatgaagaagttcagagtatcattagtcagcaaagtggggaagcagaaatatgtgtaagactggacctcaatatgctatcagattctgaaaattcccagcatctggaacttcatgagccaccaaaagctgtggataaggcgaaatccccaggggttgatcctaagcagttggcagcagaactccagaaggtttcactacagcagtcaccgctggttctgtcatcagttgttgaaaaaggatctcatgttcattcaggtcctacatcagcaggatccagttccgttcccagccctgggcaaccagggtccccctcagtgagcaaaaagaagcacggcagcagcaagcctaccgatggaacaaaggttgtctctcatccaattacaggagaaattcagcttcaaattaactatgatcttggaaatctcataatacatattctccaagcaagaaatcttgttcctcgagacaacaatggttattctgacccttttgtgaaagtgtaccttcttccagggagaggtcaagtcatggttgtccagaatgcaagtgctgagtacaagagaaggactaaacatgtccagaaaagtcttaatcctgagtggaatcaaacagtaatttataaaagtatttccatggaacagctcaagaagaaaacactggaggtgacagtttgggattatgatagattttcatccaacgacttccttggggaggtattgattgatttatctagcacatctcacctcgataacactccaaggtggtatcctctcaaagaacagactgaaagcattgatcatggcaagtctcattccagtcagagcagccagcagtccccaaagccatctgttatcaaaagcagaagccatggtatcttccctgacccatcaaaggacatgcaggttcccaccattgagaaatcccatagtagtcctggtagctcaaaatcatcatcagaaggccatctccgttctcatggaccatctcgcagtcaaagcaaaaccagcgtcactcagacccacctggaagatgcaggggctgccatagctgctgccgaagctgccgtgcaacaactccgcattcaaccaacaaagcctcccaatcaccggcctgcagaaagctctgtgtccaccggctcctcgggcagcagctttggcagtgggtatagcgtggacagtgaaggaagcagcagcactgcaggggagactaatctatttcctattccgaggatagggaagatgggacagaatggacaagagcctgtaaaacagccaggggtaggagtaggactagcagacactgaagctaaaactcaggtaatgggagaaatcaagattgcattgaagaaggaaatgaagacagatggtgaacaactaatagttgaaattctccaatgcagaaatattacatacaaatttaagtctcctgatcatctaccagatttatatgtgaaaatatatgtgatgaatatttctacccaaaaaaaggtgatcaagaaaaaaacaagagtatgcagacatgatcgagagccttcgtttaatgaaacttttcgattcagtctaagtcctgcaggacattctcttcagattttacttttctccaatggagggaagtttatgaaaaagaccttgattggtgaagcctgtatctggcttgacaaagtggatctcagaaaaagaatagtcaactggcacaaacttttggtcagtcctactcaaacgcattgaagaaacatgtcttctcagggtatagaaactgctctaaatagcctcacatcaagactatagttgaatactattgtacaaagctaagttttgagaggcaaacataagagtgggaacaacaagcaaaaacatacttaagaccttgtacatttattgttgtggatcacacaaagatattcaactgaaaaagttcacatactgaaaacaagaagaatggagttctgagaccttgaatttcccatggctgtgaagagaaactgtgaaacaaattttgattacttaagacaataatctttgagtagagttgagctatagcttaagacaggctcaaagattaatgtggttttcatgcagcacaaaggtaattctttatgcaaaggagccttggttgaaaggaaaggactgatgtaacaaatctcagttttcaaaacttcaaaaatcttccttcatcgtcttctattcagacaacttgctgctttcagattctgacataagatatacctacagtatgtgtccagggctggaagtgaggtggctgtgttcttagggaaaatggaagaggagatgtagaaattgtggctttcaggccatattttaccagttttctctgtgtctaaatgttacaagcatatacaacactgactttggaatccatgtggtaaaagcacatttgtttctgtatcatttgaaacaaggtagagtgaagataatactcagtagaaataaaattgaatttatctagaaataaaactatgactggctaacaaagaagaatgttgccccataaaatattggaattttggttgaaaccatcaaaatcttcataatttaccattaagccaagacatcttcagtctatgtaccaaaggacctagagtaaactgatatgttctaggaagcatgataacttactctttgtgaaactgcaaataaatgtattatcctgcacatttcctttctgttgagcgatgcattgacagagaaagaaaattctttctctggcaaacaaaccatattaatcttgtgacattgattaattaaatggatcctcatttcataatattttatgcttttttccttaatgacttaattcatttactgattgtatcatgaaaacatgacactaaactcgagttctctctagtgctctattttcttactttagtgacagtatcacagtgatcaagttcatcaatgttgggaaaatatgtgaaaagtcaacatttacctgagattaaaatatactttgagctattttaataataatgaataaaacaactaatgtccaagtcttaaaatgaagcaccctcttctctatcagcattattaattaaggaagtaacgtgaagttgtggaaaaaacactcagcagggaataaaagcctgtcttctggtcttagttctaccactgactgtgtcactttgcacatgtcacttacactcactttaccccagttttcttatctataggataaaaacaattatatattcttaaccttccaaatgagatgttgtgatgataaatcaatgatccatgaaagatgaaagcacatttccaaatatagttttatacacagaagtgaggaataattattacatatctttttaattctcaaattttatatgtgaaaaacatcatctaaaccaatggcaaggattgacatggataaaagcagtaaattagccacaaaacttattttttatttaaaatataaactttaacctgactaaaggtgaagaattacatgaaaatgcaaattttgctatcccaaattaaatgaataatgctggtcttaccctagtcctatattccacccaaaagaaataaatcaaattgcttctcagagcattctgagcttaaaacctgctgctttatttaagggtgaagtgttagtggaattagagaaaaccaactctagatattggttggatattgaattttctcatttttaaagaaaaaatgctctaaatttgagaggactgtaaagcactaaaaataagagaatttctaatatatcccaggatatatatatatatatatgacttcagaatacaaattcgatcttccccaaactgagaaagataaccataacttttcttccctctattttttaatccccctccactgacaatacaatgtcatttaccattgacattgctctcaaatgagcatgggagagtggaatcatcaaagacattatattgctagtattttatttttagaaactattagatctgctgatggttgccatggatatttccagcagaagctagcacttgaagaagcctataatcatcactcataattggggaagaaaaggtccaaggagatctccttctgacataaaaaggctctggtatttgcccttaaaagaaaaccctgactcatctctgatcctcttttgcagccactcatatccataggtatgcatgagagtttgtatgaccagttagctttcttcattccagttgcaatttcttttagaataatataaatggagggatcaccaaaacaaagattatctctttggtagctatttaacctgaaagcgtaggagtctttccattatagaagcccctccgttccaaggaactagcgatggggctaggtcaatcagcagagttgacaacagggcttctttttgtgcaccagcattccccttcagagagcataagatcctgccagtgtgccaagtttgcagctgaccaaacttctaggttgtactggaattattctatgcaacactgatccttatatgaatgcgtttcttctgaatgatgttgactacccttcttacaacaaaactgtttcttttttattgcaaatagggctcttggtgttttttacttttttgtacatatcacagtacatggtttttcactctttagtttatttcattttattggaattaacttttttttattctaatactgacagagtttgtaatctctatataatacgtaattactccaattacagcacttttaccttgaagagcatctcagtttttcccacaatttcattgagtcatcagagactgatgttgcttcttggtttcaaatttggtcctaaagaaactttcggctgtagaaacaaaagcacagagtgaattttttacaaaagacagggaatatagaatagtcattacagacacaaataaccctagtagcacgaagttggtgttttctctgtttttacttaagattaagaagatttttggtgactctgaactctttatttatatttcagtttaaaatatcaagactaaggggcatcagttatctttactctttaatattgcccatattttaataaattacactaattaaacgcatattttcagcataccagtggaattaattttgtggatcacacacatttaaatagtcatattgtgggaatattatagctggtaaccagctgatattgattcttattataggaatgactgtaatgatagtggtggtagcagtagtgatattagcggtggtggtgatgtgaagtaaaataaaagtatatattatattgtgcccaatttattagaaattatttgatcaatgcttcatttcattaaaatatcataaagatgtttatagtatttttttactttattatttaaatcataactaacaatatttttaaaaacttattttcattgctacaatgtcaaatattccaaaatcagccaactacagctatatatgtgttatgtgtgacagaagtgatcttccttccctctttttgagcttgacatgaaagtgaaagaagactcaatgaataattatgagctatttatttaataattacttgccttgggtgtaatacagtaatgaatgagtgaaacaaatattctcattgaatatgatacaatgctgttttctgtatgtttcatgttctattattaaaggtatccattaggccaaaattatttaatcaaattctttatctgataggtagattgagagcattttcttaatgcattaccttgtacataagtatacacttggtaaagtagacgaagttgaaatattaatttcatttggcatttagcatgtgaatatgattattgtttgattgtgtctgtatatttgtttggtgacgtgctcaggtgctcccactactgattaatgtgtgtgctaatatcctaaaaacacatatgaggtttaagaaaaaattttcttgtctgaaaacataaacatcttaataaaactgattttgaaataaaaactaaagtacttgaagatatgtcttgtttctaactatatgttgcatgccatgttggtgatttgctaatgtgtttttttgtttgtttgttttacccaaatccctttggaaaatctaatggacaaatgcaaattcttggactaaggactgtataaattgacctgaaaatacatgagagttgcatttaaaaaaaaatgcttgtaaatccgtcttgagttttactctatgtaaaaatatgtcttggttttgtgattgtatacaagatgtatcttgataacttatgtaaactgtgccgtataaaggctgttgcctcagccttactaataaatactgaaaatatcacctttga

SEQ ID NO: 22613 - DNA, 2482 bp, Homo sapiens
  source 1..2482: mol_type = unassigned DNA
atgttaacaattaatcagttcaagttggtcatcttcctagataacctggaccgtaatcttcctagataacctggacatcaggattggtgatggggctgaggggccagtgagtgtgccatggcttatgggatgaagatgacatgactgaaagtggcatggccagggaggaatcagatgatgagctctccctcggtcatggcaggagggactcctccgattctctcaagtccatcaacctggccgcgtctgtggagtcagtgcatgtgaccttcccggagcagcagacagctgtccggaggaagcgctccggcagcagctccgagccatcccagagatccagcttttcttcaaacagatcccaaagaggcagcacaagcacccgaaacagcagtcaaaaaggaagcagtgttttgagtattaagcaaaaaggcaaaagggaactttatatggaaaagcttcaagaacatttaatcaaagcaaaagcctttaccataaagaagacgctggagatctatgtgcccatcaaacagttcttttacaacctcatccacccggagtatagcgccgtgactgacgtgtatgtactcatgttcctggctgacactgtggacttcatcatcattgtcttcggcttttgggcctttgggaaacactcagcagctgcagacatcacctcttcactgtcagaggaccaggtcccggggccgtttttggtgatggtcctcattcagtttggaaccatggtggtggaccgagccctctacctcaggaagactgtactgggaaaggtcatcttccaggtcattcttgtgttcggaattcacttctggatgttcttcatcttacctggtgtgactgagaggaaattcagccagaacctggttgcccagctttggtactttgtgaaatgtgtttacttcgggttgtctgcttaccagatccgttgtggctacccaacgcgagtcctggggaacttcctcaccaagagctacaattacgtcaacctcttcttattccaagggtttcgcctcgtgccctttttgactgagctgagggcagtgatggactgggtgtggacggacacaactttgagcctgtccagctggatctgtgtggaggacatctatgctcacatattcatcctgaagtgttggcgggagtcggagaagcctattttcacaatgagtgcccaacaaagccagttgaaagttatggaccagcagagctttaacaaatttatacaagctttttctagggacaccggtgctatgcaatttctggaaaattatgaaaaagaagacataacagtagcagaactggaaggaaactcaaattctttgtggaccatcagcccacccagtaagcagaaaatgatacacgaactcctggaccccaatagtagcttctctgttgttttttcatggagtattcagagaaacttaagtctgggtgcaaaatcggaaatagcaacagataagctttcttttcctcttaaaaatattactcgaaagaatatcgctaaaatgatagcaggcaacagcacagaaagttcaaaaacaccagtgaccatagaaaagatttatccatattatgtgaaagcacctagtgattctaactcaaaacctataaagcaacttttatctgaaaataatttcatggatattaccatcattttgtccagagacaatacaactaaatataacagtgagtggtgggttctcaacctgactggaaacagaatatacaatccgaactctcaggccctggaactggtggtcttcaatgacaaagtcagtcccccaagtctggggttcctggctggctatggtattatgggattatatgcttcagttgtccttgtgattgggaaatttgtccgtgaattcttcagtgggatttctcactccatcatgtttgaagagcttccaaatgtggatcgaattttgaagttgtgcacagatatttttttagttcgagagacaggagaactggagctagaagaagatctctatgccaaattaatattcctatatcgctcaccagagacaatgatcaaatggactagagaaaaaacaaattgaaaccttagaacacagactgcaaataatgttaacatttgaattttttttaaaagcacaatattctcataagagctaagcatttctagttcgacggaaatggtttgtttctcttctgataggtagacaaaaggagctgatatccttctgcagtaaaagctaccttgcaagttaaggcactgttgaaaatgttatttgtaactccatttctctgaaatcagggctacttgctttatgttttagtcaacagtgtctcgcattctgattgatcatgtgaaggaatcatttatgggccccgtccctaagagaaacagaagaggagtcagaaagaaagatgcctgtgttttcctctgtggggcccgtgcacttcctggagagatgctacaatgcaatatacagcgctc

SEQ ID NO: 22614 - DNA, 9712 bp, Homo sapiens
  source 1..9712: mol_type = unassigned DNA
gccccgggagcgtgccctcggggcggagagcgtcgcggcccgcgccgaggcgatgctcgggtggctgcgagctgccggcggcgagaggccatagacgggcatgggccttgcgtcccaccacccctagggaccctcgagcctcgcccctctgctccgactcgccggaccgacgcgatggcctcagaagtggtgtgcgggctcatcttcaggctgctgctgcccatctgcctggcagtagcatgtgcattccgatacaatgggctctcctttgtctaccttatctacctcttgctcattcctctgttctcagaaccaacaaaaacgacgatgcaaggacatacgggacggttattaaagtctctgtgcttcatcagtctttccttcctgttgctgcacatcattttccacatcacgttggtgagccttgaagctcaacatcgtattgcacctggctacaactgctcaacatgggaaaagacattccggcagatcggctttgaaagcttaaagggagctgatgctggcaatgggatcagagtgtttgtacctgacatcgggatgttcattgctagtctgaccatctggctcctctgtagaaacattgttcagaaacctgtgacagacgaagcagcacagagtaacccggagtttgaaaatgaagaattggctgaaggagaaaaaattgattcagaagaggcactgatctatgaagaggatttcaatggaggagatggtgttgaaggcgagttggaagaaagcacgaagttaaaaatgttccgcaggcttgcctctgtggcctctaagctcaaggagttcattggcaacatgatcaccactgctgggaaagtcgttgttaccatcttactgggctcctcgggcatgatgttgccgtctttgacatcatctgtgtatttttttgtatttttgggtctgtgcacctggtggtcctggtgccggacgttcgacccattgctgttcagctgtctctgtgttctgctggctattttcactgctggacatttgattggactttatttataccagttccaattctttcaagaggcagttccacccaatgactactatgcaaggttgtttggtatcaagtcagtaattcaaacggactgttcaagtacttggaagatcatagtgaacccggacctgtcgtggtaccaccacgccaaccctatcctcctgctggtgatgtactacactctggccactctgatccgcatctggctgcaagagccccttgtgcaggatgaggggaccaaagaagaggacaaagccctggcttgtagccccatccaaataacagcggggaggaggcggagcctgtggtacgcaacccattaccccactgatgagagaaaacttttatccatgacccaggatgactacaaaccatctgatggcctgctggtgactgtgaacggcaaccccgtggattaccacaccatccacccaagcctgcccatggagaacggccctggcaaagccgacctctactccacccctcagtaccggtgggagccctctgatgaatcctcagaaaagcgagaggaggaagaggaagagaaagaagaatttgaagaagaaaggagccgtgaggaaaaaagaagtatcaaagttcatgccatggtctccgtattccaatttattatgaaacaaagttacatctgtgccctcatagctatgatggcctggagcatcacctatcacagctggctgaccttcgtgctgctgatctggtcgtgcactctttggatgattcgcaacagaagaaaatatgccatgatcagctctcccttcatggtggtttatggaaacctattgttgatattacagtatatatggagttttgaacttcctgaaattaaaaaagttccaggatttttagaaaagaaagagccaggagaacttgcttccaaaatccttttcaccattactttttggctactgctgaggcagcacctcacagagcaaaaagctctgcaagaaaaggaagctcttttatcggaagtcaaaattggcagtcaggaaaatgaagaaaaagatgaggaacttcaagatatacaagtggaaggagagcccaaagaggaggaagaagaggaagcgaaggaagagaagcaagagagaaagaaggtagagcaagaggaagctgaagaagaagatgagcaggacatcatgaaagtcctgggcaatctggtggtggccatgttcatcaagtactggatctacgtctgcggaggcatgttcttcttcgtcagcttcgagggtaaaatcgtaatgtacaaaatcatctacatggtgctgttcctgttctgtgtggccctataccaggtgcactatgaatggtggaggaaaattctaaaatatttttggatgtcagtggttatttacactatgctggtgcttatctttatatacacatatcagtttgagaacttcccaggcctgtggcaaaatatgactggactgaaaaaagaaaagcttgaggatcttggcttaaagcagtttactgtggctgaactattcactcgcatattcatcccaacctcctttctgctggtgtgcattttacacctgcactacttccatgaccggttccttgaactcacagacctcaagtccattcccagcaaagaagacaacaccatctacagactggcccacccggaaggaagcctcccggacctcaccatgatgcatctgactgccagcctggagaagccggaggtgaggaagttggctgagcctggggaggagaagcttgagggctactctgaaaaagcccagaagggtgatcttgggaaagacagcgaggagtcagaggaggacggagaggaagaggaggaatccgaggaggaggaagaaacatcagacttaaggaacaaatggcacctggtgattgaccgcctcactgtgctcttcttaaaattcctggagtattttcacaagctgcaggtgttcatgtggtggattttggagttgcacatcatcaaaatcgtttcctcttacattatctgggtttctgtgaaagaggtgtctctgttcaactatgtatttttgatttcttgggcttttgctctgccgtacgccaagctgcgccgtctggcttcaagtgtctgcacagtctggacgtgtgtgatcatcgtctgcaaaatgttgtaccagctccaaaccattaagcctgagaacttctctgttaactgttccttgccaaatgaaaatcaaacaaacatcccctttaatgagttgaacaagtctctgctctacagcgctcctatcgatcctacagagtgggtcggcctgcggaagtcttcgcctctgctagtctacctgaggaataacctcctgatgctggctatcctggcctttgaagtcaccatttaccgccatcaggaatactatcgaggtcgaaataacctgacggcccctgtgtctagaactatctttcatgacattacaagactacatctagatgatggacttattaattgtgccaaatatttcattaattacttcttttacaagtttggtctggagacctgtttcctaatgtcagttaacgtcattggccagcgaatggatttctatgccatgatccacgcctgctggctgatcgctgtcttatatagacgcagaaggaaagccatcgcagagatctggcccaagtactgctgcttcctggcatgcatcatcaccttccagtatttcatctgcattggcatcccacctgctccttgccgagattacccgtggagattcaagggtgccagcttcaatgacaacatcataaagtggctgtacttcccagatttcattgtgcggcccaaccctgtgtttctcgtctatgacttcatgctgcttctgtgtgcctccttacaacggcagatttttgaggatgagaacaaggctgcagtgcgaatcatggcaggtgacaatgtcgagatctgcatgaaccttgatgcggcctccttcagccaacataaccctgtgccagattttattcactgcagatcttacttagacatgtccaaagtgatcatcttcagctacctcttctggtttgtgctcaccatcatcttcatcactgggaccaccaggatcagcatcttttgcatggggtacctggtggcctgtttctacttcctgctctttgggggcgatttgctgttgaaacccatcaagagcatcctgcgctactgggactggctgatcgcatacaacgtttttgtgattacgatgaaaaatatcctgtcaataggagcatgtggatacattggaacattggtgcacaatagttgttggttgatccaggctttcagcctggcctgcacagtcaaaggctatcaaatgcctgctgctaattcaccctgtacacttcccagtggggaagcaggaatcatttgggacagcatatgttttgccttcctcctgctgcaaagaagagttttcatgagttattattttctacatgttgtggctgatataaaagcttcccagattctggcatcaagaggagctgaacttttccaggccacaattgtaaaagctgtaaaggcaagaattgaggaagagaagaagtccatggaccagctgaagcgacagatggatcgcatcaaggccaggcaacagaaatataaaaagggtaaggagaggatgctgagcttgacccaggagccaggggaaggccaggacatgcaaaaactctctgaagaggatgatgaaagagaagcagacaaacagaaagccaagggcaaaaaaaagcagtggtggcggccttgggttgatcatgcttccatggtcaggagtggagattattatttgtttgaaacggatagtgaagaggaggaagaggaagaattaaagaaggaagatgaagaacctccacgaaggtcagcattccagtttgtttatcaagcctggattactgatcctaaaacagcactccgacaaagacacaaagagaaaaaaaggtctgcaagagaagaacggaaacgaaggcggaaaggatccaaggagggtcctgtggaatgggaagaccgggaggatgaaccaatcaaaaagaaatccgatggaccagataatatcatcaagaggatatttaatattttgaaatttacctgggtcctatttctggcaacagtggacagtttcactacttggcttaactccatttcaagggagcatattgatatatctacagttctgagaattgaacgatgcatgctgaccagagaaattaagaagggcaatgttccaactcgggagagcatccacatgtactatcagaaccacatcatgaacctttccagagagtcgggactggacaccattgacgagcatcccggagctgcttcaggtgcacagacagcccacaggatggatagtttagattcacatgacagtatctccagcgagcccacgcagtgtaccatgctgtactcacgccaggggaccactgagaccatcgaggaggtggaggctgagcaggaggaggaggcagggagcacggcgcctgagcccagggaggccaaggagtacgaggccactgggtacgatgtgggagccatgggtgccgaggaggccagcctcaccccagaggaagagctgacacagttctccaccttggacggggatgtggaggccccaccctcctacagcaaggctgtgagcttcgagcatctgtccttcggctcgcaggacgactctgcaggcaagaaccgtatggcagtcagcccggacgacagccgcaccgacaagctggggtccagcatcttacctcccctgacccatgagctgacggccagcgagctgctgctgaaaaagatgtttcacgacgatgagcttgaagagtcagagaaattctacgtggggcagccccgatttctgctgctcttctatgccatgtacaataccctggtggcccgctcggagatggtgtgctacttcgtgatcatcctcaaccacatggtctctgcctccatgatcacgctcctgcttcccatcctcatcttcctctgggccatgttgtccgtccccaggcccagccgccggttctggatgatggccatcgtctatactgaggtggcaattgtagtcaagtatttcttccaatttgggttctttccctggaataagaatgtggaggtgaacaaagataaaccgtatcaccccccaaacatcataggagtggaaaagaaggaaggttatgttctctatgacctcatccagctcctggctctgttctttcatcgatcaattttgaagtgccatggcttatgggatgaagatgacatgactgaaagtggcatggccagggaggaatcagatgatgagctctccctcggtcatggcaggagggactcctccgattctctcaagtccatcaacctggccgcgtctgtggagtcagtgcatgtgaccttcccggagcagcagacagctgtccggaggaagcgctccggcagcagctccgagccatcccagagatccagcttttcttcaaacagatcccaaagaggcagcacaagcacccgaaacagcagtcaaaaaggaagcagtgttttgagtattaagcaaaaaggcaaaagggaactttatatggaaaagcttcaagaacatttaatcaaagcaaaagcctttaccataaagaagacgctggagatctatgtgcccatcaaacagttcttttacaacctcatccacccggagtatagcgccgtgactgacgtgtatgtactcatgttcctggctgacactgtggacttcatcatcattgtcttcggcttttgggcctttgggaaacactcagcagctgcagacatcacctcttcactgtcagaggaccaggtcccggggccgtttttggtgatggtcctcattcagtttggaaccatggtggtggaccgagccctctacctcaggaagactgtactgggaaaggtcatcttccaggtcattcttgtgttcggaattcacttctggatgttcttcatcttacctggtgtgactgagaggaaattcagccagaacctggttgcccagctttggtactttgtgaaatgtgtttacttcgggttgtctgcttaccagatccgttgtggctacccaacgcgagtcctggggaacttcctcaccaagagctacaattacgtcaacctcttcttattccaagggtttcgcctcgtgccctttttgactgagctgagggcagtgatggactgggtgtggacggacacaactttgagcctgtccagctggatctgtgtggaggacatctatgctcacatattcatcctgaagtgttggcgggagtcggagaagagataccctcagccacggggccagaagaagaagaaagtggtgaagtatggcatgggaggaatgatcatcgtcctgctcatctgcattgtctggtttcctcttctcttcatgtctttgatcaaatctgtggctggggtcatcaaccagcccctggacgtctccgtcacaattaccctgggagggtatcagcctattttcacaatgagtgcccaacaaagccagttgaaagttatggaccagcagagctttaacaaatttatacaagctttttctagggacaccggtgctatgcaatttctggaaaattatgaaaaagaagacataacagtagcagaactggaaggaaactcaaattctttgtggaccatcagcccacccagtaagcagaaaatgatacacgaactcctggaccccaatagtagcttctctgttgttttttcatggagtattcagagaaacttaagtctgggtgcaaaatcggaaatagcaacagataagctttcttttcctcttaaaaatattactcgaaagaatatcgctaaaatgatagcaggcaacagcacagaaagttcaaaaacaccagtgaccatagaaaagatttatccatattatgtgaaagcacctagtgattctaactcaaaacctataaagcaacttttatctgaaaataatttcatggatattaccatcattttgtccagagacaatacaactaaatataacagtgagtggtgggttctcaacctgactggaaacagaatatacaatccgaactctcaggccctggaactggtggtcttcaatgacaaagtcagtcccccaagtctggggttcctggctggctatggtattatgggattatatgcttcagttgtccttgtgattgggaaatttgtccgtgaattcttcagtgggatttctcactccatcatgtttgaagagcttccaaatgtggatcgaattttgaagttgtgcacagatatttttttagttcgagagacaggagaactggagctagaagaagatctctatgccaaattaatattcctatatcgctcaccagagacaatgatcaaatggactagagaaaaaacaaattgaaaccttagaacacagactgcaaataatgttaacatttgaattttttttaaaagcacaatattctcataagagctaagcatttctagttcgacggaaatggtttgtttctcttctgataggtagacaaaaggagctgatatccttctgcagtaaaagctaccttgcaagttaaggcactgttgaaaatgttatttgtaactccatttctctgaaatcagggctacttgctttatgttttagtcaacagtgtctcgcattctgattgatcatgtgaaggaatcatttatgggccccgtccctaagagaaacagaagaggagtcagaaagaaagatgcctgtgttttcctctgtggggcccgtgcacttcctggagagatgctacaatgcaatatacagcgctccatccccactggggaagctgctgtgatgagactagatgagccttcaacacactcagaaaatgcaacagcaatagggggcagacagctcctacctgtgtttctaggagcaaaagagagggaactaattgcccgtgaagacgccagtggaaggatcagcctcattctaagcaaaaacatagtattagtgatactcttactgccttatcttaaccaaggactaataggatacctttccattaaacaccagtgacttctcaggaaaaaaaaaaaaaaggagcaaaacaaatgatgtgtacacctgctttgttatggtccaccagtgaccagcttcaatgaggggaaccattctggagggctgcggtctcctgtgcaaacagacatgaggcagaagagtaaaaagaccaacccagtgggacctagaatactttgtaactctttaataactgaggtcaggaccgctcttctgccttccccttcccttaacgtgctttttcccatttccatgatttaaggcaatggtttttccagtatgtgacattttccttcctgtttttcaggtatatcaaagagtttacatattccaattcacatttttacatctgagacgggttttttaagttcataattatgaaagaaatatgtatattgagcttggggaaataaaaatggccttttcttaaattattattattggtaatacaacctcttcattaaataacaatgtagcatgaaaaatttatgattgaaatgtagttttcattccatattaagatacagtttctgagaagaatcattgaatggactagaatatgtcaaaaattgatcctgtgtagtttgggttcagggctgacttaaaataaagcacatcctgcaaagtc

SEQ ID NO: 22615 - DNA, 2650 bp, Homo sapiens
  source 1..2650: mol_type = unassigned DNA
atgtcagtggttatttacactatgctggtgcttatctttatatacacatatcagtttgagaacttcccaggcctgtggcaaaatatgactggactgaaaaaagaaaagcttgaggatcttggcttaaagcagtttactgtggctgaactattcactcgcatattcatcccaacctcctttctgctggtgtgcattttacacctgcactacttccatgaccggttccttgaactcacagacctcaagtccattcccagcaaagaagacaacaccatctacagccatgccaaagtcaatggtcgcgtatatctaataataaatagcatcaagaaaaaattaccaatccaccaaaatgaactggcccacccggaaggaagcctcccggacctcaccatgatgcatctgactgccagcctggagaagccggaggtgaggaagttggctgagcctggggaggagaagcttgagggctactctgaaaaagcccagaagggtgatcttgggaaagacagcgaggagtcagaggaggacggagaggaagaggaggaatccgaggaggaggaagaaacatcagacttaaggaacaaatggcacctggtgattgaccgcctcactgtgctcttcttaaaattcctggagtattttcacaagctgcaggtgttcatgtggtggattttggagttgcacatcatcaaaatcgtttcctcttacattatctgggtttctgtgaaagaggtgtctctgttcaactatgtatttttgatttcttgggcttttgctctgccgtacgccaagctgcgccgtctggcttcaagtgtctgcacagtctggacgtgtgtgatcatcgtctgcaaaatgttgtaccagctccaaaccattaagcctgagaacttctctgttaactgttccttgccaaatgaaaatcaaacaaacatcccctttaatgagttgaacaagtctctgctctacagcgctcctatcgatcctacagagtgggtcggcctgcggaagtcttcgcctctgctagtctacctgaggaataacctcctgatgctggctatcctggcctttgaagtcaccatttaccgccatcaggaatactatcgaggtcgaaataacctgacggcccctgtgtctagaactatctttcatgacattacaagactacatctagatgatggacttattaattgtgccaaatatttcattaattacttcttttacaagtttggtctggagacctgtttcctaatgtcagttaacgtcattggccagcgaatggatttctatgccatgatccacgcctgctggctgatcgctgtcttatatagacgcagaaggaaagccatcgcagagatctggcccaagtactgctgcttcctggcatgcatcatcaccttccagtatttcatctgcattggcatcccacctgctccttgccgagattacccgtggagattcaagggtgccagcttcaatgacaacatcataaagtggctgtacttcccagatttcattgtgcggcccaaccctgtgtttctcgtctatgacttcatgctgcttctgtgtgcctccttacaacggcagatttttgaggatgagaacaaggctgcagtgcgaatcatggcaggtgacaatgtcgagatctgcatgaaccttgatgcggcctccttcagccaacataaccctgtgccagattttattcactgcagatcttacttagacatgtccaaagtgatcatcttcagctacctcttctggtttgtgctcaccatcatcttcatcactgggaccaccaggatcagcatcttttgcatggggtacctggtggcctgtttctacttcctgctctttgggggcgatttgctgttgaaacccatcaagagcatcctgcgctactgggactggctgatcgcatacaacgtttttgtgattacgatgaaaaatatcctgtcaataggagcatgtggatacattggaacattggtgcacaatagttgttggttgatccaggctttcagcctggcctgcacagtcaaaggctatcaaatgcctgctgctaattcaccctgtacacttcccagtggggaagcaggaatcatttgggacagcatatgttttgccttcctcctgctgcaaagaagagttttcatgagttattattttctacatgttgtggctgatataaaagcttcccagattctggcatcaagaggagctgaacttttccaggccacaattgtaaaagctgtaaaggcaagaattgaggaagagaagaagtccatggaccagctgaagcgacagatggatcgcatcaaggccaggcaacagaaatataaaaagggtaaggagaggatgctgagcttgacccaggagccaggggaaggccaggacatgcaaaaactctctgaagaggatgatgaaagagaagcagacaaacagaaagccaagggcaaaaaaaagcagtggtggcggccttgggttgatcatgcttccatggtcaggagtggagattattatttgtttgaaacggatagtgaagaggaggaagaggaagaattaaagaaggaagatgaagaacctccacgaaggtcagcattccagtttgtttatcaagcctggattactgatcctaaaacagcactccgac

SEQ ID NO: 22616 - DNA, 3524 bp, Homo sapiens
  source 1..3524: mol_type = unassigned DNA
gggttctttccctggaataagaatgtggaggtgaacaaagataaaccgtatcaccccccaaacatcataggagtggaaaagaaggaaggttatgttctctatgacctcatccagctcctggctctgttctttcatcgatcaattttgaaggtactgcatgttaacaattaatcagttcaagttggtcatcttcctagataacctggaccgtaatcttcctagataacctggacatcaggattggtgatggggctgaggggccagtgagtgtgccatggcttatgggatgaagatgacatgactgaaagtggcatggccagggaggaatcagatgatgagctctccctcggtcatggcaggagggactcctccgattctctcaagtccatcaacctggccgcgtctgtggagtcagtgcatgtgaccttcccggagcagcagacagctgtccggaggaagcgctccggcagcagctccgagccatcccagagatccagcttttcttcaaacagatcccaaagaggcagcacaagcacccgaaacagcagtcaaaaaggaagcagtgttttgagtattaagcaaaaaggcaaaagggaactttatatggaaaagcttcaagaacatttaatcaaagcaaaagcctttaccataaagaagacgctggagatctatgtgcccatcaaacagttcttttacaacctcatccacccggagtatagcgccgtgactgacgtgtatgtactcatgttcctggctgacactgtggacttcatcatcattgtcttcggcttttgggcctttgggaaacactcagcagctgcagacatcacctcttcactgtcagaggaccaggtcccggggccgtttttggtgatggtcctcattcagtttggaaccatggtggtggaccgagccctctacctcaggaagactgtactgggaaaggtcatcttccaggtcattcttgtgttcggaattcacttctggatgttcttcatcttacctggtgtgactgagaggaaattcagccagaacctggttgcccagctttggtactttgtgaaatgtgtttacttcgggttgtctgcttaccagatccgttgtggctacccaacgcgagtcctggggaacttcctcaccaagagctacaattacgtcaacctcttcttattccaagggtttcgcctcgtgccctttttgactgagctgagggcagtgatggactgggtgtggacggacacaactttgagcctgtccagctggatctgtgtggaggacatctatgctcacatattcatcctgaagtgttggcgggagtcggagaagcctattttcacaatgagtgcccaacaaagccagttgaaagttatggaccagcagagctttaacaaatttatacaagctttttctagggacaccggtgctatgcaatttctggaaaattatgaaaaagaagacataacagtagcagaactggaaggaaactcaaattctttgtggaccatcagcccacccagtaagcagaaaatgatacacgaactcctggaccccaatagtagcttctctgttgttttttcatggagtattcagagaaacttaagtctgggtgcaaaatcggaaatagcaacagataagctttcttttcctcttaaaaatattactcgaaagaatatcgctaaaatgatagcaggcaacagcacagaaagttcaaaaacaccagtgaccatagaaaagatttatccatattatgtgaaagcacctagtgattctaactcaaaacctataaagcaacttttatctgaaaataatttcatggatattaccatcattttgtccagagacaatacaactaaatataacagtgagtggtgggttctcaacctgactggaaacagaatatacaatccgaactctcaggccctggaactggtggtcttcaatgacaaagtcagtcccccaagtctggggttcctggctggctatggtattatgggattatatgcttcagttgtccttgtgattgggaaatttgtccgtgaattcttcagtgggatttctcactccatcatgtttgaagagcttccaaatgtggatcgaattttgaagttgtgcacagatatttttttagttcgagagacaggagaactggagctagaagaagatctctatgccaaattaatattcctatatcgctcaccagagacaatgatcaaatggactagagaaaaaacaaattgaaaccttagaacacagactgcaaataatgttaacatttgaattttttttaaaagcacaatattctcataagagctaagcatttctagttcgacggaaatggtttgtttctcttctgataggtagacaaaaggagctgatatccttctgcagtaaaagctaccttgcaagttaaggcactgttgaaaatgttatttgtaactccatttctctgaaatcagggctacttgctttatgttttagtcaacagtgtctcgcattctgattgatcatgtgaaggaatcatttatgggccccgtccctaagagaaacagaagaggagtcagaaagaaagatgcctgtgttttcctctgtggggcccgtgcacttcctggagagatgctacaatgcaatatacagcgctccatccccactggggaagctgctgtgatgagactagatgagccttcaacacactcagaaaatgcaacagcaatagggggcagacagctcctacctgtgtttctaggagcaaaagagagggaactaattgcccgtgaagacgccagtggaaggatcagcctcattctaagcaaaaacatagtattagtgatactcttactgccttatcttaaccaaggactaataggatacctttccattaaacaccagtgacttctcaggaaaaaaaaaaaaaaggagcaaaacaaatgatgtgtacacctgctttgttatggtccaccagtgaccagcttcaatgaggggaaccattctggagggctgcggtctcctgtgcaaacagacatgaggcagaagagtaaaaagaccaacccagtgggacctagaatactttgtaactctttaataactgaggtcaggaccgctcttctgccttccccttcccttaacgtgctttttcccatttccatgatttaaggcaatggtttttccagtatgtgacattttccttcctgtttttcaggtatatcaaagagtttacatattccaattcacatttttacatctgagacgggttttttaagttcataattatgaaagaaatatgtatattgagcttggggaaataaaaatggccttttcttaaattattattattggtaatacaacctcttcattaaataacaatgtagcatgaaaaatttatgattgaaatgtagttttcattccatattaagatacagtttctgagaagaatcattgaatggactagaatatgtcaaaaattgatcctgtgtagtttgggttcagggctgacttaaaataaagcacatcctgcaaagtcattttaa

SEQ ID NO: 22617 - DNA, 2671 bp, Homo sapiens
  source 1..2671: mol_type = unassigned DNA
atgttaacaattaatcagttcaagttggtcatcttcctagataacctggaccgtaatcttcctagataacctggacatcaggattggtgatggggctgaggggccagtgagtgtgccatggcttatgggatgaagatgacatgactgaaagtggcatggccagggaggaatcagatgatgagctctccctcggtcatggcaggagggactcctccgattctctcaagtccatcaacctggccgcgtctgtggagtcagtgcatgtgaccttcccggagcagcagacagctgtccggaggaagcgctccggcagcagctccgagccatcccagagatccagcttttcttcaaacagatcccaaagaggcagcacaagcacccgaaacagcagtcaaaaaggaagcagtgttttgagtattaagcaaaaaggcaaaagggaactttatatggaaaagcttcaagaacatttaatcaaagcaaaagcctttaccataaagaagacgctggagatctatgtgcccatcaaacagttcttttacaacctcatccacccggagtatagcgccgtgactgacgtgtatgtactcatgttcctggctgacactgtggacttcatcatcattgtcttcggcttttgggcctttgggaaacactcagcagctgcagacatcacctcttcactgtcagaggaccaggtcccggggccgtttttggtgatggtcctcattcagtttggaaccatggtggtggaccgagccctctacctcaggaagactgtactgggaaaggtcatcttccaggtcattcttgtgttcggaattcacttctggatgttcttcatcttacctggtgtgactgagaggaaattcagccagaacctggttgcccagctttggtactttgtgaaatgtgtttacttcgggttgtctgcttaccagatccgttgtggctacccaacgcgagtcctggggaacttcctcaccaagagctacaattacgtcaacctcttcttattccaagggtttcgcctcgtgccctttttgactgagctgagggcagtgatggactgggtgtggacggacacaactttgagcctgtccagctggatctgtgtggaggacatctatgctcacatattcatcctgaagtgttggcgggagtcggagaagagataccctcagccacggggccagaagaagaagaaagtggtgaagtatggcatgggaggaatgatcatcgtcctgctcatctgcattgtctggtttcctcttctcttcatgtctttgatcaaatctgtggctggggtcatcaaccagcccctggacgtctccgtcacaattaccctgggagggtatcagcctattttcacaatgagtgcccaacaaagccagttgaaagttatggaccagcagagctttaacaaatttatacaagctttttctagggacaccggtgctatgcaatttctggaaaattatgaaaaagaagacataacagtagcagaactggaaggaaactcaaattctttgtggaccatcagcccacccagtaagcagaaaatgatacacgaactcctggaccccaatagtagcttctctgttgttttttcatggagtattcagagaaacttaagtctgggtgcaaaatcggaaatagcaacagataagctttcttttcctcttaaaaatattactcgaaagaatatcgctaaaatgatagcaggcaacagcacagaaagttcaaaaacaccagtgaccatagaaaagatttatccatattatgtgaaagcacctagtgattctaactcaaaacctataaagcaacttttatctgaaaataatttcatggatattaccatcattttgtccagagacaatacaactaaatataacagtgagtggtgggttctcaacctgactggaaacagaatatacaatccgaactctcaggccctggaactggtggtcttcaatgacaaagtcagtcccccaagtctggggttcctggctggctatggtattatgggattatatgcttcagttgtccttgtgattgggaaatttgtccgtgaattcttcagtgggatttctcactccatcatgtttgaagagcttccaaatgtggatcgaattttgaagttgtgcacagatatttttttagttcgagagacaggagaactggagctagaagaagatctctatgccaaattaatattcctatatcgctcaccagagacaatgatcaaatggactagagaaaaaacaaattgaaaccttagaacacagactgcaaataatgttaacatttgaattttttttaaaagcacaatattctcataagagctaagcatttctagttcgacggaaatggtttgtttctcttctgataggtagacaaaaggagctgatatccttctgcagtaaaagctaccttgcaagttaaggcactgttgaaaatgttatttgtaactccatttctctgaaatcagggctacttgctttatgttttagtcaacagtgtctcgcattctgattgatcatgtgaaggaatcatttatgggccccgtccctaagagaaacagaagaggagtcagaaagaaagatgcctgtgttttcctctgtggggcccgtgcacttcctggagagatgctacaatgcaatatacagcgctc

SEQ ID NO: 22618 - DNA, 3251 bp, Homo sapiens
  source 1..3251: mol_type = unassigned DNA
cgagggcgaggcggccacgcggggccgggaatgcccgcggtgcggggccccagagccgcccggtggtcgtgtccgggcgatggctcttcgcctggtcgccgacttcgacctcgggaaggacgtgctcccgtggttgcgggcgcagcgggcagtgtcggaggccagcggggccggaagcggcggcgcagatgttttagaaaacgattatgagagcttacatgtattaaatgttgaaagaaatggaaatattatttatacctataaggatgataagggaaatgtcgtctttggattatatgattgtcaaaccagacaaaatgagcttctatatacctttgagaaagacttgcaagttttcagttgctctgtcaacagtgaaaggactttgcttgctgcaagtttagttcagtctactaaagaaggaaaaaggaacgaacttcaaccaggatcaaagtgcttgactttgttggttgaaatccaccctgttaacaatgtgaaggttctaaaggctgtggatagctatatttgggttcagtttctctacccacatattgaaagtcatcctcttccagagaaccatctgttactgatttcagaagagaaatatattgaacaatttcgtatccatgtcgcccaagaagatggaaatagagtggtgattaaaaattctggccatctcccaagagacagaatagctgaggatttcgtttgggctcagtgggatatgtcagaacagagattatattacattgacctgaagaaatcaaggagtatcttaaaatgtatccagttttatgctgatgagagctataacttaatgtttgaagtacccttggacatatcattaagcaactcaggatttaaacttgtcaactttggatgtgattatcatcaataccgagataaattttccaaacacctgactctgtgtgtttttaccaaccatacaggaagtttgtgtgtatgttacagcccgaagtgtgcctcttggggacaaatcacatattcagtgttttacattcataaaggacacagcaagaccttcaccacttctcttgagaatgttgggtcacacatgacaaagggcattacttttctcaaccttgactattatgtggctgtttacttacctggtcatttcttccacctacttaatgttcaacatccagacctgatctgccacaatctctttctgacaggaaataatgaaatgattgatatgctacctcattgccctttacagtcattgtcagggtccctggtattggattgttgttctggaaagctctatagagcactgctcagccagtcgtctttattacagcttctgcagaacacttgcttagactgtgagaagatggctgcgttgcactgcgcgctctactgcggtcaaggtgcgcagttcctggaagcccagattattcagtggatttctgagaatgtctctgcctgccattcatttgacctcattcaggaatttataattgcttcttcatactggagtgtatattcagagacaagtaacatggacaaactattgccacattcctcagtgctcacttggaatacagaaattcctggaataactcttgtgacagaagacattgcattgcctcttatgaaggtgctcagctttaagggctactgggaaaaactgaactccaacctagaatatgttaagtacgccaagccacacttccactataacaacagtgtggtcaggagagagtggcacaacctgatctctgaagagaaaacaggaaaaagaaggtctgcggcatacgtgaggaatattcttgataatgcagtaaaggtgatttctaacctagaagcaagaaatttggggccaagattaacacccctcctgcaggaggaagacagccaccagcggctgctcatggggctgatggtgtctgagctaaaagaccattttttgagacacctacagggtgtagaaaagaagaaaattgaacagatggttctggactacatttcaaaactgctggatctcatttgccacatcgtagaaaccaattggaggaaacataatcttcattcctgggttctccacttcaatagtcgtggcagtgctgctgaatttgcagtttttcacatcatgaccaggattctggaagctacaaacagtttgtttttacctctgcctcctggttttcatactctgcacaccatcctcggggtccagtgtctccctttgcataacctgctgcattgcattgacagtggagtgttgcttctcactgaaacagctgtcataaggctcatgaaagatctggataatacagagaaaaatgaaaaactgaaattcagtatcattgtgcggcttcctccgcttattgggcagaagatttgtagactttgggatcatcctatgagttctaacatcatttcgcggaaccacgtgacgcgactgcttcagaactataagaaacagcctcggaattctatgattaacaagtcatcgttcagtgtagaatttctgcctctgaactacttcattgaaattctgacagatatagagtcctccaatcaagccctgtatccttttgaaggacatgacaatgtggatgcagaatttgtagaggaagcagctctgaaacacaccgcgatgcttttaggcttatgaaaaagaaaacgcaattggatctgctgctgccattttaatcttgctcattaaccttactcctttgagaattctttaacaatatttaaaattggtaacaaaaatagtttagccataattgtttagccatgtgagtttcaggttggtacacgttcagacagaactgctgtatcacattccaattttgaatagccagtgagcaatcaagtgtagagaaatgataaatggcctaagaaggcatacagtggcataaacgatgctcttcctagtagcttaataggccacaagctagtttctgttgcactctgaaataaaatatgctttaaaaatgtagggaacagtgcttagaaaagcaaaaactaggtgtgtcattgaaataataggcataaaaattaaatgttacataagaacactatttggaaagagggtccttttaaaaactgaatttgtactaaatcagatttgccatgtccagtacagaataatttgtacttagtatttgcagcagggtttgtctttgtgaattcagatgaaacatatttatttttttttatttataaaaggttgatttaggaatattttgtcagtcattaaaaaacctgaaaacata

SEQ ID NO: 22619 - DNA, 737 bp, Homo sapiens
  source 1..737: mol_type = unassigned DNA
aggaagacagccaccagcggctgctcatggggctgatggtgtctgagctaaaagaccattttttgagacacctacagggtgtagaaaagaagaaaattgaacagatggttctggactacatttcaaaactgcaatagtcgtggcagtgctgctgaatttgcagtttttcacatcatgaccaggattctggaagctacaaacagtttgtttttacctctgcctcctggttttcatactctgcacaccatcctcggggtccagtgtctccctttgcataacctgctgcattgcattgacagtggagtgttgcttctcactgaaacagctgtcataaggctcatgaaagatctggataatacagagaaaaatgaaaaactgaaattcagtatcattgtgcggcttcctccgcttattgggcagaagatttgtagactttgggatcatcctatgagttctaacatcatttcgcggaaccacgtgacgcgactgcttcagaactataagaaacagcctcggaattctatgattaacaagtcatcgttcagtgtagaatttctgcctctgaactacttcattgaaattctgacagatatagagtcctccaatcaagccctgtatccttttgaaggacatgacaatgtggatgcagaatttgtagaggaagcagctctgaaacacaccgcgatgcttttaggcttatgaaaaagaaaacgcaattggatctgctgctgccattt

SEQ ID NO: 22620 - DNA, 1246 bp, Homo sapiens
  source 1..1246: mol_type = unassigned DNA
atactccagtcctgtgtttaccgatagaccggaagtgtggcttcgtttacagttcggcacgtaggacggagggtagtgcgtctagagacacatattccccacggatttgacgatggtgttcggtcttgaatggaaatgtagtcttaggccagtcttaggtttttgaacaggatagtaggtatccggagtcgattgagggccagagcaggcactggggttcggatcctgggcaaagtttcccacgttgagggtctcgaggacgcctagatctctttcccagggccatggcgaacccgaagctgctgggaatggggctaagcgaggcggaggcgatcggtgctgattcggcgcgatttgaggagctgctgctgcaggcctcgaaggagctccagcaagcccagacaaccagaccagaatcgacacaaatccagcctcagcctggtttctgcataaagaccaactcctcggaagggaaggttttcatcaacatctgccactccccctctatccctcctcccgccgacgtgaccgaggaggagctgcttcagatgctagaggaggaccaagctgggtttcgcatccccatgagtctgggagagcctcatgcagaactggatgcaaaaggccagggatgtaccgcctacgacgtagctgtcaacagcgacttctaccggaggatgcagaacagcgatttcttgcgggagctcgtgatcaccatcgccagggagggccttgaggacaaatacaacttgcagctgaatccggaatggcgcatgatgaagaaccggccattcatgggctccatctcgcagcagaacatccgctcggagcagcgtcctcggatccaggagctgggggacctgtacacgcccgcccccgggagagctgagtcagggcctgaaaagcctcacctgaacctgtggctggaagcccccgacctcctcttggccgaagttgacctccccaaactggatggagccctggggctgtcgctggagatcggggagaaccgcctggtgatggggggcccccagcagctgtatcatctagacgcttatatcccgctgcagatcaactctcatgagagcaaggcagccttccaccggaagagaaagcaattaatggtggccatgccgcttctgccggtgccttcttgatcagggtgtctccttgtgcttctgagatgtggagaagaggctgctggcttccctaaaagttgaaataaaagatttttgcctttgttctg

SEQ ID NO: 22621 - DNA, 2650 bp, Homo sapiens
  source 1..2650: mol_type = unassigned DNA
gaggaggcccgagaggagtcggtggcagcggcggcggcgggaccggcagcagcagcagcagcagcagcagcagcaaccactagcctcctgccccgcggcgctgccgcacgagccccacgagccgctcaccccgccgttctcagcgctgcccgaccccgctggcgcgccctcccgccgccagtcccggcagcgccctcagttgtcctccgactcgccctcggccttccgcgccagccgcagccacagccgcaacgccacccgcagccacagccacagccacagccccaggcatagccttcggcacagccccggctccggctcctgcggcagctcctctgggcaccgtccctgcgccgacatcctggaggttgggatgctcttgtccaaaatcaactcgcttgcccacctgcgcgccgcgccctgcaacgacctgcacgccaccaagctggcgcccggcaaggagaaggagcccctggagtcgcagtaccaggtgggcccgctactgggcagcggcggcttcggctcggtctactcaggcatccgcgtctccgacaacttgccggtggccatcaaacacgtggagaaggaccggatttccgactggggagagctgcctaatggcactcgagtgcccatggaagtggtcctgctgaagaaggtgagctcgggtttctccggcgtcattaggctcctggactggttcgagaggcccgacagtttcgtcctgatcctggagaggcccgagccggtgcaagatctcttcgacttcatcacggaaaggggagccctgcaagaggagctggcccgcagcttcttctggcaggtgctggaggccgtgcggcactgccacaactgcggggtgctccaccgcgacatcaaggacgaaaacatccttatcgacctcaatcgcggcgagctcaagctcatcgacttcgggtcgggggcgctgctcaaggacaccgtctacacggacttcgatgggacccgagtgtatagccctccagagtggatccgctaccatcgctaccatggcaggtcggcggcagtctggtccctggggatcctgctgtatgatatggtgtgtggagatattcctttcgagcatgacgaagagatcatcaggggccaggttttcttcaggcagagggtctcttcagaatgtcagcatctcattagatggtgcttggccctgagaccatcagataggccaaccttcgaagaaatccagaaccatccatggatgcaagatgttctcctgccccaggaaactgctgagatccacctccacagcctgtcgccggggcccagcaaatagcagcctttctggcaggtcctcccctctcttgtcagatgcccgagggaggggaagcttctgtctccagcttcccgagtaccagtgacacgtctcgccaagcaggacagtgcttgatacaggaacaacatttacaactcattccagatcccaggcccctggaggctgcctcccaacagtggggaagagtgactctccaggggtcctaggcctcaactcctcccatagatactctcttcttctcataggtgtccagcattgctggactctgaaatatcccgggggtggggggtgggggtgggtcagaaccctgccatggaactgtttccttcatcatgagttctgctgaatgccgcgatgggtcaggtaggggggaaacaggttgggatgggataggactagcaccattttaagtccctgtcacctcttccgactctttctgagtgccttctgtggggactccggctgtgctgggagaaatacttgaacttgcctcttttacctgctgcttctccaaaaatctgcctgggttttgttccctatttttctctcctgtcctccctcaccccctccttcatatgaaaggtgccatggaagaggctacagggccaaacgctgagccacctgcccttttttctgcctcctttagtaaaactccgagtgaactggtcttcctttttggtttttacttaactgtttcaaagccaagacctcacacacacaaaaaatgcacaaacaatgcaatcaacagaaaagctgtaaatgtgtgtacagttggcatggtagtatacaaaaagattgtagtggatctaatttttaagaaattttgcctttaagttattttacctgtttttgtttcttgttttgaaagatgcgcattctaacctggaggtcaatgttatgtatttatttatttatttatttggttcccttcctattccaagcttccatagctgctgccctagttttctttcctcctttcctcctctgacttggggaccttttgggggagggctgcgacgcttgctctgtttgtggggtgacgggactcaggcgggacagtgctgcagctccctggcttctgtggggcccctcacctacttacccaggtgggtcccggctctgtgggtgatggggaggggcattgctgactgtgtatataggataattatgaaaagcagttctggatggtgtgccttccagatcctctctggggctgtgttttgagcagcaggtagcctgctggttttatctgagtgaaatactgtacaggggaataaaagagatcttatttttttttttatacttggcgttttttgaataaaaaccttttgtctt

SEQ ID NO: 22622 - DNA, 2075 bp, Homo sapiens
  source 1..2075: mol_type = unassigned DNA
agtagcattggggctggcgcgcgcggcgaatctcaacgctgcgccgtctgcgggcgcttccgggccaccagtttctctgctttccaccctggcgccccccagccctggctccccagctgcgctgccccgggcgtccacgccctgcgggcttagcgggttcagtgggctcaatctgcgcagcgccacctccatgttgaccaagcctctacaggggcctcccgcgccccccgggacccccacgccgccgccaggaggcaaggatcgggaagcgttcgaggccgagtatcgactcggccccctcctgggtaaggggggctttggcaccgtcttcgcaggacaccgcctcacagatcgactccaggtggccatcaaagtgattccccggaatcgtgtgctgggctggtcccccttgtcagactcagtcacatgcccactcgaagtcgcactgctatggaaagtgggtgcaggtggtgggcaccctggcgtgatccgcctgcttgactggtttgagacacaggagggcttcatgctggtcctcgagcggcctttgcccgcccaggatctctttgactatatcacagagaagggcccactgggtgaaggcccaagccgctgcttctttggccaagtagtggcagccatccagcactgccattcccgtggagttgtccatcgtgacatcaaggatgagaacatcctgatagacctacgccgtggctgtgccaaactcattgattttggttctggtgccctgcttcatgatgaaccctacactgactttgatgggacaagggtgtacagccccccagagtggatctctcgacaccagtaccatgcactcccggccactgtctggtcactgggcatcctcctctatgacatggtgtgtggggacattccctttgagagggaccaggagattctggaagctgagctccacttcccagcccatgtctccccagactgctgtgccctaatccgccggtgcctggcccccaaaccttcttcccgaccctcactggaagagatcctgctggacccctggatgcaaacaccagccgaggatgtacccctcaacccctccaaaggaggccctgcccctttggcctggtccttgctaccctaagcctggcctggcctggcctggcccccaatggtcagaagagccatcccatggccatgtcacagggatagatggacatttgttgacttggttttacaggtcattaccagtcattaaagtccagtattactaaggtaagggattgaggatcaggggttagaagacataaaccaagtctgcccagttcccttcccaatcctacaaaggagccttcctcccagaacctgtggtccctgattctggagggggaacttcttgcttctcattttgctaaggaagtttattttggtgaagttgttcccattctgagccccgggactcttattctgatgatgtgtcaccccacattggcacctcctactaccaccacacaaacttagttcatatgctcttacttgggcaagggtgctttccttccaataccccagtagcttttattttagtaaagggaccctttcccctagcctagggtcccatattgggtcaagctgcttacctgcctcagcccaggattctttattctgggggaggtaatgccctgttgttaccccaaggcttcttttttttttttttttttttgggtgaggggaccctactctgttatcccaagtgctcttattctggtgagaagaaccttacttccataatttgggaaggaatggaagatggacaccaccggacaccaccagacactaggatgggatggatggttttttgggggatgggctaggggaaataaggcttgctgtttgttctcctggggcgctccctccaacttttgcagattcttgcaacctcctcctgagccgggattgtccaattactaaaatgtaaataatcacgtattgtggggaggggagttccaagtgtgccctcctctcttctcctgcctggattatttaaaaagccatgtgtggaaacccactatttaataaaagtaatagaatcagaa

SEQ ID NO: 22623 - DNA, 892 bp, Homo sapiens
  source 1..892: mol_type = unassigned DNA
ttgaactcttgggctcaagcaatccacccacatcagcctcccaaagtgctgggattgcagggatgagccactgtgcctggccgaacttctttcgtttattcaaatgtttattgatctacgacatgcgagatttgtgcaggctctttgctggtttcaccctctcaatcgctgtgtgagtttgtgtctttagggaaagtgaggcccaggaagggaagtgagttgcttagcgacacactgtcaggaaaaggggccctgagttgagcttaggtaaaaagcctcagagctgttgccctgacatctgtcttttttctctccctgcttcccaccccacctgtgcccccagtcagactcagtcacatgcccactcgaagtcgcactgctatggaaagtgggtgcaggtggtgggcaccctggcgtgatccgcctgcttgactggtttgagacacaggagggcttcatgctggtcctcgagcggcctttgcccgcccaggatctctttgactatatcacagagaagggcccactgggtgaaggcccaagccgctgcttctttggccaagtagtggcagccatccagcactgccattcccgtggagttgtccatcgtgacatcaaggatgagaacatcctgatagacctacgccgtggctgtgccaaactcattgattttggttctggtgccctgcttcatgatgaaccctacactgactttgatgggacaagggtgtacagccccccagagtggatctctcgacaccagtaccatgcactcccggccactgtctggtcactgggcatcctcctctatgacatggtgtgtggggacattccctttgagagggaccaggagattctggaagctgagctccacttcccagcccatgtctcccca

SEQ ID NO: 22624 - DNA, 7151 bp, Homo sapiens
  source 1..7151: mol_type = unassigned DNA
gcggcggcggctgcggtggcggcagccgaggcgagcggggcgggggcgcgggcgcggcgctcggagtccgttcggggccggaggcggtcggggccgggcccgggaagcgcgaggagcgcgcgtagcgccgccggagcccgccgcccgggacatggccaaggcgggccgtgcaggtggtcctcccccgggcggcggtgccccctggcaccttcgaaatgtcctcagtgactctgtggagagctcagatgatgaattctttgatgccagagaggagatggctgaagggaagaatgccatcctcattgggatgagccagtggaactccaatgacctcgtggagcagatcgagaccatggggaaactggacgagcatcaaggagaagggaccgcgccgtgcacatccagcatcctccaggagaagcagcgagaactgtaccgggtttccttgagaagacagaggttcccagcccagggaagcatcgagatccacgaagacagcgaggaaggctgcccgcagcgctcctgcaagacacatgtcctcctgctggtcctgcatgggggaaacatcctggacacgggtgccggggacccgtcctgcaaggcagccgacatccacaccttcagctccgtgctggagaaggtcacacgagcccatttccctgctgccctgggccacatcctcatcaagttcgtcccctgtcctgccatctgctctgaggctttctcgcttgtctctcacctgaacccctacagccacgatgagggctgcctcagcagcagccaggaccacgtccctctggccgcccttcccctgttggccatctcctccccgcagtaccaggatgctgtcgccaccgtcatcgagcgagccaaccaggtctacagagagttcctgaagtcctctgatgggattggcttcagtgggcaggtgtgtctcatcggggactgtgtggggggcctcctggccttcgatgccatctgctacagtgcggggccctcaggggacagccctgccagcagcagccggaaggggagcatcagcagcacccaggacaccccagtcgcggtggaggaagattgcagcctggccagcagcaagcgtctcagcaaaagcaacattgacatctccagtgggttggaggatgaggagcccaagaggccgttgccgcggaaacagagcgactcctccacctatgactgcgaggccatcacccagcaccatgccttcctctcaagcatccactccagcgtgctaaaggatgagtctgagaccccggcggctggggggccgcagctccctgaggtcagcctgggccgctttgacttcgatgtgtccgacttcttcctcttcggctcgccactgggcctggtcctggccatgcggaggacggtgctgcctgggctggacggcttccaggtgcgtcctgcctgcagccaggtctacagcttcttccattgcgcagacccctctgcctcacggctcgagccactgctggagcccaagttccacctggtgccgcctgtcagcgtgcctcgctaccagaggttcccactgggcgatgggcagtccctcctcctcgctgatgccctacacacccacagccccctcttcctggagggcagctcccgggacagcccgccacttctggatgcccctgcctcgccccctcaggcctcgaggttccagcgcccaggacggaggatgagcgaggggagctcccacagcgagagctcggagtcctcggacagcatggcacccgtgggtgcctcccgcatcacagccaagtggtggggaagcaagaggatcgactatgccctgtactgccctgatgtcctcacggccttccccaccgtggccctgccccacctcttccacgccagttactgggagtccacagacgtggtggccttcatcctgagacaggtaatgcgctatgagagcgtgaacatcaaggaaagcgcccgcctggaccctgcagcactgagtcctgccaacccccgggagaagtggcttcgtaagcggactcaggtcaagctgaggaatgtcacggctaatcaccgggccaatgatgtgattgctgctgaagatggcccccaggtcctggtggggcggttcatgtacgggcccctcgacatggtggctctgactggagagaaggtggacatcctagtaatggcagagccatcctcaggccgctgggtacacctggacacagagatcaccaacagcagtggtcgcatcacatacaatgtgccgcggccccggcgcctgggggttggtgtctatcctgtgaagatggtcgtcaggggcgaccagacctgtgccatgagctacctcacggtgttgcccaggggcatggagtgtgtagtgttcagcattgatgggtccttcgcggccagcgtgtctatcatgggaagcgaccccaaggtccggccgggtgcagtggatgttgtccggcactggcaggacttgggctacatgatcctttacatcacgggacggccggacatgcagaagcagcgggtggtgtcgtggctgtcccagcacaacttcccacagggcatgatcttcttctccgatgggctggtgcatgacccgctgcggcagaaggccatcttcctgcgcaacctcatgcaggagtgcttcatcaaaatcagtgcggcctatggctccacgaaggacatctctgtctacagcgtgctgggcctgcctgcctcccagatcttcattgtgggccggcccaccaagaagtaccaaacccagtgccagttcctgagcgagggctacgccgcacacctggccgcgctggaggccagccaccgctcacgcccaaagaagaacaactcgcgcatgatcctgcgcaagggcagcttcgggctgcacgcgcagccagagttcctgcggaagcgcaaccacctgcgcagaaccatgtcagtgcagcagcccgacccgcccgccgccaaccccaagcccgagcgggcccagagccagcccgagtcggacaaagaccacgagcggccgctgccggcgctcagctgggcgcgtgggccccccaagttcgagtcggtgccctgaggggtgggctgtgctcagagcagggagcggggggcccaatcaggctgcctgcggggacgggagggggctgccctctccccgacacaggcgttttcctgctttttccctcccgtgtctgtccagcagtgtccgaccagagcggggagggatcctgcccgagcccggggggctccctgagctgcgacggggtgaggtccggggatctcggtgcagccactgctgcctcccacgggcctgcgaccgcaagcccaagtcagggttcatgtttgtgtcatcctgggggcaggcttgcccggggctgaagcgtttgggcaaagtcgaccaccctcctgcgtccccaggcttcacagcgagctaggcaggccctcaagggggcagccccagcctcggcaccaagcgccgctggcaggcacagcctctgggctgtcttgtggaggtgtgagtggcatttgtgcccgcccttcctgtggtttgggtcaccattttggggttggcgctcttatggcaagatggccactttctgggagtgagagcacatccccgggctcatgttacgccgtctctgtccacagccctcgggggtggggtctggtgctgacggtctgtcctgcagctgtccattgtccccaacccccgttgtcctcagtgtcctcaccatttccctgtggccctggaggccagggcttcctcttcccggagccctgcctcatgccctcccttgggaggctgcagccttgggctctggctcagctgggctggctgtgagcccctgagctggttgcttgccctctctgggctccgtcttccttctgttattggaggggtccccctagctgagattggtgtgagtctttgactcccaagatgtcctgcagtttggcccattgaggctcttcaggcctaagggtccctccgagtgtcctgtgacccacacctttcacacagcctgggagagggggtctgggtgggctggaaaggaggggctcttaaaggagcctctctgggtgggctgggaagggatccctactccacggagaggtgcagctggtttgccttgcactgcgtgtcccagggacaacccactcaaactgggtgtcctagggacaacccacctccctctcctgccaaaaggttactgattgggctccccataaccccagctctgccaggacccttttatcctttttggctcccagaggcatagagctgagattccagggttctaggggttcctggaagtttggctccaactgttgtattctcttccctttcccctgctgctcagtttgtgcccataacctcctcctgggtagtcccctgaggttggcaggacttggcccttctggggcccctaaagcctgctcaggccctcctgctgctgaaccttggcctgggcactgctttcctgcatcctggaaaaccccgactccctggcccaggcccacacctgctgtgtggggctgcccacgtggccactgagcccccataggctgccatcaaggccggtcccagcaatttcagccaggctgccccagggcccagacgtctgtatacacagcaggcacctgtgtcagctcagtgtcgcttctgctcaatgtctacctctcgcggctcccatgcagccagtgacgctgctggtgggggcggctggcaccgccgttgtgaattgcctggcaaattgggtgccctcctggggctggaggggtctgggctcctaacccccatccctgctctccccactagaaatgtgtcttcagtctgccagctcttctgctctacttccagtgctgcatcctgcactcaagcccagggctgctggcgagtctatggggaggagtgcggatcaggctcagcctcagcctcagcctcagcctcctctatggtcctgtctcctggcggttcacaggtgcccatcccccctttaacatttcacagttcttggctttccaaaggcaccagctcatatggcatagccaccccaaccctaatccttcccccaaatatcctgatttaaacttgggcagacttagtctgattcttgaaaactctaccatctccttcttgcagaaggcactggttacactaaaatgataaaataattagtatggggtactttgctcccagttacattccctcttccctgagaaccccaggctaggcgagagagggagagggagagagaaagagagagagggagagagagagagagagagggagagagaaagagagagagaaagaaaggaagacagaggaaagaaaggaagacagagagaggaaggcagagagagagagggagaaagaaagacaggaaggcagagagagagagagagagagaaaggaagacagagagagagagagaggaagagagagagagagaggaagagagagagagagctcatgagccaggatccctggggaatttgaagtcagtgtgaccagggttctgtggctctggggtcagagctgggacacaggacccagcaggagggccaccaccccttccttttggaaacagctctggttccaagcagcaatcaggtaggaggatcggggctttggctgatgatgcacacacaagatgctgatggtgtacggtgagatattgtgaacgcaacaactggagctgtagttggcgtgtgtgagtgtgtacctgcggttctgtttagtggcgagacaaggtatgtttcagtactgctttcacggcaactgtgtaatgcatatgctctttctacactagcggtttgctcagttttgtctgtccggttaagttggagaaagaaccaagttgtgttgttctctggagggggtgctgctgcctctccttgagtagttctgtgacccccaatccagctgttttgtagagaatccttctagcttctggtatgcctgctctccagcagctggaaacagatcttcctgcctgaccaaagctccttgtttcttgcgtggcatgtttgttcttcccgatccggtggctgtcgtagccgagggcctgcctgccaccttcctttatcatttgccctgttggggttcagggtgcatccttagcccaggacctgctcttccagcatcatgggttttttcctaaagatctcaacggctcccttgggctccataaaatatttcttttttaaaaaagcagactcctttcatgcattgggatgaacggccctcttgtctgggtgctgggctacagcaaacaaatgtgtttgaatcccagtattccagagattcctggcggtgggctgtctagaagaggcgaggctggatctcacggtttttaaactgtatttttacccctttgggacccatacctgtgccctggagtctttcatgaggcacgtgggtcctctgcatcctcactctcccccctagcccaggtgcagccccgggaggggtgccctgaccccgccttaaacaaccaactttcccaccgaatcccatcggcgggcggggggggggggtttgggtgccaagtgccctggaaacctattgtcttttggctcagccaaaagaaacattccctccttcctttccttccgggcttgggggaaaccttcgtaaaaatcatagttagggttaagtccaagcagtgaggcctgacctgggctctgctctccttgttgagacactaacaggcagttgggaggaaaatctgcatttgactccaccctctttggggcaaaggagaaacaggtgacccgagggggggcaggccagaggagggcgactcgtgcacagggacccccacccttggaccccgctgtccttttctagttgtttacttggtggtggcagccagtctgaccttgtctgtggtctgactgttcctaagtgtgtaactttcagtattatctgtgacagatggttctgtggtgaaaaaggtttattatattccttatggctgccttgtacaaaatccgttagaaacgctaatgtaagatatcagatttctaacaagacaaaaacagcattatggagttaaaagatttttacaactgggtcttgattttgatgtgagctggtttttagctctcaaatgttgtcacttaaataaaaaccttctttgccttta

SEQ ID NO: 22625 - DNA, 7042 bp, Homo sapiens
  source 1..7042: mol_type = unassigned DNA
gcggcggcggctgcggtggcggcagccgaggcgagcggggcgggggcgcgggcgcggcgctcggagtccgttcggggccggaggcggtcggggccgggcccgggaagcgcgaggagcgcgcgtagcgccgccggagcccgccgcccgggacatggccaaggcgggccgtgcaggtggtcctcccccgggcggcggtgccccctggcaccttcgaaatgtcctcagtgactctgtggagagctcagatgatgaattctttgatgccagaggagaagggaccgcgccgtgcacatccagcatcctccaggagaagcagcgagaactgtaccgggtttccttgagaagacagaggttcccagcccagggaagcatcgagatccacgaagacagcgaggaaggctgcccgcagcgctcctgcaagacacatgtcctcctgctggtcctgcatgggggaaacatcctggacacgggtgccggggacccgtcctgcaaggcagccgacatccacaccttcagctccgtgctggagaaggtcacacgagcccatttccctgctgccctgggccacatcctcatcaagttcgtcccctgtcctgccatctgctctgaggctttctcgcttgtctctcacctgaacccctacagccacgatgagggctgcctcagcagcagccaggaccacgtccctctggccgcccttcccctgttggccatctcctccccgcagtaccaggatgctgtcgccaccgtcatcgagcgagccaaccaggtctacagagagttcctgaagtcctctgatgggattggcttcagtgggcaggtgtgtctcatcggggactgtgtggggggcctcctggccttcgatgccatctgctacagtgcggggccctcaggggacagccctgccagcagcagccggaaggggagcatcagcagcacccaggacaccccagtcgcggtggaggaagattgcagcctggccagcagcaagcgtctcagcaaaagcaacattgacatctccagtgggttggaggatgaggagcccaagaggccgttgccgcggaaacagagcgactcctccacctatgactgcgaggccatcacccagcaccatgccttcctctcaagcatccactccagcgtgctaaaggatgagtctgagaccccggcggctggggggccgcagctccctgaggtcagcctgggccgctttgacttcgatgtgtccgacttcttcctcttcggctcgccactgggcctggtcctggccatgcggaggacggtgctgcctgggctggacggcttccaggtgcgtcctgcctgcagccaggtctacagcttcttccattgcgcagacccctctgcctcacggctcgagccactgctggagcccaagttccacctggtgccgcctgtcagcgtgcctcgctaccagaggttcccactgggcgatgggcagtccctcctcctcgctgatgccctacacacccacagccccctcttcctggagggcagctcccgggacagcccgccacttctggatgcccctgcctcgccccctcaggcctcgaggttccagcgcccaggacggaggatgagcgaggggagctcccacagcgagagctcggagtcctcggacagcatggcacccgtgggtgcctcccgcatcacagccaagtggtggggaagcaagaggatcgactatgccctgtactgccctgatgtcctcacggccttccccaccgtggccctgccccacctcttccacgccagttactgggagtccacagacgtggtggccttcatcctgagacaggtaatgcgctatgagagcgtgaacatcaaggaaagcgcccgcctggaccctgcagcactgagtcctgccaacccccgggagaagtggcttcgtaagcggactcaggtcaagctgaggaatgtcacggctaatcaccgggccaatgatgtgattgctgctgaagatggcccccaggtcctggtggggcggttcatgtacgggcccctcgacatggtggctctgactggagagaaggtggacatcctagtaatggcagagccatcctcaggccgctgggtacacctggacacagagatcaccaacagcagtggtcgcatcacatacaatgtgccgcggccccggcgcctgggggttggtgtctatcctgtgaagatggtcgtcaggggcgaccagacctgtgccatgagctacctcacggtgttgcccaggggcatggagtgtgtagtgttcagcattgatgggtccttcgcggccagcgtgtctatcatgggaagcgaccccaaggtccggccgggtgcagtggatgttgtccggcactggcaggacttgggctacatgatcctttacatcacgggacggccggacatgcagaagcagcgggtggtgtcgtggctgtcccagcacaacttcccacagggcatgatcttcttctccgatgggctggtgcatgacccgctgcggcagaaggccatcttcctgcgcaacctcatgcaggagtgcttcatcaaaatcagtgcggcctatggctccacgaaggacatctctgtctacagcgtgctgggcctgcctgcctcccagatcttcattgtgggccggcccaccaagaagtaccaaacccagtgccagttcctgagcgagggctacgccgcacacctggccgcgctggaggccagccaccgctcacgcccaaagaagaacaactcgcgcatgatcctgcgcaagggcagcttcgggctgcacgcgcagccagagttcctgcggaagcgcaaccacctgcgcagaaccatgtcagtgcagcagcccgacccgcccgccgccaaccccaagcccgagcgggcccagagccagcccgagtcggacaaagaccacgagcggccgctgccggcgctcagctgggcgcgtgggccccccaagttcgagtcggtgccctgaggggtgggctgtgctcagagcagggagcggggggcccaatcaggctgcctgcggggacgggagggggctgccctctccccgacacaggcgttttcctgctttttccctcccgtgtctgtccagcagtgtccgaccagagcggggagggatcctgcccgagcccggggggctccctgagctgcgacggggtgaggtccggggatctcggtgcagccactgctgcctcccacgggcctgcgaccgcaagcccaagtcagggttcatgtttgtgtcatcctgggggcaggcttgcccggggctgaagcgtttgggcaaagtcgaccaccctcctgcgtccccaggcttcacagcgagctaggcaggccctcaagggggcagccccagcctcggcaccaagcgccgctggcaggcacagcctctgggctgtcttgtggaggtgtgagtggcatttgtgcccgcccttcctgtggtttgggtcaccattttggggttggcgctcttatggcaagatggccactttctgggagtgagagcacatccccgggctcatgttacgccgtctctgtccacagccctcgggggtggggtctggtgctgacggtctgtcctgcagctgtccattgtccccaacccccgttgtcctcagtgtcctcaccatttccctgtggccctggaggccagggcttcctcttcccggagccctgcctcatgccctcccttgggaggctgcagccttgggctctggctcagctgggctggctgtgagcccctgagctggttgcttgccctctctgggctccgtcttccttctgttattggaggggtccccctagctgagattggtgtgagtctttgactcccaagatgtcctgcagtttggcccattgaggctcttcaggcctaagggtccctccgagtgtcctgtgacccacacctttcacacagcctgggagagggggtctgggtgggctggaaaggaggggctcttaaaggagcctctctgggtgggctgggaagggatccctactccacggagaggtgcagctggtttgccttgcactgcgtgtcccagggacaacccactcaaactgggtgtcctagggacaacccacctccctctcctgccaaaaggttactgattgggctccccataaccccagctctgccaggacccttttatcctttttggctcccagaggcatagagctgagattccagggttctaggggttcctggaagtttggctccaactgttgtattctcttccctttcccctgctgctcagtttgtgcccataacctcctcctgggtagtcccctgaggttggcaggacttggcccttctggggcccctaaagcctgctcaggccctcctgctgctgaaccttggcctgggcactgctttcctgcatcctggaaaaccccgactccctggcccaggcccacacctgctgtgtggggctgcccacgtggccactgagcccccataggctgccatcaaggccggtcccagcaatttcagccaggctgccccagggcccagacgtctgtatacacagcaggcacctgtgtcagctcagtgtcgcttctgctcaatgtctacctctcgcggctcccatgcagccagtgacgctgctggtgggggcggctggcaccgccgttgtgaattgcctggcaaattgggtgccctcctggggctggaggggtctgggctcctaacccccatccctgctctccccactagaaatgtgtcttcagtctgccagctcttctgctctacttccagtgctgcatcctgcactcaagcccagggctgctggcgagtctatggggaggagtgcggatcaggctcagcctcagcctcagcctcagcctcctctatggtcctgtctcctggcggttcacaggtgcccatcccccctttaacatttcacagttcttggctttccaaaggcaccagctcatatggcatagccaccccaaccctaatccttcccccaaatatcctgatttaaacttgggcagacttagtctgattcttgaaaactctaccatctccttcttgcagaaggcactggttacactaaaatgataaaataattagtatggggtactttgctcccagttacattccctcttccctgagaaccccaggctaggcgagagagggagagggagagagaaagagagagagggagagagagagagagagagggagagagaaagagagagagaaagaaaggaagacagaggaaagaaaggaagacagagagaggaaggcagagagagagagggagaaagaaagacaggaaggcagagagagagagagagagagaaaggaagacagagagagagagagaggaagagagagagagagaggaagagagagagagagctcatgagccaggatccctggggaatttgaagtcagtgtgaccagggttctgtggctctggggtcagagctgggacacaggacccagcaggagggccaccaccccttccttttggaaacagctctggttccaagcagcaatcaggtaggaggatcggggctttggctgatgatgcacacacaagatgctgatggtgtacggtgagatattgtgaacgcaacaactggagctgtagttggcgtgtgtgagtgtgtacctgcggttctgtttagtggcgagacaaggtatgtttcagtactgctttcacggcaactgtgtaatgcatatgctctttctacactagcggtttgctcagttttgtctgtccggttaagttggagaaagaaccaagttgtgttgttctctggagggggtgctgctgcctctccttgagtagttctgtgacccccaatccagctgttttgtagagaatccttctagcttctggtatgcctgctctccagcagctggaaacagatcttcctgcctgaccaaagctccttgtttcttgcgtggcatgtttgttcttcccgatccggtggctgtcgtagccgagggcctgcctgccaccttcctttatcatttgccctgttggggttcagggtgcatccttagcccaggacctgctcttccagcatcatgggttttttcctaaagatctcaacggctcccttgggctccataaaatatttcttttttaaaaaagcagactcctttcatgcattgggatgaacggccctcttgtctgggtgctgggctacagcaaacaaatgtgtttgaatcccagtattccagagattcctggcggtgggctgtctagaagaggcgaggctggatctcacggtttttaaactgtatttttacccctttgggacccatacctgtgccctggagtctttcatgaggcacgtgggtcctctgcatcctcactctcccccctagcccaggtgcagccccgggaggggtgccctgaccccgccttaaacaaccaactttcccaccgaatcccatcggcgggcggggggggggggtttgggtgccaagtgccctggaaacctattgtcttttggctcagccaaaagaaacattccctccttcctttccttccgggcttgggggaaaccttcgtaaaaatcatagttagggttaagtccaagcagtgaggcctgacctgggctctgctctccttgttgagacactaacaggcagttgggaggaaaatctgcatttgactccaccctctttggggcaaaggagaaacaggtgacccgagggggggcaggccagaggagggcgactcgtgcacagggacccccacccttggaccccgctgtccttttctagttgtttacttggtggtggcagccagtctgaccttgtctgtggtctgactgttcctaagtgtgtaactttcagtattatctgtgacagatggttctgtggtgaaaaaggtttattatattccttatggctgccttgtacaaaatccgttagaaacgctaatgtaagatatcagatttctaacaagacaaaaacagcattatggagttaaaagatttttacaactgggtcttgattttgatgtgagctggtttttagctctcaaatgttgtcacttaaataaaaaccttctttgccttt

SEQ ID NO: 22626 - DNA, 750 bp, Homo sapiens
  source 1..750: mol_type = unassigned DNA
gtggtttaaaccaggagtgcgccgcgtccgttcaccgcggcctcagatgaatgcggctgttaagacctgcaataatccagaatggctactctgatctatgttgataaggaaaatggagaaccaggcacccgtgtggttgctaaggatgggctgaagctggggtctggaccttcaatcaaagccttagatgggagatctcaagtttcaacaccacgttttggcaaaacgttcgatgccccaccagccttacctaaagctactagaaaggctttgggaactgtcaacagagctacagaaaagtctgtaaagaccaagggacccctcaaacaaaaacagccaagcttttctgccaaaaagatgactgagaagactgttaaagcaaaaagctctgttcctgcctcagatgatgcctatccagaaatagaaaaattctttcccttcaatcctctagactttgagagttttgacctgcctgaagagcaccagattgcgcacctccccttgagtggagtgcctctcatgatccttgacgaggagagagagcttgaaaagctgtttcagctgggccccccttcacctgtgaagatgccctctccaccatgggaatccaatctgttgcagtctccttcaagcattctgtcgaccctggatgttgaattgccacctgtttgctgtgacatagatatttaaatttcttagtgcttcagagtttgtgtgtatttgtattaataaagcattctttaacagatt

SEQ ID NO: 22627 - DNA, 1070 bp, Homo sapiens
  source 1..1070: mol_type = unassigned DNA
cgcgggtggttagttgagccggctccggcggggaaggaggcgggctgcggctgcggctggggctgaagctggggctggggttgggggactgcccggggcttagatggctccgagcccgtttgagcgtggtctcggactgctaactggaccaacggcaactgtctgatgagtgccagccccaaaccgcgcgctgctcgggaccttagagcctctgactcaggctggaagatttgagagctggattaagtacttgttggctcacgcccgtgactgttccgctgtttagctcttgttttttgtgtggacactcctaggatagaaagtttggtatgttgctatacctttgcttctcccaccttccccaatatctaatatgtatttctcattcttagaataatccagaatggctactctgatctatgttgataaggaaaatggagaaccaggcacccgtgtggttgctaaggatgggctgaagctggggtctggaccttcaatcaaagccttagatgggagatctcaagtttcaacaccacgttttggcaaaacgttcgatgccccaccagccttacctaaagctactagaaaggctttgggaactgtcaacagagctacagaaaagtctgtaaagaccaagggacccctcaaacaaaaacagccaagcttttctgccaaaaagatgactgagaagactgttaaagcaaaaagctctgttcctgcctcagatgatgcctatccagaaatagaaaaattctttcccttcaatcctctagactttgagagttttgacctgcctgaagagcaccagattgcgcacctccccttgagtggagtgcctctcatgatccttgacgaggagagagagcttgaaaagctgtttcagctgggccccccttcacctgtgaagatgccctctccaccatgggaatccaatctgttgcagtctccttcaagcattctgtcgaccctggatgttgaattgccacctgtttgctgtgacatagatatttaaatttcttagtgcttcagagtttgtgtgtatttgtattaataaagcattctttaacaga

SEQ ID NO: 22628 - DNA, 895 bp, Homo sapiens
  source 1..895: mol_type = unassigned DNA
gagggtcgcgggtggttagttgagccggctccggcggggaaggaggcgggctgcggctgcggctggggctgaagctggggctggggttgggggactgcccggggcttagatggctccgagcccgtttgagcgtggtctcggactgctaactggaccaacggcaactgtctgatgagtgccagccccaaaccgcgcgctgctcgggaccttagagcctctgactcaggctggaagatttgagagctggattaaaataatccagaatggctactctgatctatgttgataaggaaaatggagaaccaggcacccgtgtggttgctaaggatgggctgaagctggggtctggaccttcaatcaaagccttagatgggagatctcaagtttcaacaccacgttttggcaaaacgttcgatgccccaccagccttacctaaagctactagaaaggctttgggaactgtcaacagagctacagaaaagtctgtaaagaccaagggacccctcaaacaaaaacagccaagcttttctgccaaaaagatgactgagaagactgttaaagcaaaaagctctgttcctgcctcagatgatgcctatccagaaatagaaaaattctttcccttcaatcctctagactttgagagttttgacctgcctgaagagcaccagattgcgcacctccccttgagtggagtgcctctcatgatccttgacgaggagagagagcttgaaaagctgtttcagctgggccccccttcacctgtgaagatgccctctccaccatgggaatccaatctgttgcagtctccttcaagcattctgtcgaccctggatgttgaattgccacctgtttgctgtgacatagatatttaaatttcttagtgcttcagagtttg

SEQ ID NO: 22629 - DNA, 2760 bp, Homo sapiens
  source 1..2760: mol_type = unassigned DNA
gcgcaggcgcactgaacctcagccgcgccgggaggcgagcccgttggcgaggggcggggcagatggcgagggagcggggcgagctgctttttgaggctgcgcactcgcatggccccacctcgcaggtccacttccggcgccgcggctgttccgggcggagaccgcttgtgctggagtcggagttgtaacgctccactgactgatagagcgaccggccgaccatggcgcccggagtggcccgcgggccgacgccgtactggaggttgcgcctcggtggcgccgcgctgctcctgctgctcatcccggtggccgccgcgcaggagcctcccggagctgcttgttctcagaacacaaacaaaacctgtgaagagtgcctgaagaacgtctcctgtctttggtgcaacactaacaaggcttgtctggactacccagttacaagcgtcttgccaccggcttccctttgtaaattgagctctgcacgctggggagtttgttgggtgaactttgaggcgctgatcatcaccatgtcggtagtcgggggaaccctcctcctgggcattgccatctgctgctgctgctgctgcaggaggaagaggagccggaagccggacaggagtgaggagaaggccatgcgtgagcgggaggagaggcggatacggcaggaggaacggagagcagagatgaagacaagacatgatgaaatcagaaaaaaatatggcctgtttaaagaagaaaacccgtatgctagatttgaaaacaactaaagcgctccagcacatcagtcccgacgcttcctgtgaggtgcacgctccgcagcccagcccagccgggagaccacgtggccattgcggtctcctgaccttggccagtgaacctgccagccttccaggacaggcggccggagagctgcccctgaaggacagtcctctcgtcttgcagactggtgaccttctattccctgttcatctctgtttctagatttagtcacttgaaataagaaatctttggggtttgggcttttttatactcttctcagtttgtgaaacgctaactgcacacgaagccgcctgacggcacccagcgctgtggctgtcattctcccagggcagaaccctgcgtttctctctgtccactaacaagcttcacacgcaacacagggaagtcggtttgacttttgtcatgaggagaactgaccagccctcatcattccccataaaaccacggacagcgtctgtgtgcgcatcttgagtcttcacacctgttgactcacacggcttttgctgatgacacggggctccagtacacagtctgataaggacttaacgtcctaacctcaattgtattaaatagcattggggaatagctaaacctttttaaaaaaatttattggattttcctccctgcttaaaagatttcaccagaaaaccttcatataaaaattcaggccctttttggacaatttttaaaatttgtatctttactagaacatgagaatctttttcccttggaagcttgaattataaatgtggtgtttggcctgcctcagcagcaccagttgactgctcgtgtgccagcggtgtggggaggacggggcaggacgctgcagctctctccagccctgttggcatcctcagtgcctgcaggcctctcgctgcctgttgggctgtctggggggtggccatttagggatcgtggggacggggtccaccccaagaagaaagaaaggcccgtccacaggcccggctctgggccacgtgccccggaagcaggtgtgtccagagtcagctgagggctctccccacaccacccagcaggcgctggtgctccttctgcctcatgggaccagtccagcttccagccgctctggctcgagggtggtctgaccacttccttctgagtgggcttctctgggagctctccagtggcactgctggacctgcccacgtttctgtaaaatcaggatacgtggctttagtaagcagaccaagcgcttcgtggcagggaaagcagcgtgcggggaagtcactgaaaagtgctgcctaaggaagtttggaaatagtccctgttccagattgccttgaattttaaaacattttgctttgggaaagtaggtcagcagcacctaagatcaaggatgcgttccattttcacacttcacagtcatgaaaactgagaagactgtcttcagcgtgaactaaagttcacaggcagatcactgatccagaacacttcaagaactcgtcaaacagctcgataagcctttttgactgtgtacatctgtaccgggaataacattcctaggctgaaatttccacaaagaatagaacctgtacccagttcttcaggctgatttccctgacctcttgggcatttgtatttgtagtaaagtattgcagagattcctaagtattttatagcagccatcaaaattggactttgtattgtttattcataaaagacacttggtaatagacttcagtgaactctgtatgaatgcagtagtgtgtgtgcaaaatccgcttcctgagcgtagggtgctgagctggcgctagggctcggttgtgaaatacagcgtagtcagcccttgcgctcagtgtagaaacccacgtctgtaaggtcggtcttcgtccatctgcttttttctgaaatacactaagagcagccacaaaactgtaacctcaaggaaaccataaagcttggagtgccttaatttttaaccagtttccaataaaacggtttactacctgcgtgtgtttagta

SEQ ID NO: 22630 - DNA, 1205 bp, Homo sapiens
  source 1..1205: mol_type = unassigned DNA
tgttccgggcggagaccgcttgtgctggagtcggagttgtaacgctccactgactgatagagcgaccggccgaccatggcgcccggagtggcccgcgggccgacgccgtactggaggttgcgcctcggtggcgccgcgctgctcctgctgctcatcccggtggccgccgcgcaggagcctcccggagctgcttgttctcagaacacaaacaaaacctgtgaagagtgcctgaagaacgtctccgcctgtttaaagaagaaaacccgtatgctagatttgaaaacaactaaagcgctccagcacatcagtcccgacgcttcctgtgaggtgcacgctccgcagcccagcccagccgggagaccacgtggccattgcggtctcctgaccttggccagtgaacctgccagccttccaggacaggcggccggagagctgcccctgaaggacagtcctctcgtcttgcagactggtgaccttctattccctgttcatctctgtttctagatttagtcacttgaaataagaaatctttggggtttgggcttttttatactcttctcagtttgtgaaacgctaactgcacacgaagccgcctgacggcacccagcgctgtggctgtcattctcccagggcagaaccctgcgtttctctctgtccactaacaagcttcacacgcaacacagggaagtcggtttgacttttgtcatgaggagaactgaccagccctcatcattccccataaaaccacggacagcgtctgtgtgcgcatcttgagtcttcacacctgttgactcacacggcttttgctgatgacacggggctccagtacacagtctgataaggacttaacgtcctaacctcaattgtattaaatagcattggggaatagctaaacctttttaaaaaaatttattggattttcctccctgcttaaaagatttcaccagaaaaccttcatataaaaattcaggccctttttggacaatttttaaaatttgtatctttactagaacatgagaatctttttcccttggaagcttgaattataaatgtggtgtttggcctgcctcagcagcaccagttgactgctcgtgtgccagcggtgtggggaggacggggcaggacgctgcagctctctccagccctgttggcatcctcagtgcctgcaggcctctcgctgcctgttgggctgtctggggggtggc

SEQ ID NO: 22631 - DNA, 691 bp, Homo sapiens
  source 1..691: mol_type = unassigned DNA
atggctactctgatctacgttgataaggaaattggagaaccaggcacccgtgtggctgccaaggatgtgctgaagctggagtctagaccttcaatcaaagcattagatgggatatctcaagttttaacacgacgttttggcaaaacatacgatgctccatcagccttacctaaagctaccagaaaggctttgggcactgtcaacagagctacagaaaagtcagtaaagaccaatggacccagaaaacaaaaacagccaagcttttctgccaaaaagatgaccgagaagactgttaaaacaaaaagttctgttcctgcctcagatgacgcctatccagaaatagaaaaattctttcccttcaatcttctagactttgagagttttgacctgcctgaagagcgccagattgcacacctccccttgagtggagtgcctctcatgatccttgatgaggagggagagcttgaaaagctgtttcagctgggccccccttcacctgtgaaaatgccctctccaccatgggaatgcaatctgtttgcagtctccttcaagcattctgtcgaccctggatgttgaattgccagctgtttgctatgacatagatatttaaatttcttagtgctttggagtttgtgtgtacttgtattaataaagcattatttgtttaacaacataataaatacataaatat

SEQ ID NO: 22632 - DNA, 3897 bp, Homo sapiens
  source 1..3897: mol_type = unassigned DNA
gttactgggcgtatggcgtacagacacgaggccggcgcccgggaggcggtgttcatccgcccgggaaaagagcgcctgttgctcgctgcccgcgtgtccctggctctctcgggaacccagcgccgaaggcgaggtgggcgcgggccgaaggaggtcctgggaggtcggcggcgcggagggatctccgcgggagccgttggggctgttggcctcgggctgaggtgcaaggaccaggactagggcgagggcagcggtccaagaaatagaaaacaatgactgggagagcccgagccagagccagaggaagggcccgcggtcaggagacagcgcagctggtgggctccactgccagtcagcaacctggttatattcagcctaggcctcagccgccaccagcagagggggaattatttggccgtggacggcagagaggaacagcaggaggaacagccaagtcacaaggactccagatatctgctggatttcaggagttatcgttagcagagagaggaggtcgtcgtagagattttcatgatcttggtgtgaatacaaggcagaacctagaccatgttaaagaatcaaaaacaggttcttcaggcattatagtaaggttaagcactaaccatttccggctgacatcccgtccccagtgggccttatatcagtatcacattgactataacccactgatggaagccagaagactccgttcagctcttctttttcaacacgaagatctaattggaaagtgtcatgcttttgatggaacgatattatttttacctaaaagactacagcaaaaggttactgaagtttttagtaagacccggaatggagaggatgtgaggataacgatcactttaacaaatgaacttccacctacatcaccaacttgtttgcagttctataatattattttcaggaggcttttgaaaatcatgaatttgcaacaaattggacgaaattattataacccaaatgacccaattgatattccaagtcacaggttggtgatttggcctggcttcactacttccatccttcagtatgaaaacagcatcatgctctgcactgacgttagccataaagtccttcgaagtgagactgttttggatttcatgttcaacttttatcatcagacagaagaacataaatttcaagaacaagtttccaaagaactaataggtttagttgttcttaccaagtataacaataagacatacagagtggatgatattgactgggaccagaatcccaagagcacctttaagaaagccgacggctctgaagtcagcttcttagaatactacaggaagcaatacaaccaagagatcaccgacttgaagcagcctgtcttggtcagccagcccaagagaaggcggggccctggggggacactgccagggcctgccatgctcattcctgagctctgctatcttacaggtctaactgataaaatgcgtaatgattttaacgtgatgaaagacttagccgttcatacaagactaactccagagcaaaggcagcgtgaagtgggacgactcattgattacattcataaaaacgataatgttcaaagggagcttcgagactggggtttgagctttgattccaacttactgtccttctcaggaagaattttgcaaacagaaaagattcaccaaggtggaaaaacatttgattacaatccacaatttgcagattggtccaaagaaacaagaggtgcaccattaattagtgttaagccactagataactggctgttgatctatacgcgaagaaattatgaagcagccaattcattgatacaaaatctatttaaagttacaccagccatgggcatgcaaatgagaaaagcaataatgattgaagtggatgacagaactgaagcctacttaagagtcttacagcaaaaggtcacagcagacacccagatagttgtctgtctgttgtcaagtaatcggaaggacaaatacgatgctattaaaaaatacctgtgtacagattgccctaccccaagtcagtgtgtggtggcccgaaccttaggcaaacagcaaactgtcatggccattgctacaaagattgccctacagatgaactgcaagatgggaggagagctctggagggtggacatccccctgaagctcgtgatgatcgttggcatcgattgttaccatgacatgacagctgggcggaggtcaatcgcaggatttgttgccagcatcaatgaagggatgacccgctggttctcacgctgcatatttcaggatagaggacaggagctggtagatgggctcaaagtctgcctgcaagcggctctgagggcttggaatagctgcaatgagtacatgcccagccggatcatcgtgtaccgcgatggcgtaggagacggccagctgaaaacactggtgaactacgaagtgccacagtttttggattgtctaaaatccattggtagaggttacaaccctagactaacggtaattgtggtgaagaaaagagtgaacaccagattttttgctcagtctggaggaagacttcagaatccacttcctggaacagttattgatgtagaggttaccagaccagaatggtatgacttttttatcgtgagccaggctgtgagaagtggtagtgtttctcccacacattacaatgtcatctatgacaacagcggcctgaagccagaccacatacagcgcttgacctacaagctgtgccacatctattacaactggccaggtgtcattcgtgttcctgctccttgccagtacgcccacaagctggcttttcttgttggccagagtattcacagagagccaaatctgtcactgtcaaaccgcctttactacctctaacctgcagaagacgatgcagccgcttttctttttgaaatgactttgggatttttttaagcttttatttactttttttttaactgttatctttctggatgaaacttgggaaggggattaggagatctagcattttatttctagcattgctattcaccggcttccttattttatacgtaaaaattaagattttatattttatcttcttgtttctcatagatattttgtgagcatttttttgtttattttgaagaaatgtggataagatacttggtagtataaaacagactctctgagagtatttgaaatgtgtttggagatttacttaaacgtactttcaggagtgagcaagtcctacttataaacctatattaactttatttttgagatacctgttttgaatttaaaggagataagaggcgtaaagtaggatgctcactacaaccataggtggggtttcagctcatatcttaaagataaaaggtactattatataacctatacacaagatacaggagaaaatatgcttgatttttatttggcaggggggctaggttgtatgggagtaaaaaaaacattgaaaatttttaaattgtccaaagaaacattttaagactctttaacaaaaaaggccatgagtaaatctctatattaacattactatttattttgttttggaactgggacatgattctatttgttataaaataaaattgatgtgattgtcaccttatttgaataactgtaattcttgttttactgaaagtatgtgcgttttcttttcatttaatttttaaaagtgcatacaattccattcataaaagctaaattagcctgaccaacatggtgaaaccccatctctactaaaaatacaaaattagccagatgtggtgccaggaggctgaggcaggagaatcacttgaacctgagaggcggaggttgcagtgagcagagatcacgccactgcactccagcctgggcaacagagtgagactccgtctcaaaaaaaaaaaaaaaaaaaaaaaaaaaaaaaaaaaaaaaa

SEQ ID NO: 22633 - DNA, 467 bp, Homo sapiens
  source 1..467: mol_type = unassigned DNA
agcggtccaaggtgcggggccaggctgaggtgctaggtgtgcgggggccgggatgcgggggcggcggctgggggtccgggatgtggagaaatagaaaacaatgactgggagagcccgagccagagccagaggaagggcccgcggtcaggagacagcgcagctggtgggctccactgccagtcagcaacctggttatattcagcctaggcctcagccgccaccagcagagggggaattatttggccgtggacggcagagaggaacagcaggaggaacagccaagtcacaaggactccagatatctgctggatttcaggagttatcgttagcagagagaggaggtcgtcgtagagattttcatgatcttggtgtgaatacaaggcagaacctagaccatgttaaagaatcaaaaacaggttcttcaggcattatagtaaggttaagcactaaccatttccggctgacat

SEQ ID NO: 22634 - DNA, 545 bp, Homo sapiens
  source 1..545: mol_type = unassigned DNA
gtgcacggcgtggtcctgagctcagcgccggagggacgttaggtggaagcgtctttggcagagctggtagcgaatcggagagaaatagaaaacaatgactgggagagcccgagccagagccagaggaagggcccgcggtcaggagacagcgcagctggtgggctccactgccagtcagcaacctggttatattcagcctaggcctcagccgccaccagcagagggggaattatttggccgtggacggcagagaggaacagcaggaggaacagccaagtcacaaggactccagatatctgctggatttcaggagttatcgttagcagagagaggaggtcgtcgtagagattttcatgatcttggtgtgaatacaaggcagaacctagaccatgttaaagaatcaaaaacaggttcttcaggcattatagtaaggttaagcactaaccatttccggctgacatcccgtccccagtgggccttatatcagtatcacattgactataacccactgatggaagccagaagactccgttcagctcttcttt

SEQ ID NO: 22635 - DNA, 879 bp, Homo sapiens
  source 1..879: mol_type = unassigned DNA
atctccaaatgggaaagaaagaaccagccaccagcatcctaattctttcagcactttctcctcctaagtctgtttataataaataatccaaatgaaaaactaagtcttatattaaaataggttttcccctttggccctactgcagtgcccagtgcaaggtaagcaactgagtttgttgaatgtaggaatgttacattaaaaaaaactgtcattaaagattagaaggatacataataattgcctggggagcttacttttgaaactcaaagaagtttaaagtaacattgtagaaattatcaaatgcgattgcctccattgagtattgtcttcaagattgtttcctctccagaaatagaaaacaatgactgggagagcccgagccagagccagaggaagggcccgcggtcaggagacagcgcagctggtgggctccactgccagtcagcaacctggttatattcagcctaggcctcagccgccaccagcagagggggaattatttggccgtggacggcagagaggaacagcaggaggaacagccaagtcacaaggactccagatatctgctggatttcaggagttatcgttagcagagagaggaggtcgtcgtagagattttcatgatcttggtgtgaatacaaggcagaacctagaccatgttaaagaatcaaaaacaggttcttcaggcattatagtaaggttaagcactaaccatttccggctgacatcccgtccccagtgggccttatatcagtatcacattgactataacccactgatggaagccagaagactccgttcagctcttctttttcaacacgaagatctaattggaaagtgtcatgcttttgatggaacgatattatttttacctaaaag

SEQ ID NO: 22636 - DNA, 571 bp, Homo sapiens
  source 1..571: mol_type = unassigned DNA
gtgcaaggaccaggactagggcgagggcagcggtccaaggtgcggggccaggctgaggtgctagaaatagaaaacaatgactgggagagcccgagccagagccagaggaagggcccgcggtcaggagacagcgcagctggtgggctccactgccagtcagcaacctggttatattcagcctaggcctcagccgccaccagcagagggggaattatttggccgtggacggcagagaggaacagcaggaggaacagccaagtcacaaggactccagatatctgctggatttcaggagttatcgttagcagagagaggaggtcgtcgtagagattttcatgatcttggtgtgaatacaaggcagaacctagaccatgttaaagaatcaaaaacaggttcttcaggcattatagtaaggttaagcactaaccatttccggctgacatcccgtccccagtgggccttatatcagtatcacattgactataacccactgatggaagccagaagactccgttcagctcttctttttcaacacgaagatctaattggaaagtgtcatgcttttgatgga

SEQ ID NO: 22637 - DNA, 5128 bp, Homo sapiens
  source 1..5128: mol_type = unassigned DNA
gaaattggccctggagcatgtgggccccggggcgtgggttgagctcggtcttcccctgaggccgcgcggagctgggcgactggggcgaggactcgcgcacaggtaattaaccagaacaggatcgacacgtgttctctacagcccgtccatggatcctttccgaccatcgttcaggggccagtctcctatccacccatcccagtgccaggctgtacggatgccaggctgttggccacaagcttctaaacctttggacccagctctgggcaggggagcacctgcaggcagaggccatgtatttggaaagccagaggaaccaagcacacagagggggccagcacaaagggagtctgtgggtttggtctccatgttccgaggcctgggcattgaaacagtttctaagacccctctgaaacgggaaatgcttccatcaggtagaggcattttaggtcgaggcttgtctgctaatctggtacgcaaggacagggaggaactctctcccactttttgggatccaaaagtgttggcggctggggacagcaagatggcagagacctccgttggttggagtaggacgcttggaagagggagttcagatgcgtctttattaccactgggaagagcagcaggtggtatcagcagagaagtggacaagcctccctgtaccttcagcacaccgtcccggggtcccccgcagctgtcatcaccaccagctctgccccagtctcccctgcactctccagatcgccctctggtcctgactgtggaacacaaggaaaaagagcttattgtgaagcaaggatcaaaaggaacacctcagtctttgggactgaacctcgtcaaaatacagtgtcataatgaagcagtttatcaatatcatgtgactttcagccccaatgtggagtgcaaaagcatgaggttcggcatgttgaaggaccatcaagctgtcaccggcaacgtcactgcgtttgatggatctattctctatctgcctgttaagcttcaacaagttcttgagttaaaaagtcaaaggaaaacagacagtgctgaaatcagcattaagattcagatgacaaagatcctggagccctgctctgacctgtgcattcccttctacaatgttgttttccgtcgggtaatgaaacttttagatatgaagcttgtggggagaaacttttatgaccctacaagtgctatggtactacagcaacacagattgcagatctggccaggctatgcagctagcatccgaaggacagatggagggctcttcctgctagctgatgtctcccataaggtcattcggaatgactgtgtgctggatgtcatgcatgccatttatcagcagaataaagaacacttccaggatgagtgtactaagcttctggttggcaatattgttatcacccgatataacaatcgtacctatcgtattgatgatgtggattggaataagactccaaaggatagcttcacgatgtctgatgggaaagagatcacattcttggaatactacagcaaaaattatgggatcacagttaaggaagaggaccagccattgctgattcacaggcccagtgagagacaggataatcatgggatgctgctaaaaggggaaatcctgctgctgcctgagctttcttttatgaccggaatcccagagaagatgaagaaggacttcagagccatgaaggatttggctcagcaaatcaatctgagccccaagcaacaccatagtgctttggaatgcttgctgcaaagaattgcaaagaacgaggcagccaccaatgaactgatgcgttgggggctccgtctgcaaaaggatgtacataagattgaaggacgtgttctgccaatggaaagaattaacttaaaaaatacttcgtttatcacatctcaggaactaaactgggttaaggaagtaaccagagacccttccatcttgactatccccatgcatttctgggcacttttttacccaaagagagcaatggaccaggctcgagaactggtcaacatgttggagaagatagccggccccattggcatgcgtatgagcccaccggcctgggttgaactaaaggatgaccgaatagagacttatgtcagaaccattcaatccacgttaggagctgaggggaagatacagatggttgtttgcatcatcatgggcccacgtgatgatctctatggggccatcaagaagctgtgctgtgtgcagtccccagtgccctcccaggttgtcaatgttcgaaccattggtcagcccaccaggcttcggagtgtggcccagaagattttacttcagattaactgtaaattgggtggtgagctctggggagtggatattcctctgaaacagttaatggtgatcgggatggatgtttaccatgaccccagtagaggcatgcgctccgtggttggcttcgtggcaagcatcaatctcaccctcacaaaatggtattcccgggtggtgttccagatgccgcatcaggagattgtggacagcctgaagctatgcctcgtgggctccttaaaaaagttttatgaggtgaaccactgtctaccagagaagattgtggtgtaccgtgatggagtgtctgatggccaactgaagacagttgccaactatgagattcctcaactacagaagtgttttgaagcttttgagaattatcagcccaagatggtggtgtttgtagttcagaagaaaatcagtactaatctatatctggctgctcctcagaactttgtaactcccactcctggaactgtggtagatcatacaataacaagctgtgagtgggtggatttctatcttcttgcccatcatgtacggcagggctgtggcattcctacgcattatgtctgtgttctcaacaccgcaaacctgagccctgatcatatgcagaggctgactttcaaactgtgccacatgtactggaattggcctggcaccatcagagttccagctccttgcaagtatgcccacaagctagctttcctgtcaggacacatcttgcatcatgaaccagccatccagctgtgcgagaacctgttcttcctgtgactgcacagcttggagatgggctggtgagaagaaaggcggcctcagaactcagctgtgactcttgcagaatcaacagagactgaagtgggcttttgtgttataattttccctttctccaaccctgtagaataagatttctttcttgtcttttaaacctaatatcaccaagaagcaagtttctgagtaacagctgaaaatggccttgttgcctgtgtagagcaagttacggtggtactgccactctgcaggtggagcgggtgactctgggggaccattaagacctccagaccgggtgcggtggttcacacctgtaatccaagcactttgggaggccgaggcgggtggatcatgaggtcaggagatcaagaccatcctggccaacatggtgaaaccccgtctctactaaaatacaaaaaaattagccgggtgtggcggtgcacgcctgtagtcccagctactcaggaggctaaggcaggagaatcgcttgaacccgggaggtggaggttgcagtgagccgagatcacgccactgcactccagcctgttgacaaagcaagactctgtctcaaaaaaaaaaaaaaaaagccaacatgagctgcagaaaccagcagaagcagccattatacttctaagctgtgccaactaagtggttcccatttctggagccagagatgataattaagtcattgcaagttgcctgaagagaattactcaggcaactgggaaaggcagtggaaggtctgtgaagcaaagttttcaagtagatattgctattactggcaggtgtgcaaggcgtgtagtaaaatcagtttgtggcataggtcggcccttgctgactaaatcctctctggggattgaattgatgacgactgtgacttgagttggattcgaaaatggcttcccttggcctcttgaaagagtgcagatgaagccttttccgtggatttcagtaactttccagcataccatgacgatttcttccccaaatatacacatgctcttttgctctttgtgcctgatcttcagtaatttttagttttttaacaggcagaaaaaatctagcagctaggaaagttcaagttggggtgggagtttttagtgaacttttctcccaggtgtgtggcctttatttctatttatatatgtttgtaaatggaattaccccctttctcttgcaaaataaccgcttcctggctgttggctcactttgctggaatttttctgaatccaggttaagatttccagaagtcagctttggaaaacgtgacactcctaccaaagtccagatggttagaaagttatcacataccatgggtttcagtgtttttggaaacccgtttttttctggttttttttcccccctctccattttagaatcttctcccagtcccttcgggcctagttctgtctcatcttgctttattgggttttaaaaaccggtcttatttaagcttttctaatttgtatttatgtacttatttattttttggtatgatggcagggaggggacaaagcagaaataccccttttatatgacaatgtgtgagaaaagaaactttagcttaaaactccgtaaaatgtgctcacttcagcagcacatatactaaaattaaaatgatatagagaagattagcatatagaaaaaaagaaaaaagatttccttaaaacaagaaaaccaagaatgtttttggtttgttgcggtgcccagccgaggttgaggagggatgggtattgttggtgcactgctggtttcatttggagtgtgggacattagggtgagacaaggacctggaatttaaaaaccacagaatcaaacactgtgaaccactggtctctggctaagcagatcagttttctgattttccttggaagcgttttgaatttttctgttgaagttggatttcctaatactttttttctcttagataatcagaacaaatggttgaatacattataatacaaaaatttcttcactttttattcttggttttcttgcctcgtttttcggttttaatgccaaatgattgggtcatggggtgggaaataaaaacaactttgt

SEQ ID NO: 22638 - DNA, 3442 bp, Homo sapiens
  source 1..3442: mol_type = unassigned DNA
attcgaggcccggcgccgcggccccaagaaggtgtccaggttggggcggcaggggaggccctccggaggcccaagtggacgtcttatttggcctgagagaggagatagaacccctggcagggctgtggctttggggaaaggtgcttttctcggggtggaaaggggatgggactcgccttcgggggccttgcttctggttaggcccgagtcgcgaggcctcagcgcggagcacgcacccagggatgcgagggaggcaggcccagcccgtcctgggttcgctccccattgaacctttcggacagccaagtatctgctacctgatcccagggggaaacccacactgggagagggccctctgggggagctacctgaatctatagaagtggtgctggaggttgagggaagcgtggacaaagaggaagattccagatgtcccttaagggaggccgtccagcgcttctgagtaattaaccagaacaggatcgacacgtgttctctacagcccgtccatggatcctttccgaccatcgttcaggggccagtctcctatccacccatcccagtgccaggctgtacggatgccaggctgttggccacaagcttctaaacctttggacccagctctgggcaggggagcacctgcaggcagaggccatgtatttggaaagccagaggaaccaagcacacagagggggccagcacaaagggagtctgtgggtttggtctccatgttccgaggcctgggcattgaaacagtttctaagacccctctgaaacgggaaatgcttccatcaggtagaggcattttaggtcgaggcttgtctgctaatctggtacgcaaggacagggaggaactctctcccactttttgggatccaaaagtgttggcggctggggacagcaagatggcagagacctccgttggttggagtaggacgcttggaagagggagttcagatgcgtctttattaccactgggaagagcagcaggtggtatcagcagagaagtggacaagcctccctgtaccttcagcacaccgtcccggggtcccccgcagctgtcatcaccaccagctctgccccagtctcccctgcactctccagatcgccctctggtcctgactgtggaacacaaggaaaaagagcttattgtgaagcaaggatcaaaaggaacacctcagtctttgggactgaacctcgtcaaaatacagtgtcataatgaagcagtttatcaatatcatgtgactttcagccccaatgtggagtgcaaaagcatgaggttcggcatgttgaaggaccatcaagctgtcaccggcaacgtcactgcgtttgatggatctattctctatctgcctgttaagcttcaacaagttcttgagttaaaaagtcaaaggaaaacagacagtgctgaaatcagcattaagattcagatgacaaagatcctggagccctgctctgacctgtgcattcccttctacaatgttgttttccgtcgggtaatgaaacttttagatatgaagcttgtggggagaaacttttatgaccctacaagtgctatggtactacagcaacacagattgcagatctggccaggctatgcagctagcatccgaaggacagatggagggctcttcctgctagctgatgtctcccataaggtcattcggaatgactgtgtgctggatgtcatgcatgccatttatcagcagaataaagaacacttccaggatgagtgtactaagcttctggttggcaatattgttatcacccgatataacaatcgtacctatcgtattgatgatgtggattggaataagactccaaaggatagcttcacgatgtctgatgggaaagagatcacattcttggaatactacagcaaaaattatgggatcacagttaaggaagaggaccagccattgctgattcacaggcccagtgagagacaggataatcatgggatgctgctaaaaggggaaatcctgctgctgcctgagctttcttttatgaccggaatcccagagaagatgaagaaggacttcagagccatgaaggatttggctcagcaaatcaatctgagccccaagcaacaccatagtgctttggaatgcttgctgcaaagaattgcaaagaacgaggcagccaccaatgaactgatgcgttgggggctccgtctgcaaaaggatgtacataagattgaaggacgtgttctgccaatggaaagaattaacttaaaaaatacttcgtttatcacatctcaggaactaaactgggttaaggaagtaaccagagacccttccatcttgactatccccatgcatttctgggcacttttttacccaaagagagcaatggaccaggctcgagaactggtcaacatgttggagaagatagccggccccattggcatgcgtatgagcccaccggcctgggttgaactaaaggatgaccgaatagagacttatgtcagaaccattcaatccacgttaggagctgaggggaagatacagatggttgtttgcatcatcatgggcccacgtgatgatctctatggggccatcaagaagctgtgctgtgtgcagtccccagtgccctcccaggttgtcaatgttcgaaccattggtcagcccaccaggcttcggagtgtggcccagaagattttacttcagattaactgtaaattgggtggtgagctctggggagtggatattcctctgaaacagttaatggtgatcgggatggatgtttaccatgaccccagtagaggcatgcgctccgtggttggcttcgtggcaagcatcaatctcaccctcacaaaatggtattcccgggtggtgttccagatgccgcatcaggagattgtggacagcctgaagctatgcctcgtgggctccttaaaaaagttttatgaggtgaaccactgtctaccagagaagattgtggtgtaccgtgatggagtgtctgatggccaactgaagacagttgccaactatgagattcctcaactacagaagtgttttgaagcttttgagaattatcagcccaagatggtggtgtttgtagttcagaagaaaatcagtactaatctatatctggctgctcctcagaactttgtaactcccactcctggaactgtggtagatcatacaataacaagctgtgagtgggtggatttctatcttcttgcccatcatgtacggcagggctgtggcattcctacgcattatgtctgtgttctcaacaccgcaaacctgagccctgatcatatgcagaggctgactttcaaactgtgccacatgtactggaattggcctggcaccatcagagttccagctccttgcaagtatgcccacaagctagctttcctgtcaggacacatcttgcatcatgaaccagccatccagctgtgcgagaacctgttcttcctgtgactgcacagctt

SEQ ID NO: 22639 - DNA, 1131 bp, Homo sapiens
  source 1..1131: mol_type = unassigned DNA
atatatcagaccatcagaaggatttgtataaagagtgactctcctatgaaggtaaaggccacccctcttcagttccagtgactgagatacatttttccaatcctgggggcaaatacagacacagcaagttccttcttccctttggaaatttggcagctgccttcaccagtgagcacaaagccacatttcaaaggaaactgacaaattatccccagctgccagaagaagaaatcctcactggacggcttcctgtttcctgtggttcattatctgattggctgcagggatgaaagtttttaagttcataggactgatgatcctcctcacctctgcgttttcagccggttcaggacaaagtccaatgactgtgctgtgctccatagactggttcatggtcacagtgcaccccttcatgctaaacaacgatgtgtgtgtacactttcatgaactacacttgggcctgggttgccccccaaaccatgttcagccacacgcctaccagttcacctaccgtgttactgaatgtggcatcagggccaaagctgtctctcaggacatggttatctacagcactgagatacactactcttctaagggcacgccatctaagtttgtgatcccagtgtcatgtgctgccccccaaaagtccccatggctcaccaagccctgctccatgagagtagccagcaagagcagggccacagcccagaaggatgagaaatgctacgaggtgttcagcttgtcacagtccagtcaaaggcccaactgcgattgtccaccttgtgtcttcagtgaagaagagcatacccaggtcccttgtcaccaagcaggggctcaggaggctcaacctctgcagccatctcactttcttgatatttctgaggattggtctcttcacacagatgatatgattgggtccatgtgatcctcaggtttggggtctcctgaagatgctatttctagaattagtatatagtgtacaaatgtctgacaaataagtgctcttgtgaccctcatgtgagcacttttgagaaagagaaacctatagcaacttcatgaattaagcctttttctatatttttatattcatgtgtaaacaaaaaataaaataaaattctgatcgcataaaaa

SEQ ID NO: 22640 - DNA, 785 bp, Homo sapiens
  source 1..785: mol_type = unassigned DNA
gctgcgggcagacgcggcgctgcgctcggccaggccggcaccatgcggcccctgctctgcgcgctgaccggactggccctgctccgcgccgcgggctctttggccgctgccgaacccttcagccctccgcgaggagactcagctcagagcacagcgtgtgacagacacatggctgtgcaacgccgtctagatgtcatggaggagatggtagagaagaccgtggatcacctggggacagaggtgaaaggcctgctgggcctgctggaggagctggcctggaacctgcccccgggacccttcagccccgctcccgaccttctcggagatggcttctgagccctggagctggagcccagcagttggaggtggtgcacctgccaggcagcgcccacagaaccagccctgtcctctcgacttccttccttagcttcatgtgaaataaaagctattctggtctcctctgtgtctgctgacagagtaacccgtttaactacagcctcctctcactccacttccatgcctggaggaagcctgcaaccccctccaggctcagacctggggacacccccactcctgtcatttataggggcagatggagcaggggttgattcacacagatgggggccctttgagtggccttgcttctcaaaatgtggccataggtgaaaagcaaggggatcagggtctcaggacccacccagactgtttaatccaaatctgcattgcaatgagacccccagggattttatgtgtccattaaagtggtttgttgttgtttttaaaaa

SEQ ID NO: 22641 - DNA, 472 bp, Homo sapiens
  source 1..472: mol_type = unassigned DNA
cacggggtgccgaggggcctctggagggggcgggttctctcgagccagaaagtccggagccgcccaggaattttggctcgaactgagtgcatttcctctcgggccggccgggtgcgatccgggaagggcggctgcgggcagacgcggcgctgcgctcggccaggccggcaccatgcggcccctgctctgcgcgctgaccggactggccctgctccgcgccgcgggctctttggccgctgccgaacccttcagccctccgcgaggagactcagctcagagcacagcgtgtgacagacacatggctgtgcaacgccgtctagatgtcatggaggagatggcttctgagccctggagctggagcccagcagttggaggtggtgcacctgccaggcagcgcccacagaaccagccctgtcctctcgacttccttccttagcttcatgtgaaataaaagctattctggtctcctctg

SEQ ID NO: 22642 - DNA, 495 bp, Homo sapiens
  source 1..495: mol_type = unassigned DNA
gggagtgagaactggatcactggttagcgtggtaactgttttggacaattgcatagccacagccaggaacacagaaggcagagaggcagccttgatctgcaagagctccagctgccgaacccttcagccctccgcgaggagactcagctcagagcacagcgtgtgacagacacatggctgtgcaacgccgtctagatgtcatggaggagatggtagagaagaccgtggatcacctggggacagaggtgaaaggcctgctgggcctgctggaggagctggcctggaacctgcccccgggacccttcagccccgctcccgaccttctcggagatggcttctgagccctggagctggagcccagcagttggaggtggtgcacctgccaggcagcgcccacagaaccagccctgtcctctcgacttccttccttagcttcatgtgaaataaaagctattctggtctcctctgtgtctgctgacagagtaacccgtttaa

SEQ ID NO: 22643 - DNA, 5447 bp, Homo sapiens
  source 1..5447: mol_type = unassigned DNA
gggtggtgcagggcaggggtggtatatcctgtctgacggagggcgggcctcgccagtgccagagagggacgaaccagggtggaagcgccaggagcagctgcagggagccctcacgcggaccacgcactctatggccgtagggagccgctgagagcgagaagagcacgctcctgcccgcccgctgcaccgcacctcgcctcgcctctctgctctcctaggccccggccgcgcgccacccgcctcccgccaccatgaaccactcgccgctcaagaccgccttggcgtacgaatgcttccaggaccaggacaactccacgttggctttgccgtcggaccaaaagatgaaaacaggcacgtctggcaggcagcgcgtgcaggagcaggtgatgatgaccgtcaagcggcagaagtccaagtcttcccagtcgtccaccctgagccactccaatcgaggttccatgtatgatggcttggctgacaattacaactatgggaccaccagcaggagcagctactactccaagttccaggcagggaatggctcatggggatatccgatctacaatggaaccctcaagcgggagcctgacaacaggcgcttcagctcctacagccagatggagaactggagccggcactacccccggggcagctgtaacaccaccggcgcaggcagcgacatctgcttcatgcagaaaatcaaggcgagccgcagtgagcccgacctctactgtgacccacggggcaccctgcgcaagggcacgctgggcagcaagggccagaagaccacccagaaccgctacagcttttacagcacctgcagtggtcagaaggccataaagaagtgccctgtgcgcccgccctcttgtgcctccaagcaggaccctgtgtatatcccgcccatctcctgcaacaaggacctgtcctttggccactctagggccagctccaagatctgcagtgaggacatcgagtgcagtgggctgaccatccccaaggctgtgcagtacctgagctcccaggatgagaaataccaggccattggggcctattacatccagcatacctgcttccaggatgaatctgccaagcaacaggtctatcagctgggaggcatctgcaagctggtggacctcctccgcagccccaaccagaacgtccagcaggccgcggcaggggccctgcgcaacctggtgttcaggagcaccaccaacaagctggagacccggaggcagaatgggatccgcgaggcagtcagcctcctgaggagaaccgggaacgccgagatccagaagcagctgactgggctgctctggaacctgtcttccactgacgagctgaaggaggaactcattgccgacgccctgcctgttctggccgaccgcgtcatcattcccttctctggctggtgcgatggcaatagcaacatgtcccgggaagtggtggaccctgaggtcttcttcaatgccacaggctgcttgagaaagagactgggcatgcgggagcttctggctcttgttccgcaaagggccactagtagcagggtgaacctgagctcggccgatgcaggccgccagaccatgcgtaactactcagggctcattgattccctcatggcctatgtccagaactgtgtagcggccagccgctgtgacgacaagtctgtggaaaactgcatgtgtgttctgcacaacctctcctaccgcctggacgccgaggtgcccacccgctaccgccagctggagtataacgcccgcaacgcctacaccgagaagtcctccactggctgcttcagcaacaagagcgacaagatgatgaacaacaactatgactgccccctgcctgaggaagagaccaaccccaagggcagcggctggttgtaccattcagatgccatccgcacctacctgaacctcatgggcaagagcaagaaagatgctaccctggaggcctgtgctggtgccctgcagaacctgacagccagcaaggggctgatgtccagtggcatgagccagttgattgggctgaaggaaaagggcctgccacaaattgcccgcctcctgcaatctggcaactctgatgtggtgcggtccggagcctccctcctgagcaacatgtcccgccaccctctgctgcacagagtgatggggaaccaggtgttcccggaggtgaccaggctcctcaccagccacactggcaataccagcaactccgaagacatcttgtcctcggcctgctacactgtgaggaacctgatggcctcgcagccacaactggccaagcagtacttctccagcagcatgctcaacaacatcatcaacctgtgccgaagcagtgcctcacccaaggccgcagaagctgcccggcttctcctgtctgacatgtggtccagcaaggaactgcagggtgtcctcagacagcaaggtttcgataggaacatgctgggaaccttagctggggccaacagcctcaggaacttcacctcccgattctaagaagagactgtccaagcaagttaggcttgcaggaagatatgacccagctgagaagccctcaggcctcgctggatggggttttctgtccatcctatgcagtatttgggaaagttcacaagaaactgagaagaaacctaaaaactgtggatagtggaaagatttttagattttttttttccttggggaaactggcaggcaatgggggttagggaggttggggcggtgggggctttcttgagttaaaggggcttatatgtgatgtcaatatttcttcctctgagaaatggtatatatatgtgtataatgtaagtgtgtgcatgcatgtgcgcgtgcatgtgtgtgtgtgtgagtgtcttaaagcataaccacaaactgcaaaaagctaggtaagctattttgttgcagctcataaggtggtgaaaaggactctcctgtgtttcttactcataggcaaggacaacatgtgctttttggtgagctgctcataattcctgaaatgtgtggtgccagggcaagggggccatcactgcagtcaggccctcagaggagtcctgcaggcttcctaccagtggtctccaggggtgcaggagtaactggggctgggccagcctccccacttacaaggctgctttccaggaagggaggtctggtgtatctcatgggagaatctggggtgtctgtaatgtcacccctccagcagcgccacaaggactgaggttgggtaggtgtggggttccagaggacagcaggacactctcgcatactttgccaaatgaggcctgctcagaggagtaggagctgaaagatggtgccttccaccctcttgggctgtgtgcccatcagagcaggctcagcctgcaaaggccctgcattcagaggtcttgtaatctacttgttgcaggagaaagaaggtaaaaaatgatttttttaagaaaagctattttattgcagctctttcccaagagctgttctgggaatggctggtcttcatattcccagtggagaggggaacaagtggggctgggcatatacctattccggcttctagtgggatggagttggggtatagaaattaaccaggaagatgtttccaccaagcctgctgtgagtcaattgagggagtgtttggggtcccaggagacttggacggggggagtttgggtagactaggaaaggaaagtgccatatcagggtaccggtaccggcaagctcacatctcagccaggggccatgccccacttcccctgaccccagctgtcttgtctccactctgtgaaacccacaggggatgtgataaacagggctattaggggtatcagccacgtcgagcccccagactctgtgcacttcagaccagcagcagcaggagggctcccgagggccttatgagaaaacctgtgtggacatcccttggtgtacactaagacagagcagagcccagcgctcccaagccttcctccttccagcttctacctccatgctagcattgctggtgttagagaggaattaacttcctggtctgtgcccttctctagaagaatataagatgctcctcctcctcaccccttctcagcctcctcccaagtcttcctcttctgcaccacccccgagtccaaacccacctcttgccccagcattcaggctggaaaacactgatgtggactcagtatgataactgagatgggggacgccagacatgtgaggacgctgtcctccgagaggtgtccccggctgttagccagctgtgctgtggtgctgtgggtctgtcataccctcccttgcttctgttcacactgggaggcccactcctggctcacctctccctctcagggacccacgtgggagcctggatccctggactgtcctgggcataggtttcaggggcctcctttgttgtcatcagaacccagaggaattcttctcctaaaaaatacgtatggcataccaatctgtgcggggcagtgtcctaagcacttagactacatcagggaagaacacagaccacatccctgtcctcatgcggcttatgttttctggaggaaagtggagacacaagtccttggctttagggctcccccggctgggggctgtgcagtccggtcagggcgggaggggaaatgcaccgctgcatgtgaaccttaccagcccaggcggatgccccttccccttagcactaccctggcctcctgcatcccctcgcctcatgttcctcccaccttcaaagaatgaagagccccatgggcccagcccctgccctgggaaccaggcagccttccagacctcaggggctgaggcagactattagggcagggctgactttggtgacactgcccattccctctcaggccagctcaggtcacccgggcctctgacccaggcctgtcactttgagaggggcaaaactgagaggggcttttcctagagaaagagaacaaggagcttgccaggcttcatgtagccgacacacgtctcaggattttaagtccacattggcctcacactaccagggccaatgcccaaaataaggagttccaatttggggccaaatgaggaaggacacagactctgccctgggatctcctgtgctagcggccaatgacaaatccagtcattggccaccagccacctctgcagtggggaccacactagcagccctgactccacactcctcctggggacccaagaggcagtgttgctgtctgcatgtccaccttggaatctggctgaactggctggcaggaccaagactgcggctggggtgggcagggaagggaagccgggggctgctgtgagggatcttggagcttccctgtagcccaccttccccttgcttcatgtttgtagaggaaccttgtgccggccaggcccagtttccttgtgtgatacactaatgtatttgctttttttggaaatagagaaaatcaataaattgctagtgtttctttgaacttt

SEQ ID NO: 22644 - DNA, 2244 bp, Homo sapiens
  source 1..2244: mol_type = unassigned DNA
atgaaccactcgccgctcaagaccgccttggcgtacgaatgcttccaggaccaggacaactccacgttggctttgccgtcggaccaaaagatgaaaacaggcacgtctggcaggcagcgcgtgcaggagcaggtgatgatgaccgtcaagcggcagaagtccaagtcttcccagtcgtccaccctgagccactccaatcgaggttccatgtatgatggcttggctgacaattacaactatgggaccaccagcaggagcagctactactccaagttccaggcagggaatggctcatggggatatccgatctacaatggaaccctcaagcgggagcctgacaacaggcgcttcagctcctacagccagatggagaactggagccggcactacccccggggcagctgtaacaccaccggcgcaggcagcgacatctgcttcatgcagaaaatcaaggcgagccgcagtgagcccgacctctactgtgacccacggggcaccctgcgcaagggcacgctgggcagcaagggccagaagaccacccagaaccgctacagcttttacagcacctgcagtggtcagaaggccataaagaagtgccctgtgcgcccgccctcttgtgcctccaagcaggaccctgtgtatatcccgcccatctcctgcaacaaggacctgtcctttggccactctagggccagctccaagatctgcagtgaggacatcgagtgcagtgggctgaccatccccaaggctgtgcagtacctgagctcccaggatgagaaataccaggccattggggcctattacatccagcatacctgcttccaggatgaatctgccaagcaacaggtctatcagctgggaggcatctgcaagctggtggacctcctccgcagccccaaccagaacgtccagcaggccgcggcaggggccctgcgcaacctggtgttcaggagcaccaccaacaagctggagacccggaggcagaatgggatccgcgaggcagtcagcctcctgaggagaaccgggaacgccgagatccagaagcagctgactgggctgctctggaacctgtcttccactgacgagctgaaggaggaactcattgccgacgccctgcctgttctggccgaccgcgtcatcattcccttctctggctggtgcgatggcaatagcaacatgtcccgggaagtggtggaccctgaggtcttcttcaatgccacaggctgcttgagaaagagactgggcatgcgggagcttctggctcttgttccgcaaagggccactagtagcagggtgaacctgagctcggccgatgcaggccgccagaccatgcgtaactactcagggctcattgattccctcatggcctatgtccagaactgtgtagcggccagccgctgtgacgacaagtctgtggaaaactgcatgtgtgttctgcacaacctctcctaccgcctggacgccgaggtgcccacccgctaccgccagctggagtataacgcccgcaacgcctacaccgagaagtcctccactggctgcttcagcaacaagagcgacaagatgatgaacaacaactatgactgccccctgcctgaggaagagaccaaccccaagggcagcggctggttgtaccattcagatgccatccgcacctacctgaacctcatgggcaagagcaagaaagatgctaccctggaggcctgtgctggtgccctgcagaacctgacagccagcaaggggctgatgtccagtggcatgagccagttgattgggctgaaggaaaagggcctgccacaaattgcccgcctcctgcaatctggcaactctgatgtggtgcggtccggagcctccctcctgagcaacatgtcccgccaccctctgctgcacagagtgatggggaaccaggtgttcccggaggtgaccaggctcctcaccagccacactggcaataccagcaactccgaagacatcttgtcctcggcctgctacactgtgaggaacctgatggcctcgcagccacaactggccaagcagtacttctccagcagcatgctcaacaacatcatcaacctgtgccgaagcagtgcctcacccaaggccgcagaagctgcccggcttctcctgtctgacatgtggtccagcaaggaactgcagggtgtcctcagacagcaaggtttcgataggaacatgctgggaaccttagctggggccaacagcctcaggaacttcacctcccgattctaa

SEQ ID NO: 22645 - DNA, 5384 bp, Homo sapiens
  source 1..5384: mol_type = unassigned DNA
gggtggtgcagggcaggggtggtatatcctgtctgacggagggcgggcctcgccagtgccagagagggacgaaccagggtggaagcgccaggagcagctgcagggagccctcacgcggaccacgcactctatggccgtagggagccgctgagagcgagaagagcacgctcctgcccgcccgctgcaccgcacctcgcctcgcctctctgctctcctaggccccggccgcgcgccacccgcctcccgccaccatgaaccactcgccgctcaagaccgccttggcgtacgaatgcttccaggaccaggacaactccacgttggctttgccgtcggaccaaaagatgaaaacaggcacgtctggcaggcagcgcgtgcaggagcaggtgatgatgaccgtcaagcggcagaagtccaagtcttcccagtcgtccaccctgagccactccaatcgaggttccatgtatgatggcttggctgacaattacaactatgggaccaccagcaggagcagctactactccaagttccaggcagggaatggctcatggggatatccgatctacaatggaaccctcaagcgggagcctgacaacaggcgcttcagctcctacagccagatggagaactggagccggcactacccccggggcagctgtaacaccaccggcgcaggcagcgacatctgcttcatgcagaaaatcaaggcgagccgcagtgagcccgacctctactgtgacccacggggcaccctgcgcaagggcacgctgggcagcaagggccagaagaccacccagaaccgctacagcttttacagcacctgcagtggtcagaaggccataaagaagtgccctgtgcgcccgccctcttgtgcctccaagcaggaccctgtgtatatcccgcccatctcctgcaacaaggacctgtcctttggccactctagggccagctccaagatctgcagtgaggacatcgagtgcagtgggctgaccatccccaaggctgtgcagtacctgagctcccaggatgagaaataccaggccattggggcctattacatccagcatacctgcttccaggatgaatctgccaagcaacaggtctatcagctgggaggcatctgcaagctggtggacctcctccgcagccccaaccagaacgtccagcaggccgcggcaggggccctgcgcaacctggtgttcaggagcaccaccaacaagctggagacccggaggcagaatgggatccgcgaggcagtcagcctcctgaggagaaccgggaacgccgagatccagaagcagctgactgggctgctctggaacctgtcttccactgacgagctgaaggaggaactcattgccgacgccctgcctgttctggccgaccgcgtcatcattcccttctctggctggtgcgatggcaatagcaacatgtcccgggaagtggtggaccctgaggtcttcttcaatgccacaggctgcttgaggaacctgagctcggccgatgcaggccgccagaccatgcgtaactactcagggctcattgattccctcatggcctatgtccagaactgtgtagcggccagccgctgtgacgacaagtctgtggaaaactgcatgtgtgttctgcacaacctctcctaccgcctggacgccgaggtgcccacccgctaccgccagctggagtataacgcccgcaacgcctacaccgagaagtcctccactggctgcttcagcaacaagagcgacaagatgatgaacaacaactatgactgccccctgcctgaggaagagaccaaccccaagggcagcggctggttgtaccattcagatgccatccgcacctacctgaacctcatgggcaagagcaagaaagatgctaccctggaggcctgtgctggtgccctgcagaacctgacagccagcaaggggctgatgtccagtggcatgagccagttgattgggctgaaggaaaagggcctgccacaaattgcccgcctcctgcaatctggcaactctgatgtggtgcggtccggagcctccctcctgagcaacatgtcccgccaccctctgctgcacagagtgatggggaaccaggtgttcccggaggtgaccaggctcctcaccagccacactggcaataccagcaactccgaagacatcttgtcctcggcctgctacactgtgaggaacctgatggcctcgcagccacaactggccaagcagtacttctccagcagcatgctcaacaacatcatcaacctgtgccgaagcagtgcctcacccaaggccgcagaagctgcccggcttctcctgtctgacatgtggtccagcaaggaactgcagggtgtcctcagacagcaaggtttcgataggaacatgctgggaaccttagctggggccaacagcctcaggaacttcacctcccgattctaagaagagactgtccaagcaagttaggcttgcaggaagatatgacccagctgagaagccctcaggcctcgctggatggggttttctgtccatcctatgcagtatttgggaaagttcacaagaaactgagaagaaacctaaaaactgtggatagtggaaagatttttagattttttttttccttggggaaactggcaggcaatgggggttagggaggttggggcggtgggggctttcttgagttaaaggggcttatatgtgatgtcaatatttcttcctctgagaaatggtatatatatgtgtataatgtaagtgtgtgcatgcatgtgcgcgtgcatgtgtgtgtgtgtgagtgtcttaaagcataaccacaaactgcaaaaagctaggtaagctattttgttgcagctcataaggtggtgaaaaggactctcctgtgtttcttactcataggcaaggacaacatgtgctttttggtgagctgctcataattcctgaaatgtgtggtgccagggcaagggggccatcactgcagtcaggccctcagaggagtcctgcaggcttcctaccagtggtctccaggggtgcaggagtaactggggctgggccagcctccccacttacaaggctgctttccaggaagggaggtctggtgtatctcatgggagaatctggggtgtctgtaatgtcacccctccagcagcgccacaaggactgaggttgggtaggtgtggggttccagaggacagcaggacactctcgcatactttgccaaatgaggcctgctcagaggagtaggagctgaaagatggtgccttccaccctcttgggctgtgtgcccatcagagcaggctcagcctgcaaaggccctgcattcagaggtcttgtaatctacttgttgcaggagaaagaaggtaaaaaatgatttttttaagaaaagctattttattgcagctctttcccaagagctgttctgggaatggctggtcttcatattcccagtggagaggggaacaagtggggctgggcatatacctattccggcttctagtgggatggagttggggtatagaaattaaccaggaagatgtttccaccaagcctgctgtgagtcaattgagggagtgtttggggtcccaggagacttggacggggggagtttgggtagactaggaaaggaaagtgccatatcagggtaccggtaccggcaagctcacatctcagccaggggccatgccccacttcccctgaccccagctgtcttgtctccactctgtgaaacccacaggggatgtgataaacagggctattaggggtatcagccacgtcgagcccccagactctgtgcacttcagaccagcagcagcaggagggctcccgagggccttatgagaaaacctgtgtggacatcccttggtgtacactaagacagagcagagcccagcgctcccaagccttcctccttccagcttctacctccatgctagcattgctggtgttagagaggaattaacttcctggtctgtgcccttctctagaagaatataagatgctcctcctcctcaccccttctcagcctcctcccaagtcttcctcttctgcaccacccccgagtccaaacccacctcttgccccagcattcaggctggaaaacactgatgtggactcagtatgataactgagatgggggacgccagacatgtgaggacgctgtcctccgagaggtgtccccggctgttagccagctgtgctgtggtgctgtgggtctgtcataccctcccttgcttctgttcacactgggaggcccactcctggctcacctctccctctcagggacccacgtgggagcctggatccctggactgtcctgggcataggtttcaggggcctcctttgttgtcatcagaacccagaggaattcttctcctaaaaaatacgtatggcataccaatctgtgcggggcagtgtcctaagcacttagactacatcagggaagaacacagaccacatccctgtcctcatgcggcttatgttttctggaggaaagtggagacacaagtccttggctttagggctcccccggctgggggctgtgcagtccggtcagggcgggaggggaaatgcaccgctgcatgtgaaccttaccagcccaggcggatgccccttccccttagcactaccctggcctcctgcatcccctcgcctcatgttcctcccaccttcaaagaatgaagagccccatgggcccagcccctgccctgggaaccaggcagccttccagacctcaggggctgaggcagactattagggcagggctgactttggtgacactgcccattccctctcaggccagctcaggtcacccgggcctctgacccaggcctgtcactttgagaggggcaaaactgagaggggcttttcctagagaaagagaacaaggagcttgccaggcttcatgtagccgacacacgtctcaggattttaagtccacattggcctcacactaccagggccaatgcccaaaataaggagttccaatttggggccaaatgaggaaggacacagactctgccctgggatctcctgtgctagcggccaatgacaaatccagtcattggccaccagccacctctgcagtggggaccacactagcagccctgactccacactcctcctggggacccaagaggcagtgttgctgtctgcatgtccaccttggaatctggctgaactggctggcaggaccaagactgcggctggggtgggcagggaagggaagccgggggctgctgtgagggatcttggagcttccctgtagcccaccttccccttgcttcatgtttgtagaggaaccttgtgccggccaggcccagtttccttgtgtgatacactaatgtatttgctttttttggaaatagagaaaatcaataaattgctagtgtttctttgaacttt

SEQ ID NO: 22646 - DNA, 4241 bp, Homo sapiens
  source 1..4241: mol_type = unassigned DNA
cagctcggtcgcccccaccggccccatggcagcccccggcgccccagctgagtacggctacatccggaccgtcctgggccagcagatcctgggacaactggacagctccagcctggcgctgccctccgaggccaagctgaagctggcggggagcagcggccgcggcggccagacagtcaagagcctgcggatccaggagcaggtgcagcagaccctcgcccggaagggccgcagctccgtgggcaacggaaatcttcaccgaaccagcagtgttcctgagtatgtctacaacctacacttggttgaaaatgattttgttggaggccgttcccctgttcctaaaacctatgacatgctaaaggctggcacaactgccacttatgaaggtcgctggggaagaggaacagcacagtacagctcccagaagtccgtggaagaaaggtccttgaggcatcctctgaggagactggagatttctcctgacagcagcccggagagggctcactacacgcacagcgattaccagtacagccagagaagccaggctgggcacaccctgcaccaccaagaaagcaggcgggccgccctcctagtgccaccgagatatgctcgttccgagatcgtgggggtcagccgtgctggcaccacaagcaggcagcgccactttgacacataccacagacagtaccagcatggctctgttagcgacaccgtttttgacagcatccctgccaacccggccctgctcacgtaccccaggccagggaccagccgcagcatgggcaacctcttggagaaggagaactacctgacggcagggctcactgtcgggcaggtcaggccgctggtgcccctgcagcccgtcactcagaacagggcttccaggtcctcctggcatcagagctccttccacagcacccgcacgctgagggaagctgggcccagtgtcgccgtggattccagcgggaggagagcgcacttgactgtcggccaggcggccgcagggggaagtgggaatctgctcactgagagaagcactttcactgactcccagctggggaatgcagacatggagatgactctggagcgagcagtgagtatgctcgaggcagaccacatgctgccatccaggatttctgctgcagctactttcatacagcacgagtgcttccagaaatctgaagctcggaagagggttaaccagcttcgtggcatcctcaagcttctgcagctcctaaaagttcagaatgaagacgttcagcgagctgtgtgtggggccttgagaaacttagtatttgaagacaatgacaacaaattggaggtggctgaactaaatggggtacctcggctgctccaggtgctgaagcaaaccagagacttggagactaaaaaacaaataacagaccatacagtcaatttaagaagtaggaatggctggccgggcgcggtggctcacgcctgtaatcccagcactttgggaggccaaggcgggcggatcacgaggtcaggagttcgagaccagcctgaccaacatggtttgctgtggaatttgtcatctaatgacaaactcaagaatctcatgataacagaagcattgcttacgctgacggagaatatcatcatccccttttctgggtggcctgaaggagactacccaaaagcaaatggtttgctcgattttgacatattctacaacgtcactggatgcctaagaaacatgagttctgctggcgctgatgggagaaaagcgatgagaagatgtgacggactcattgactcactggtccattatgtcagaggaaccattgcagattaccagccagatgacaaggccacggagaattgtgtgtgcattcttcataacctctcctaccagctggaggcagagctcccagagaaatattcccagaatatctatattcaaaaccggaatatccagactgacaacaacaaaagtattggatgttttggcagtcgaagcaggaaagtaaaagagcaataccaggacgtgccgatgccggaggaaaagagcaaccccaagggcgtggagtggctgtggcattccattgttataaggatgtatctgtccttgatcgccaaaagtgtccgcaactacacacaagaagcatccttaggagctctgcagaacctcacggccggaagtggaccaatgccgacatcagtggctcagacagttgtccagaaggaaagtggcctgcagcacacccgaaagatgctgcatgttggtgacccaagtgtgaaaaagacagccatctcgctgctgaggaatctgtcccggaatctttctctgcagaatgaaattgccaaagaaactctccctgatttggtttccatcattcctgacacagtcccgagtactgaccttctcattgaaactacagcctctgcctgttacacattgaacaacataatccaaaacagttaccagaatgcacgcgaccttctaaacaccgggggcatccagaaaattatggccattagtgcaggcgatgcctatgcctccaacaaagcaagtaaagctgcttccgtccttctgtattctctgtgggcacacacggaactgcatcatgcctacaagaaggctcagtttaagaagacagattttgtcaacagccggactgccaaagcctaccactcccttaaagactgaggaaaatgacaaagtattctcggctgcaaaaatccccaaaggaaaacacctatttttctactacccagcccaagaaacctcaaaagcatgccttgtttctatccttctctatttccgtggtcccctgaatccagaaaacaaatagaacataattttatgagtcttccagaagacctttgcaagtttgccaccagtagataccggccacaggctcgacaaatagtggtctttgttattagggcttatggtacatggcttcctggaatcaaaatgtgaattcatgtggaagggacattaatccaataaataaggaaagaagctgttgcattactgggattttaaaagtttgatttacatttatattccttttctggttcccatgttttgtcactcatgtgcacattgcttcgccattgggcctccagtgtattgttctgcagtgttgaaacagaatggaaatgacaagaaatatctgcagttatccaggagaaagtataatggcaaaattattggtttctttctttactttgtgcttgtttttatccccttgggttgtttttctctgatttttaaataaacttaagaaatttagattacagagtatgcatgactgtaagaaaaagaaattgagaggaagtgatcatagcaaattaaagaagtcttttcctcccagaacttaaagtaaaataaaaaataaataaataaataaaatcttttccacagagaaaggcaactgtgatgataaaatttaacgttcccccaaacactgagtcaatgagatttttctcaggagatactttacctataacaacgccgttaaatccaaatctcttctaaacgatggcattctatgtaatgcctttcctggacttttttggccactgccctggactagtgaaagaatggactctatctttatctgcaagaggaactaaggccttctctcagactgcctggccagcctggggcactgaaaatacggctcatgttaatgagttacattatcagccagcccagccttgcccaccatttaagaaatatcacagagccactagatctcatatgatcttcttcaagccattattttaactcaagaaaactctagagaagaaaagtgaagaagtcatgttgaagaagatgtaagaatgtgtcaagaccatccagaaatgatatgagaaatactgatattttaaatggttgacatcatccagcgaaatgaatctacattaaatgttgttttaactgcgctatgattaaaaccattcatatagagttagtctttacaactactattctgttatttttttttttaatctgacaacatttgtcctaagtaagataagcaaaaaaattcttcaactccttttggcaagaaaactgtaacagaaaataaattttgaatgtgtacttaagtctttattatatttgaagcaattttttttcaattttaaaagctgaatgaagacaacttaggttgctaacctagttcaaaatgaaattatttagataccaatttttaaaatactggagagaatttatatgtctttttccagagttctgatgataagca

SEQ ID NO: 22647 - DNA, 4302 bp, Homo sapiens
  source 1..4302: mol_type = unassigned DNA
ggggccggactcgagcggggcggggctcgcgccagcgcccccagctccgtggcggcttcgcccgcgagtccagaggcaggcgagcagctcggtcgcccccaccggccccatggcagcccccggcgccccagctgagtacggctacatccggaccgtcctgggccagcagatcctgggacaactggacagctccagcctggcgctgccctccgaggccaagctgaagctggcggggagcagcggccgcggcggccagacagtcaagagcctgcggatccaggagcaggtgcagcagaccctcgcccggaagggccgcagctccgtgggcaacggaaatcttcaccgaaccagcagtgttcctgagtatgtctacaacctacacttggttgaaaatgattttgttggaggccgttcccctgttcctaaaacctatgacatgctaaaggctggcacaactgccacttatgaaggtcgctggggaagaggaacagcacagtacagctcccagaagtccgtggaagaaaggtccttgaggcatcctctgaggagactggagatttctcctgacagcagcccggagagggctcactacacgcacagcgattaccagtacagccagagaagccaggctgggcacaccctgcaccaccaagaaagcaggcgggccgccctcctagtgccaccgagatatgctcgttccgagatcgtgggggtcagccgtgctggcaccacaagcaggcagcgccactttgacacataccacagacagtaccagcatggctctgttagcgacaccgtttttgacagcatccctgccaacccggccctgctcacgtaccccaggccagggaccagccgcagcatgggcaacctcttggagaaggagaactacctgacggcagggctcactgtcgggcaggtcaggccgctggtgcccctgcagcccgtcactcagaacagggcttccaggtcctcctggcatcagagctccttccacagcacccgcacgctgagggaagctgggcccagtgtcgccgtggattccagcgggaggagagcgcacttgactgtcggccaggcggccgcagggggaagtgggaatctgctcactgagagaagcactttcactgactcccagctggggaatgcagacatggagatgactctggagcgagcagtgagtatgctcgaggcagaccacatgctgccatccaggatttctgctgcagctactttcatacagcacgagtgcttccagaaatctgaagctcggaagagggttaaccagcttcgtggcatcctcaagcttctgcagctcctaaaagttcagaatgaagacgttcagcgagctgtgtgtggggccttgagaaacttagtatttgaagacaatgacaacaaattggaggtggctgaactaaatggggtacctcggctgctccaggtgctgaagcaaaccagagacttggagactaaaaaacaaataacaggtttgctgtggaatttgtcatctaatgacaaactcaagaatctcatgataacagaagcattgcttacgctgacggagaatatcatcatccccttttctgggtggcctgaaggagactacccaaaagcaaatggtttgctcgattttgacatattctacaacgtcactggatgcctaagaaacatgagttctgctggcgctgatgggagaaaagcgatgagaagatgtgacggactcattgactcactggtccattatgtcagaggaaccattgcagattaccagccagatgacaaggccacggagaattgtgtgtgcattcttcataacctctcctaccagctggaggcagagctcccagagaaatattcccagaatatctatattcaaaaccggaatatccagactgacaacaacaaaagtattggatgttttggcagtcgaagcaggaaagtaaaagagcaataccaggacgtgccgatgccggaggaaaagagcaaccccaagggcgtggagtggctgtggcattccattgttataaggatgtatctgtccttgatcgccaaaagtgtccgcaactacacacaagaagcatccttaggagctctgcagaacctcacggccggaagtggaccaatgccgacatcagtggctcagacagttgtccagaaggaaagtggcctgcagcacacccgaaagatgctgcatgttggtgacccaagtgtgaaaaagacagccatctcgctgctgaggaatctgtcccggaatctttctctgcagaatgaaattgccaaagaaactctccctgatttggtttccatcattcctgacacagtcccgagtactgaccttctcattgaaactacagcctctgcctgttacacattgaacaacataatccaaaacagttaccagaatgcacgcgaccttctaaacaccgggggcatccagaaaattatggccattagtgcaggcgatgcctatgcctccaacaaagcaagtaaagctgcttccgtccttctgtattctctgtgggcacacacggaactgcatcatgcctacaagaaggctcagtttaagaagacagattttgtcaacagccggactgccaaagcctaccactcccttaaagactgaggaaaatgacaaagtattctcggctgcaaaaatccccaaaggaaaacacctatttttctactacccagcccaagaaacctcaaaagcatgccttgtttctatccttctctatttccgtggtcccctgaatccagaaaacaaatagaacataattttatgagtcttccagaagacctttgcaagtttgccaccagtagataccggccacaggctcgacaaatagtggtctttgttattagggcttatggtacatggcttcctggaatcaaaatgtgaattcatgtggaagggacattaatccaataaataaggaaagaagctgttgcattactgggattttaaaagtttgatttacatttatattccttttctggttcccatgttttgtcactcatgtgcacattgcttcgccattgggcctccagtgtattgttctgcagtgttgaaacagaatggaaatgacaagaaatatctgcagttatccaggagaaagtataatggcaaaattattggtttctttctttactttgtgcttgtttttatccccttgggttgtttttctctgatttttaaataaacttaagaaatttagattacagagtatgcatgactgtaagaaaaagaaattgagaggaagtgatcatagcaaattaaagaagtcttttcctcccagaacttaaagtaaaataaaaaataaataaataaataaaatcttttccacagagaaaggcaactgtgatgataaaatttaacgttcccccaaacactgagtcaatgagatttttctcaggagatactttacctataacaacgccgttaaatccaaatctcttctaaacgatggcattctatgtaatgcctttcctggacttttttggccactgccctggactagtgaaagaatggactctatctttatctgcaagaggaactaaggccttctctcagactgcctggccagcctggggcactgaaaatacggctcatgttaatgagttacattatcagccagcccagccttgcccaccatttaagaaatatcacagagccactagatctcatatgatcttcttcaagccattattttaactcaagaaaactctagagaagaaaagtgaagaagtcatgttgaagaagatgtaagaatgtgtcaagaccatccagaaatgatatgagaaatactgatattttaaatggttgacatcatccagcgaaatgaatctacattaaatgttgttttaactgcgctatgattaaaaccattcatatagagttagtctttacaactactattctgttatttttttttttaatctgacaacatttgtcctaagtaagataagcaaaaaaattcttcaactccttttggcaagaaaactgtaacagaaaataaattttgaatgtgtacttaagtctttattatatttgaagcaattttttttcaattttaaaagctgaatgaagacaacttaggttgctaacctagttcaaaatgaaattatttagataccaatttttaaaatactggagagaatttatatgtctttttccagagttctgatgataagcatttggagtgcatttattcctccagataataaatgtgtgttcagaactttttgtgttttttaaggcattaataaagccttcgataatattaaatacaaaatgagaccaaa

SEQ ID NO: 22648 - DNA, 2644 bp, Homo sapiens
  source 1..2644: mol_type = unassigned DNA
atggcagcccccggcgccccagctgagtacggctacatccggaccgtcctgggccagcagatcctgggacaactggacagctccagcctggcgctgccctccgaggccaagctgaagctggcggggagcagcggccgcggcggccagacagtcaagagcctgcggatccaggagcaggtgcagcagaccctcgcccggaagggccgcagctccgtgggcaacggaaatcttcaccgaaccagcagtgttcctgagtatgtctacaacctacacttggttgaaaatgattttgttggaggccgttcccctgttcctaaaacctatgacatgctaaaggctggcacaactgccacttatgaaggtcgctggggaagaggaacagcacagtacagctcccagaagtccgtggaagaaaggtccttgaggcatcctctgaggagactggagatttctcctgacagcagcccggagagggctcactacacgcacagcgattaccagtacagccagagaagccaggctgggcacaccctgcaccaccaagaaagcaggcgggccgccctcctagtgccaccgagatatgctcgttccgagatcgtgggggtcagccgtgctggcaccacaagcaggcagcgccactttgacacataccacagacagtaccagcatggctctgttagcgacaccgtttttgacagcatccctgccaacccggccctgctcacgtaccccaggccagggaccagccgcagcatgggcaacctcttggagaaggagaactacctgacggcagggctcactgtcgggcaggtcaggccgctggtgcccctgcagcccgtcactcagaacagggcttccaggtcctcctggcatcagagctccttccacagcacccgcacgctgagggaagctgggcccagtgtcgccgtggattccagcgggaggagagcgcacttgactgtcggccaggcggccgcagggggaagtgggaatctgctcactgagagaagcactttcactgactcccagctggggaatgcagacatggagatgactctggagcgagcagtgagtatgctcgaggcagaccacatgctgccatccaggatttctgctgcagctactttcatacagcacgagtgcttccagaaatctgaagctcggaagagggttaaccagcttcgtggcatcctcaagcttctgcagctcctaaaagttcagaatgaagacgttcagcgagctgtgtgtggggccttgagaaacttagtatttgaagacaatgacaacaaattggaggtggctgaactaaatggggtacctcggctgctccaggtgctgaagcaaaccagagacttggagactaaaaaacaaataacagaccatacagtcaatttaagaagtaggaatggctggccgggcgcggtggctcacgcctgtaatcccagcactttgggaggccaaggcgggcggatcacgaggtcaggagttcgagaccagcctgaccaacatggtttgctgtggaatttgtcatctaatgacaaactcaagaatctcatgataacagaagcattgcttacgctgacggagaatatcatcatccccttttctgggtggcctgaaggagactacccaaaagcaaatggtttgctcgattttgacatattctacaacgtcactggatgcctaagaaacatgagttctgctggcgctgatgggagaaaagcgatgagaagatgtgacggactcattgactcactggtccattatgtcagaggaaccattgcagattaccagccagatgacaaggccacggagaattgtgtgtgcattcttcataacctctcctaccagctggaggcagagctcccagagaaatattcccagaatatctatattcaaaaccggaatatccagactgacaacaacaaaagtattggatgttttggcagtcgaagcaggaaagtaaaagagcaataccaggacgtgccgatgccggaggaaaagagcaaccccaagggcgtggagtggctgtggcattccattgttataaggatgtatctgtccttgatcgccaaaagtgtccgcaactacacacaagaagcatccttaggagctctgcagaacctcacggccggaagtggaccaatgccgacatcagtggctcagacagttgtccagaaggaaagtggcctgcagcacacccgaaagatgctgcatgttggtgacccaagtgtgaaaaagacagccatctcgctgctgaggaatctgtcccggaatctttctctgcagaatgaaattgccaaagaaactctccctgatttggtttccatcattcctgacacagtcccgagtactgaccttctcattgaaactacagcctctgcctgttacacattgaacaacataatccaaaacagttaccagaatgcacgcgaccttctaaaccgggggcatccagaaaattatggccattagtgcaggcgatgcctatgcctccaacaaagcaagtaaagctgcttccgtccttctgtattctctgtgggcacacacggaactgcatcatgcctacaagaaggctcagtttaagaagacagattttgtcaacagccggactgccaaagcctaccactcccttaaagactga

SEQ ID NO: 22649 - DNA, 2809 bp, Homo sapiens
  source 1..2809: mol_type = unassigned DNA
ggcctcgagggacaggacgtgaagatagttgggtttggaggcggccgccaggcccaggcccggtggacctgccgccatgcaggacggtaacttcctgctgtcggccctgcagcctgaggccggcgtgtgctccctggcgctgccctctgacctgcagctggaccgccggggcgccgaggggccggaggccgagcggctgcgggcagcccgcgtccaggagcaggtccgcgcccgcctcttgcagctgggacagcagccgcggcacaacggggccgctgagcccgagcctgaggccgagactgccagaggcacatccagggggcagtaccacaccctgcaggctggcttcagctctcgctctcagggcctgagtggggacaagacctcgggcttccggcccatcgccaagccggcctacagcccagcctcctggtcctcccgctccgccgtggatctgagctgcagtcggaggctgagttcagcccacaacgggggcagcgcctttggggccgctgggtacgggggtgcccagcccacccctcccatgcccaccaggcccgtgtccttccatgagcgcggtggggttgggagccgggccgactatgacacactctccctgcgctcgctgcggctggggcccgggggcctggacgaccgctacagcctggtgtctgagcagctggagcccgcggccacctccacctacagggcctttgcgtacgagcgccaggccagctccagctccagccgggcaggggggctggactggcccgaggccactgaggtttccccgagccggaccatccgtgcccctgccgtgcggaccctgcagcgattccagagcagccaccggagccgcggggtaggcggggcagtgccgggggccgtcctggagccagtggctcgagcgccatctgtgcgcagcctcagcctcagcctggctgactcgggccacctgccggacgtgcatgggttcaacagctacggtagccaccgaaccctgcagagactcagcagcggttttgatgacattgacctgccctcagcagtcaagtacctcatggcttcagaccccaacctgcaggtgctgggagcggcctacatccagcacaagtgctacagcgatgcagccgccaagaagcaggcccgcagccttcaggccgtgcctaggctggtgaagctcttcaaccacgccaaccaggaagtgcagcgccatgccacaggtgccatgcgcaacctcatctacgacaacgctgacaacaagctggccctggtggaggagaacgggatcttcgagctgctgcggacactgcgggagcaggatgatgagcttcgcaaaaatgtcacagggatcctgtggaacctttcatccagcgaccacctgaaggaccgcctggccagagacacgctggagcagctcacagacctggtgttgagccccctgtcgggggctgggggtccccccctcatccagcagaacgcctcggaggcagagatcttctacaacgccaccggcttcctcaggaacctcagctcagcctctcaggccactcgccagaagatgcgggagtgccacgggctggtggacgccctggtcacctctatcaaccacgccctggacgcgggcaaatgcgaggacaagagcgtggagaacgcggtgtgcgtcctgcggaacctgtcctaccgcctctacgacgagatgccgccgtccgcgctgcagcggctggagggtcgcggccgcagggacctggcgggggcgccgccgggagaggtcgtgggctgcttcacgccgcagagccggcggctgcgcgagctgcccctcgccgccgatgcgctcaccttcgcggaggtgtccaaggaccccaagggcctcgagtggctgtggagcccccagatcgtggggctgtacaaccggctgctgcagcgctgcgagctcaaccggcacacgacggaggcggccgccggggcgctgcagaacatcacggcaggcgaccgcaggtgggcgggggtgctgagccgcctggccctggagcaggagcgtattctgaaccccctgctagaccgtgtcaggaccgccgaccaccaccagctgcgctcactgactggcctcatccgaaacctgtctcggaacgctaggaacaaggacgagatgtccacgaaggtggtgagccacctgatcgagaagctgccgggcagcgtgggtgagaagtcgcccccagccgaggtgctggtcaacatcatagctgtgctcaacaacctggtggtggccagccccatcgctgcccgagacctgctgtattttgacggactccgaaagctcatcttcatcaagaagaagcgggacagccccgacagtgagaagtcctcccgggcagcatccagcctcctggccaacctgtggcagtacaacaagctccaccgtgacttccgggcgaagggctatcggaaggaggacttcctgggcccataggtgaagccttctggaggagaaggtgacgtggcccagcgtccaagggacagactcagctccaggctgcttggcagcccagcctggaggagaaggctaatgacggaggggcccctcgctggggcccctgtgtgcatctttgagggtcctgggccaccaggaggggcagggtcttatagctggggacttggcttccgcagggcagggggtggggcagggctcaaggctgctctggtgtatggggtggtgacccagtcacattggcagaggtgggggttggctgtggcctggcagtatcttgggatagccagcactgggaataaagatggccatgaacagtca

SEQ ID NO: 22650 - DNA, 823 bp, Homo sapiens
  source 1..823: mol_type = unassigned DNA
acagcattcagaaggaccccaggcgaggagtttgcctggcgtgatcctgagttgcctgaggtcattcacatgcttcagcaccagttcccatctgttcaggcaaatgcagcggcctacctgcagcacctgtgctttggtgacaacaaagtgaagatggaggtgtgtaggttagggggaatcaagcatctggttgaccttctggaccacagagttggaagttcagaagaatgcttgtggtgcccttcgaaacctcgtttttggcaagtctacagatgaaaataaaatagcaatgaagaatgttggtgggatacctgccttgttgcgactgttgagaaaatctattgatgcagaagtaagggagcttgttacaggagttctttggaatttatcctcatgtgatgctgtaaaaatgacaatcattcgagatgctctctcaaccttaacaaacactgtgattgttccacattctggatggaataactcttcttttgatgatgatcataaaattaaatttcagacttcactagttctgcgtaacacgacaggttgcctaaggaacctcagctccgcgggggaagaagctcggaagcaaatgcggtcctgcgaggggctggtagactcactgttgtatgtgatccacacgtgtgtgaacacatccgattacgacagcaagacggtggagaactgcgtgtgcaccctgaggaacctgtcctatcggctggagctggaggtgccccaggcccggttactgggactgaacgaattggatgacttactaggaaaagagtctcccagcaaagactctgagccaagttgctggggg

SEQ ID NO: 22651 - DNA, 5777 bp, Homo sapiens
  source 1..5777: mol_type = unassigned DNA
ggggcgggcagccgcgccgccgcggcacttttttaattttttcgggtgccgcagcggcgacccctcggcgccgatgtccctgatccctggagcgacgacggccgctgcctaagctggaaagaggaatgccagctcctgagcaggcctcattggtggaggaggggcaaccacagacccgccaggaagctgcctccactggcccaggcatggaacccgagaccacagccaccactattctagcatccgtgaaggagcaggagcttcagtttcagcgactcacccgagaactggaagtggaaaggcagattgttgccagtcagctagaaagatgtaggcttggagcagaatcaccaagcatcgccagcaccagctcaactgagaagtcatttccttggagatcaacagacgtgccaaatactggtgtaagcaaacctagagtttctgacgctgtccagcccaacaactatctcatcaggacagagccagaacaaggaaccctctattcaccagaacagacatctctccatgaaagtgagggatcattgggtaactcaagaagttcaacacaaatgaattcttattccgacagtggataccaggaagcagggagtttccacaacagccagaacgtgagcaaggcagacaacagacagcagcattcattcataggatcaactaacaaccatgtggtgaggaattcaagagctgaaggacaaacactggttcagccatcagtagccaatcgggccatgagaagagttagttcagttccatctagagcacagtctccttcttatgttatcagcacaggcgtgtctccttcaagggggtctctgagaacttctctgggtagtggatttggctctccgtcagtgaccgacccccgacctctgaaccccagtgcatattcctccaccacattacctgctgcacgggcagcctctccgtactcacagagacccgcctccccaacagctatacggcggattgggtcagtcacctcccggcagacctccaatcccaacggaccaacccctcaataccaaaccaccgccagagtggggtccccactgaccctgacggatgcacagactcgagtagcttccccatcccaaggccaggtggggtcgtcgtcccccaaacgctcagggatgaccgccgtaccacagcatctgggaccttcactgcaaaggactgttcatgacatggagcaattcggacagcagcagtatgacatttatgagaggatggttccacccaggccagacagcctgacaggcttacggagttcctatgctagtcagcatagtcagcttgggcaagaccttcgttctgccgtgtctcccgacttgcacattactcctatatatgaggggaggacctattacagcccagtgtaccgcagcccaaaccatggaactgtggagctccaaggatcgcagacggcgttgtatcgcacaggttcagtaggtattggaaatctacaaaggacatccagccaacgaagtacccttacataccaaagaaataattatgctctgaacacaacagctacctacgcggagccctacaggcctatacaataccgagtgcaagagtgcaattataacaggcttcagcatgcagtgccggctgatgatggcaccacaagatccccatcaatagacagcattcagaaggaccccagggagtttgcctggcgtgatcctgagttgcctgaggtcattcacatgcttcagcaccagttcccatctgttcaggcaaatgcagcggcctacctgcagcacctgtgctttggtgacaacaaagtgaagatggaggtgtgtaggttagggggaatcaagcatctggttgaccttctggaccacagagttttggaagttcagaagaatgcttgtggtgcccttcgaaacctcgtttttggcaagtctacagatgaaaataaaatagcaatgaagaatgttggtgggatacctgccttgttgcgactgttgagaaaatctattgatgcagaagtaagggagcttgttacaggagttctttggaatttatcctcatgtgatgctgtaaaaatgacaatcattcgagatgctctctcaaccttaacaaacactgtgattgttccacattctggatggaataactcttcttttgatgatgatcataaaattaaatttcagacttcactagttctgcgtaacacgacaggttgcctaaggaacctcagctccgcgggggaagaagctcggaagcaaatgcggtcctgcgaggggctggtagactcactgttgtatgtgatccacacgtgtgtgaacacatccgattacgacagcaagacggtggagaactgcgtgtgcaccctgaggaacctgtcctatcggctggagctggaggtgccccaggcccggttactgggactgaacgaattggatgacttactaggaaaagagtctcccagcaaagactctgagccaagttgctgggggaagaagaagaaaaagaaaaagaggactccgcaagaagatcaatgggatggagttggtcctatcccaggactgtcgaagtcccccaaaggggttgagatgctgtggcacccatcggtggtaaaaccatatctgactcttctagcagaaagttccaacccagccaccttggaaggctctgcagggtctctccagaacctctctgctggcaactggaagtttgcagcatatatccgggcggccgtccgaaaagaaaaggggctccccatccttgtggagcttctgagaatggataacgatagagttgtttcttccgtggcaacagccttgaggaatatggcactagatgttcgcaacaaggagctcataggcaaatacgccatgcgagacctggtcaaccggctccccggcggcaatggccccagtgtcttgtctgatgagaccatggcagccatctgctgtgctctgcacgaggtcaccagcaaaaacatggagaacgcaaaagccctggccgactcaggaggcatagagaagctggtgaacataaccaaaggcaggggcgacagatcatctctgaaagtggtgaaggcagcagcccaggtcttgaatacattatggcaatatcgggacctccggagcatttataaaaaggatgggtggaatcagaaccattttattacacctgtgtcgacattggagcgagaccgattcaaatcacatccttccttgtctaccaccaaccaacagatgtcacccatcattcagtcaggctccagcaaaccttcaccaatttacatcagttcctattcctcaccagcaagagaacaaaatagacggctacagcatcaacagctgtattatagtcaagatgactccaacagaaagaactttgatgcatacagattgtatttgcagtctcctcatagctatgaagatccttattttgatgaccgagttcactttccagcttctactgattactcaacacagtatggactgaaatcgaccacaaattatgtagacttttattccactaaacgaccttcttatagagcagaacagtacccagggtccccagactcatgggtgtagcatcaagatgcccaacagaggaactctttctttctaaccttgttcagattgaggtgaaaagtccatcttgctgatttgatgattgaaatgtgaaagtgaagtggaaggaatgaatgaagtgtgttttttttttcttttttgaggaattatcagggaagtgaggaaatgtttgggagaggactttctaagctctatttaggtgttagatctaattacttatagattctgtagtctggtgaaggtgtgggtgacgtgatgagaggtttgagaaatgggtgaaatgaaatgggggatatgtaggtcaaatcaaattaaagatgatttttttaatgtgaataaagttatgttctgatagtttgtacagaaaaaataaaatggatgcccatgttttattgctattactaaatgtcaagattgtatgctattatgtcttgtaaatttcttttgttggtgtaaatatggaaatgccacattggttaagtgccatcatttgtaatgcaatgtgtcacttgaaaagagatttgaagaaactgacaacttcaaaaacaaatgagaagcccaaggaactgtgagcaattaaaagcaaaccgcgacaccctttgtctccaccacacatagtgtactttggaagcacaacgtccaggctggtaccgcagcgccatgcccattcctcgcctcattcataggacacttcactgccattttctattcacataaaagaaaaataaatgtggaaatttcatccttggaaatgtgttctctattctttttaaattttctgtatgtatatggaaaagcagatttaataaacacaaatctaactgcatgttggaaacagcttaaatatatccaactattttggacttttcctagttttatatatactttgtgagatggaccacaccaaagaattaagctatgaactttccttctctgacaatctaggtatttttatttcttggaatctatttcaaatctagtacccttcacagttttatcatgtttttctatatggcagcccggccataactaaattgatataactaaattgataccttttttaggcatcatttttaagaactcagtaacttcataagaacagtggttgggcatttatttggttggcaccaatataataaaacaaattctaaattatgatcttgttgagtaattcctggattaggaatggggtaggggaaagaagccccacagtagggtaggcagaggtccccatagcaccacacagcattacttgggagcttttctccatctgtggaggcaatgagggacaccaggcccaaagtctgaggccttctcaggtcttgcagtttccacccttcagtcctagctcctggatctttgttggtgtaaatatggaaatgccacattggttaagtgccatcatggaaaactaggaactagtttacctgtagctgtactaggaaaactaggaactaacgcccatggcaagtcaaacccagaagtgttgtcttagctcaatataccctgcaagtgtaatacaaatcgcagattaaaacatttgtacttatatttgtgagtatatggaaagacacccaagagaaaactgcgttttcttgccgaatggacagcagcccaagatgagcatccaaagtgaaatggaaataccagtgcgagcatgaaagttcctaagatctgcaagccgggagcccttctggggtgccttctgaagaacactcgagccagcttgcggagtcgactgcccagctactgagccctggctgcctcatacctggcggagctcagcagacagcccttgttagatggcagaggtcgccagatgttcctgaggaactggcatcaggacttctgggacgtaaccacttcagtttccaatcactgacttccctgaacctggtatcttcagatctgggttgaagctgaaggctcagttggggaatcaggaaaacaagggaatcggagccagcccaagccaactgacaataactttcttttagtgactgcattagtttggggtaatgctgtaacaggcagcatttcaaaaacggatccaaatttgggttgaaaataactcacctgggtctccaatcagacctaacagagccagaaagaggcctgtacacggggactgggcagaagatctaatgccgtttaagactcctcccttgagaccagagaaaagaaactgcagacacagcctga

SEQ ID NO: 22652 - DNA, 4443 bp, Homo sapiens
  source 1..4443: mol_type = unassigned DNA
gcgccgccgcggcacttttttaattttttcgggtgccgcagcggcgacccctcggcgccgatgtccctgatccctggagcgacgacggccgctgcctaagctggaaagaggaatgccagctcctgagcaggcctcattggtggaggaggggcaaccacagacccgccaggaagctgcctccactggcccaggcatggaacccgagaccacagccaccactattctagcatccgtgaaggagcaggagcttcagtttcagcgactcacccgagaactggaagtggaaaggcagattgttgccagtcagctagaaagatgtaggcttggagcagaatcaccaagcatcgccagcaccagctcaactgagaagtcatttccttggagatcaacagacgtgccaaatactggtgtaagcaaacctagagtttctgacgctgtccagcccaacaactatctcatcaggacagagccagaacaaggaaccctctattcaccagaacagacatctctccatgaaagtgagggatcattgggtaactcaagaagttcaacacaaatgaattcttattccgacagtggataccaggaagcagggagtttccacaacagccagaacgtgagcaaggcagacaacagacagcagcattcattcataggatcaactaacaaccatgtggtgaggaattcaagagctgaaggacaaacactggttcagccatcagtagccaatcgggccatgagaagagttagttcagttccatctagagcacagtctccttcttatgttatcagcacaggcgtgtctccttcaagggggtctctgagaacttctctgggtagtggatttggctctccgtcagtgaccgacccccgacctctgaaccccagtgcatattcctccaccacattacctgctgcacgggcagcctctccgtactcacagagacccgcctccccaacagctatacggcggattgggtcagtcacctcccggcagacctccaatcccaacggaccaacccctcaataccaaaccaccgccagagtggggtccccactgaccctgacggatgcacagactcgagtagcttccccatcccaaggccaggtggggtcgtcgtcccccaaacgctcagggatgaccgccgtaccacagcatctgggaccttcactgcaaaggactgttcatgacatggagcaattcggacagcagcagtatgacatttatgagaggatggttccacccaggccagacagcctgacaggcttacggagttcctatgctagtcagcatagtcagcttgggcaagaccttcgttctgccgtgtctcccgacttgcacattactcctatatatgaggggaggacctattacagcccagtgtaccgcagcccaaaccatggaactgtggagctccaaggatcgcagacggcgttgtatcgcacaggttcagtaggtattggaaatctacaaaggacatccagccaacgaagtacccttacataccaaagaaataattatgctctgaacacaacagctacctacgcggagccctacaggcctatacaataccgagtgcaagagtgcaattataacaggcttcagcatgcagtgccggctgatgatggcaccacaagatccccatcaatagacagcattcagaaggaccccagggagtttgcctggcgtgatcctgagttgcctgaggtcattcacatgcttcagcaccagttcccatctgttcaggcaaatgcagcggcctacctgcagcacctgtgctttggtgacaacaaagtgaagatggaggtgtgtaggttagggggaatcaagcatctggttgaccttctggaccacagagttttggaagttcagaagaatgcttgtggtgcccttcgaaacctcgtttttggcaagtctacagatgaaaataaaatagcaatgaagaatgttggtgggatacctgccttgttgcgactgttgagaaaatctattgatgcagaagtaagggagcttgttacaggagttctttggaatttatcctcatgtgatgctgtaaaaatgacaatcattcgagatgctctctcaaccttaacaaacactgtgattgttccacattctggatggaataactcttcttttgatgatgatcataaaattaaatttcagacttcactagttctgcgtaacacgacaggttgcctaaggaacctcagctccgcgggggaagaagctcggaagcaaatgcggtcctgcgaggggctggtagactcactgttgtatgtgatccacacgtgtgtgaacacatccgattacgacagcaagacggtggagaactgcgtgtgcaccctgaggaacctgtcctatcggctggagctggaggtgccccaggcccggttactgggactgaacgaattggatgacttactaggaaaagagtctcccagcaaagactctgagccaagttgctgggggaagaagaagaaaaagaaaaagaggactccgcaagaagatcaatgggatggagttggtcctatcccaggactgtcgaagtcccccaaaggggttgagatgctgtggcacccatcggtggtaaaaccatatctgactcttctagcagaaagttccaacccagccaccttggaaggctctgcagggtctctccagaacctctctgctggcaactggaagtttgcagcatatatccgggcggccgtccgaaaagaaaaggggctccccatccttgtggagcttctgagaatggataacgatagagttgtttcttccgtggcaacagccttgaggaatatggcactagatgttcgcaacaaggagctcataggcaaatacgccatgcgagacctggtcaaccggctccccggcggcaatggccccagtgtcttgtctgatgagaccatggcagccatctgctgtgctctgcacgaggtcaccagcaaaaacatggagaacgcaaaagccctggccgactcaggaggcatagagaagctggtgaacataaccaaaggcaggggcgacagatcatctctgaaagtggtgaaggcagcagcccaggtcttgaatacattatggcaatatcgggacctccggagcatttataaaaaggatgggtggaatcagaaccattttattacacctgtgtcgacattggagcgagaccgattcaaatcacatccttccttgtctaccaccaaccaacagatgtcacccatcattcagtcagtcggcagcacctcttcctcaccagcactgttaggaatcagagaccctcgctctgaatacgataggacccagccacctatgcagtattacaatagccaaggggatgccacacataaaggcctgtaccctggctccagcaaaccttcaccaatttacatcagttcctattcctcaccagcaagagaacaaaatagacggctacagcatcaacagctgtattatagtcaagatgactccaacagaaagaactttgatgcatacagattgtatttgcagtctcctcatagctatgaagatccttattttgatgaccgagttcactttccagcttctactgattactcaacacagtatggactgaaatcgaccacaaattatgtagacttttattccactaaacgaccttcttatagagcagaacagtacccagggtccccagactcatgggtgtagcatcaagatgcccaacagaggaactctttctttctaaccttgttcagattgaggtgaaaagtccatcttgctgatttgatgattgaaatgtgaaagtgaagtggaaggaatgaatgaagtgtgttttttttttcttttttgaggaattatcagggaagtgaggaaatgtttgggagaggactttctaagctctatttaggtgttagatctaattacttatagattctgtagtctggtgaaggtgtgggtgacgtgatgagaggtttgagaaatgggtgaaatgaaatgggggatatgtaggtcaaatcaaattaaagatgatttttttaatgtgaataaagttatgttctgatagtttgtacagaaaaaataaaatggatgcccatgttttattgctattactaaatgtcaagattgtatgctattatgtcttgtaaatttcttttgttggtgtaaatatggaaatgccacattggttaagtgccatcatttgtaatgcaatgtgtcacttgaaaagagatttgaagaaactgacaacttcaaaaacaaatgagaagcccaaggaactgtgagcaattaaaagcaaaccgcgacaccctttgtctccaccacacatagtgtactttggaagcacaacgtccaggctggtaccgcagcgccatgcccattcctcgcctcattcataggacacttcactgccattttctattcacataaaagaaaaataaatgtggaaatttcatccttggaaa

SEQ ID NO: 22653 - DNA, 4581 bp, Homo sapiens
  source 1..4581: mol_type = unassigned DNA
tccggggctgagtccgcgtcgacgccggccgcggaggcggcaccatgggcaaggggtagaggggcaagttggccaccgccgccgccgggggtggtgggagagccgctccgggggcgggggccggtgggggagggaggggcgggcagccgcgccgccgcggcacttttttaattttttcgggtgccgcagcggcgacccctcggcgccgatgtccctgatccctggagcgacgacggccgctgcctaagctggaaagaggaatgccagctcctgagcaggcctcattggtggaggaggggcaaccacagacccgccaggaagctgcctccactggcccaggcatggaacccgagaccacagccaccactattctagcatccgtgaaggagcaggagcttcagtttcagcgactcacccgagaactggaagtggaaaggcagattgttgccagtcagctagaaagatgtaggcttggagcagaatcaccaagcatcgccagcaccagctcaactgagaagtcatttccttggagatcaacagacgtgccaaatactggtgtaagcaaacctagagtttctgacgctgtccagcccaacaactatctcatcaggacagagccagaacaaggaaccctctattcaccagaacagacatctctccatgaaagtgagggatcattgggtaactcaagaagttcaacacaaatgaattcttattccgacagtggataccaggaagcagggagtttccacaacagccagaacgtgagcaaggcagacaacagacagcagcattcattcataggatcaactaacaaccatgtggtgaggaattcaagagctgaaggacaaacactggttcagccatcagtagccaatcgggccatgagaagagttagttcagttccatctagagcacagtctccttcttatgttatcagcacaggcgtgtctccttcaagggggtctctgagaacttctctgggtagtggatttggctctccgtcagtgaccgacccccgacctctgaaccccagtgcatattcctccaccacattacctgctgcacgggcagcctctccgtactcacagagacccgcctccccaacagctatacggcggattgggtcagtcacctcccggcagacctccaatcccaacggaccaacccctcaataccaaaccaccgccagagtggggtccccactgaccctgacggatgcacagactcgagtagcttccccatcccaaggccaggtggggtcgtcgtcccccaaacgctcagggatgaccgccgtaccacagcatctgggaccttcactgcaaaggactgttcatgacatggagcaattcggacagcagcagtatgacatttatgagaggatggttccacccaggccagacagcctgacagcttacggagttcctatgctagtcagcatagtcagcttgggcaagaccttcgttctgccgtgtcccgacttgcacattactcctatatatgaggggaggacctattacagcccagtgtaccgcagcccaaaccatggaactgtggagctccaaggatcgcagacggcgttgtatcgcacaggttcagtaggtattggaaatctacaaaggacatccagccaacgaagtacccttacataccaaagaaataattatgctctgaacacaacagctacctacgcggagccctacaggcctatacaataccgagtgcaagagtgcaattataacaggcttcagcatgcagtgccggctgatgatggcaccacaagatccccatcaatagacagcattcagaaggaccccagggagtttgcctggcgtgatcctgagttgcctgaggtcattcacatgcttcagcaccagttcccatctgttcaggcaaatgcagcggcctacctgcagcacctgtgctttggtgacaacaaagtgaagatggaggtgtgtaggttagggggaatcaagcatctggttgaccttctggaccacagagttttggaagttcagaagaatgcttgtggtgcccttcgaaacctcgtttttggcaagtctacagatgaaaataaaatagcaatgaagaatgttggtgggatacctgccttgttgcgactgttgagaaaatctattgatgcagaagtaagggagcttgttacaggagttctttggaatttatcctcatgtgatgctgtaaaaatgacaatcattcgagatgctctctcaaccttaacaaacactgtgattgttccacattctggatggaataactcttcttttgatgatgatcataaaattaaatttcagacttcactagttctgcgtaacacgacaggttgcctaaggaacctcagctccgcgggggaagaagctcggaagcaaatgcggtcctgcgaggggctggtagactcactgttgtatgtgatccacacgtgtgtgaacacatccgattacgacagcaagacggtggagaactgcgtgtgcaccctgaggaacctgatcggctggagctggaggtgccccaggcccggttactgggactgaacgaattggatgacttactaggaaaagagtctcccagcaaagactctgagccaagttgctgggggaagaagaagaaaaagaaaaagaggactccgcaagaagatcaatgggatggagttggtcctatcccaggactgtcgaagtcccccaaaggggttgagatgctgtggcacccatcggtggtaaaaccatatctgactcttctagcagaaagttccaacccagccaccttggaaggctctgcagggtctctccagaacctctctgctggcaactggaagtttgcagcatatatccgggcggccgtccgaaaagaaaaggggctccccatccttgtggagcttctgagaatggataacgatagagttgtttcttccgtggcaacagccttgaggaatatggcactagatgttcgcaacaaggagctcataggcaaatacgccatgcgagacctggtcaaccggctccccggcggcaatggccccagtgtcttgtctgatgagaccatggcagccatctgctgtgctctgcacgaggtcaccagcaaaaacatggagaacgcaaaagccctggccgactcaggaggcatagagaagctggtgaacataaccaaaggcaggggcgacagatcatctctgaaagtggtgaaggcagcagcccaggtcttgaatacattatggcaatatcgggacctccggagcatttataaaaaggatgggtggaatcagaaccattttattacacctgtgtcgacattggagcgagaccgattcaaatcacatccttccttgtctaccaccaaccaacagatgtcacccatcattcagtcagtcggcagcacctcttcctcaccagcactgttaggaatcagagaccctcgctctgaatacgataggacccagccacctatgcagtattacaatagccaaggggatgccacacataaaggcctgtaccctggctccagcaaaccttcaccaatttacatcagttcctattcctcaccagcaagagaacaaaatagacggctacagcatcaacagctgtattatagtcaagatgactccaacagaaagaactttgatgcatacagattgtatttgcagtctcctcatagctatgaagatccttattttgatgaccgagttcactttccagcttctactgattactcaacacagtatggactgaaatcgaccacaaattatgtagacttttattccactaaacgaccttcttatagagcagaacagtacccagggtccccagactcatgggtgtagcatcaagatgcccaacagaggaactctttctttctaaccttgttcagattgaggtgaaaagtccatcttgctgatttgatgattgaaatgtgaaagtgaagtggaaggaatgaatgaagtgtgttttttttttcttttttgaggaattatcagggaagtgaggaaatgtttgggagaggactttctaagctctatttaggtgttagatctaattacttatagattctgtagtctggtgaaggtgtgggtgacgtgatgagaggtttgagaaatgggtgaaatgaaatgggggatatgtaggtcaaatcaaattaaagatgatttttttaatgtgaataaagttatgttctgatagtttgtacagaaaaaataaaatggatgcccatgttttattgctattactaaatgtcaagattgtatgctattatgtcttgtaaatttcttttgttggtgtaaatatggaaatgccacattggttaagtgccatcatttgtaatgcaatgtgtcacttgaaaagagatttgaagaaactgacaacttcaaaaacaaatgagaagcccaaggaactgtgagcaattaaaagcaaaccgcgacaccctttgtctccaccacacatagtgtactttggaagcacaacgtccaggctggtaccgcagcgccatgcccattcctcgcctcattcataggacacttcactgccattttctattcacataaaagaaaaataaatgtggaaatttcatccttgg

SEQ ID NO: 22654 - DNA, 2287 bp, Homo sapiens
  source 1..2287: mol_type = unassigned DNA
gcaggcctggtggtgagcagggacggtgcaccggacggcgggatcgagcaaatgggtctggccatggagcacggagggtcctacgctcgggcggggggcagctctcggggctgctggtattacctgcgctacttcttcctcttcgtctccctcatccaattcctcatcatcctggggctcgtgctcttcatggtctatggcaacgtgcacgtgagcacagagtccaacctgcaggccaccgagcgccgagccgagggcctatacagtcagctcctagggctcacggcctcccagtccaacttgaccaaggagctcaacttcaccacccgcgccaaggatgccatcatgcagatgtggctgaatgctcgccgcgacctggaccgcatcaatgccagcttccgccagtgccagggtgaccgggtcatctacacgaacaatcagaggtacatggctgccatcatcttgagtgagaagcaatgcagagatcaattcaaggacatgaacaagagctgcgatgccttgctcttcatgctgaatcagaaggtgaagacgctggaggtggagatagccaaggagaagaccatttgcactaaggataaggaaagcgtgctgctgaacaaacgcgtggcggaggaacagctggttgaatgcgtgaaaacccgggagctgcagcaccaagagcgccagctggccaaggagcaactgcaaaaggtgcaagccctctgcctgcccctggacaaggacaagtttgagatggaccttcgtaacctgtggagggactccattatcccacgcagcctggacaacctgggttacaacctctaccatcccctgggctcggaattggcctccatccgcagagcctgcgaccacatgcccagcctcatgagctccaaggtggaggagctggcccggagcctccgggcggatatcgaacgcgtggcccgcgagaactcagacctccaacgccagaagctggaagcccagcagggcctgcgggccagtcaggaggcgaaacagaaggtggagaaggaggctcaggcccgggaggccaagctccaagctgaatgctcccggcagacccagctagcgctggaggagaaggcggtgctgcggaaggaacgagacaacctggccaaggagctggaagagaagaagagggaggcggagcagctcaggatggagctggccatcagaaactcagccctggacacctgcatcaagaccaagtcgcagccgatgatgccagtgtcaaggcccatgggccctgtccccaacccccagcccatcgacccagctagcctggaggagttcaagaggaagatcctggagtcccagaggccccctgcaggcatccctgtagccccatccagtggctgaggaggctccaggcctgaggaccaagggatggcccgactcggcggtttgcggaggatgcagggatatgctcacagcgcccgacacaaccccctcccgccgcccccaaccacccagggccaccatcagacaactccctgcatgcaaacccctagtaccctctcacacccgcacccgcgcctcacgatccctcacccagagcacacggccgcggagatgacgtcacgcaagcaacggcgctgacgtcacatatcaccgtggtgatggcgtcacgtggccatgtagacgtcacgaagagatatagcgatggcgtcgtgcagatgcagcacgtcgcacacagacatggggaacttggcatgacgtcacaccgagatgcagcaacgacgtcacgggccatgtcgacgtcacacatattaatgtcacacagacgcggcgatggcatcacacagacggtgatgatgtcacacacagacacagtgacaacacacaccatgacaacgacacctatagatatggcaccaacatcacatgcacgcatgccctttcacacacactttctacccaattctcacctagtgtcacgttcccccgaccctggcacacgggccaaggtacccacaggatcccatcccctcccgcacagccctgggccccagcacctcccctcctccagcctcctggcctcccagccacttcctcacccccagtgcctggacccggaggtgagaacaggaagccattcacctccgctccttgagcgtgagtgtttccaggaccccctcggggccctgagccgggggtgagggtcacctgttgtcgggaggggagccactccttctcccccaactcccagccctgcctgtggcccgttgaaatgttggtggcacttaataaatattagtaaatcctt

SEQ ID NO: 22655 - DNA, 1169 bp, Homo sapiens
  source 1..1169: mol_type = unassigned DNA
actctcatgtaagtcaacaacatcctgggattgggacacactttctgggcactgctggccagtcccaaaatggaacataaggaagtggttcttctacttcttttatttctgaaatcaggtcaaggagagcccctggatgactatgtgaatacccaggggccttcactgttcagtgtcactaagaagcagctgggggcaggaagcagagaagaatgtgcagcaaaatgtgaagaggacaaagaattcacctgcagggcattccaatatcacagtaaagagcaacaatgtgtgataatggctgaaaacaggaagtcctccataatcattaggatgagagatgcagttttatttgaaaagtaaatgtatctttcagagtgcaagactgggaatggaaagaactacagagggacgatgtccaaaacaaaaaatggcatcacctgtcaaaaatggagttccacttctccccgcaaacctaggtcagacttttcctttcatctttgtgttcatctactgtaaagtgtccgtctgtgtctgtgagggattggttccaggacccctgtggctaccaaaatccatgcttctcaagtcccttatgtaaaatggtgcagtatttgcatataacctacataccttctcttgtgcaatccctaatataatgtaaatgctatgtaatcgttgttatactgtattgtttttatttgtattatgttttattgtcatattgttattttctctcatctttttcaagtcttttccatccacagttggttgaatttgtggatgtggaacccatggatacagagggccaactgtatttaggataatttcatcacttttaattcaaaccagaatatgtgaataagcagacagaaagaatctttttgatgtcgatgttcaactatttttggcaccatagtagaacatggttgctttctattttttcttgggtatggaggtttcttgaagacctagaacatagaagaatgcctagttaaaaaaaaaaatcaatgaaactacgagttttaggccaaatctgagaaaagaccaaagatgactatgtttgggactgaagtaaacatatcaagttagaactctcatcacatgtttgactcaaattgtggagcaaaatagtaaataaaatataaaaatgaaaatgaagatacgtgaaa

SEQ ID NO: 22656 - DNA, 960 bp, Homo sapiens
  source 1..960: mol_type = unassigned DNA
actctcatgtaagtcaacaacatcctgggattgggacacactttctgggcactgctggccagtcccaaaatggaacataaggaagtggttcttctacttcttttatttctgaaatcaggtcaaggagagcccctggatgactatgtgaatacccaggggccttcactgttcagtgtcactaagaagcagctgggggcaggaagcagagaagaatgtgcagcaaaatgtgaagaggacaaagaattcacctgcagggcattccaatatcacagtaaagagcaacaatgtgtgataatggctgaaaacaggaagtcctccataatcattaggatgagagatgcagttttatttgaaaagtaaaggctgcaatcaagatgttggcatggctggggtctcatctgaaggctggactggagaagaatctacttccaaacttatgtggtagttggaagaatttagttcctcaaggctgctaaactgatggcctgtgttccttgcctctgggatggtagcttgcttcaacaaagtgtgcaagcagagaagacagagagagtccgctagcaagatagaagccacaatctcttgtaatctatcatttttgctgtattctactggttaaaaataactcattaggttagcctactggctctcagggggaagagattatacaaaggcatgaatttctggaggagggaatgagggcaaagaactctgaaaagtttctcttccacaatctgaagaacttctagaaagtagaaggaagcaatattgcttagggatggacaacttggcactggttatgtgttccaagtgaggtaaccttgttcccaggaataaagagaaccagatgactgtaaacatttccctaaactgaaatgcactgttgtatgttcacctgaaatgaatggtgtaagctgaatatgagatttttgacaaaataaaaattttgctgtgttctca

SEQ ID NO: 22657 - DNA, 553 bp, Homo sapiens
  source 1..553: mol_type = unassigned DNA
actctcatgtaagtcaacaacatcctgggattgggacacactttctgggcactgctggccagtcccaaaatggaacataaggaagtggttcttctacttcttttatttctgaaatcaggtcaaggagagcccctggatgactatgtgaatacccaggggccttcactgttcagtgtcactaagaagcagctgggggcaggaagcagagaagaatgtgcagcaaaatgtgaagaggacaaagaattcacctgcagggcattccaatatcacagtaaagagcaacaatgtgtgataatggctgaaaacaggaagtcctccataatcattaggatgagagatgcagttttatttgaaaagtaaatgtatctttcagagtgcaagactgggaatggaaagaactacagagggacgatgtccaaaacaaaaaatggcatcacctgtcaaaaatggagttccacttctccccgcaaacctagattctcacctgctacacacccctcagagggactggaggaatccagacaacgatgcgcaggggccctggtgctatact

SEQ ID NO: 22658 - DNA, 1512 bp, Homo sapiens
  source 1..1512: mol_type = unassigned DNA
caggctcccagccccgacgcctcctgcagcgcctggagccacacagggatccggagcctgggggaaaagcggcgcgggagccggcacccaccgctggaggggcggcgacggcggccgtagcgacctcgggaggcaagcggagccgccatggccgagttcccgtcgaaagttagcacgcggaccagcagtcctgcgcagggcgccgaagcctcggtgtcggcgctgcgcccggacctgggcttcgtgcgctcccgcctcggggcgctcatgctgctgcagctggtgctggggctgctggtgtgggcgctgattgcggacaccccgtaccacctgtatccggcctatggctgggtgatgttcgtcgctgtcttcctctggctggtgacaatcgtcctcttcaacctctacctgtttcagctgcacatgaagttgtacatggttccctggccactggtgttaatgatctttaacatcagcgccaccgttctctacatcaccgccttcatcgcctgctctgcggcagttgacctgacatccctgaggggcacccggccttataaccagcgcgcggctgcctcgttctttgcgtgtttggtgatgatcgcctatggagtgagtgccttcttcagctaccaggcctggcgaggagtaggcagcaatgcggccaccagtcagatggctggcggctatgcctaaaccacctgtgccacggccccctctggggctgaagccgccgctgggtcacagagcagggtcaccctgcaagcctgaagctggggagccctgcgtggagtcagcccaacagggactgcatttgctcctctctgcccgtcagacataagctctcacagcgctaaggaagcaggcccaggctggcaggcatctcggcttgcaggaggccaactgctgagacctcttctccatcccccttattcagtggaagatgacgggggatctgaggctgtgtctctgccttgtctttagaggacttcagcgtccaagactggggcccacccttctcaccagcactaaatgcactaacaaggactccagacctgcagccccagacccgccgtagtataagcctaacaagcaacacgtagcaccttagtctttgttccaggagagctgagcaagctggtgaaaccactctccttcctttaaacaccgtttcaaccaacctctccctggagccaacctgtaaaaagtgggttgattgctgacagcatggtcttccctccctgcatttcagacataccagttactgaaagcaaatcagttttaagtgatttctcagtgctgaaaagcctgtccaggtttccttccctttcccaagcctctctctgtaatactccctttgggcgaagctaacatcggtgcctccccgaccttgctgactaggcacatgggacgcaaaggagggagggaagcaaggccttgcctggcgagttgtcatgtggttggtggtgactgttttattttttttaataaaaataaagatgagagaaatta

SEQ ID NO: 22659 - DNA, 3755 bp, Homo sapiens
  source 1..3755: mol_type = unassigned DNA
atcaagattaatatctgtagtaataggcagaacacttcagtgtggaattgcttcttttctttggtcaaacactaactttggcagaggatagacacagcttaggaagactgaattttaagtcttctgaattgtttttctggacttccaaatctcaagtgataagaccagcagaagcagatataaagacctgaagatagtcttttctgtccaaagatggaaaacagtactactaccatttctcgggaggagcttgaagaactacaagaggcatttaataaaatagatattgacaatagtgggtatgtcagtgactatgaacttcaagacctgtttaaggaagcaagccttcctctgcctggctacaaggtgcgcgagattgtggagaaaattctatcagttgctgacagcaacaaagatggcaaaatcagttttgaagagtttgtgtcactaatgcaagaattaaaaagcaaagatatcagcaaaacattccgaaaaataattaacaagagggaagggattactgctattggaggaacttcaactatttccagtgagggcacacagcattcttattcagaggaagaaaaagtggcttttgttaactggataaacaaagccctggagaatgaccctgactgtaagcatcttatacccatgaatcccaatgatgatagtcttttcaagtcacttgcagatggcatccttctttgcaaaatgatcaacttatctgaaccagatacaattgatgaaagagccatcaataagaaaaagctcacgccattcactatttctgaaaatttaaacctagctctgaattctgcctcagccattggttgtacagtggtcaacattggtgcatcagatctcaaagaaggaaaacctcacttggtcttgggacttctctggcagatcatcaaagttggcctttttgctgatattgagatttccaggaatgaagctctgattgcattgttaaatgaaggtgaggaactagaggagctgatgaagctttctcccgaggaattactgctgcgatgggtgaactaccatctgaccaatgcaggatggcataccatcagcaacttcagccaagacattaaggactcgagagcctattttcatctgcttaatcagattgcccctaaaggtggggaagatggacctgccattgccattgacctttcaggaattaatgagacaaatgacctgaagcgtgctggactcatgcttcaagaagcagataaactgggctgcaaacagtttgttactcctgcagatgtggtttcaggcaatcctaaacttaatttagcttttgtagctaatttgtttaacacatacccgtgcctgcacaagccgaataataatgacatcgatatgaatttactggaaggagagagcaaggaagagagaacatttcggaactggatgaattccttgggagtcaacccatacattaatcatttgtacagtgaccttgcagatgctttagtgatctttcagctctatgagatgatccgagtgccagtcaactggagccatgtcaacaaacctccttatcctgcccttggagggaacatgaagaagattgaaaactgtaactatgcagtggaacttgggaagaacaaggccaaattctccttggttggcattgctgggcaggacctaaatgaagggaattcaacacttaccctggcattggtatggcagctgatgagaaggtacacattgaatgtgttatcggatcttggagagggtgaaaaagtaaatgatgaaattataattaaatgggtcaatcagactcttaaaagtgcaaacaaaaagacttctatttccagcttcaaggataaatctataagcacaagtttacctgtcctagatttaatagatgccattgcaccaaatgcagttcgtcaagaaatgatcaggagagaaaacttatctgatgaggacaagctgaacaatgctaaatacgccatttcagttgctcgaaagatcggtgcccggatatatgcattacctgatgacctcgtagaagtgaaaccaaagatggttatgacggtgtttgcatgcttaatgggaaaaggactgaacagaataaaataatcatttcatatgattttctgccacattaaacatattgtatgcctcacagtttacaggattctgaaatgtagtgggtgtaaaaccagagattatttgtatgctcaaaatagttatatattcattaatgaattcaatatcctgttcatactagttagagctggtcagcctttttgggtaacacagttaatttaccaactgatacagataatagaatatattcataatcaagctgatacttcatgattaaattatttttgttgcttaaaagtcgtattagacaagactaaatcattcttttttatggttcaaaaaagatgaatacaaacgtttttgcaggttctgctgtgaaatgtggtttgatttttttggtgtgttaattttgatcataaatgcattcatactcataatccagtttaatccttttatttgcttcctccaactatttaaagtggtccaaaaacacttttctgtaagtttctatactgtctaaaaccttatggtgaccagaattgtttattaatatcaaacttttttatatatgagaactaattcttgaataaaccccaaagttcactctcttgtttaagtagcagcagctttttacttaaaatttaattttaactacattgatactttacacatcctagtttggtaacacagctttaactatgtcatgcaacatatatatgttggtaggatgttattagagagatatgtgtgcatatatatttttttgcacctgaatcacccagcttttcataagtggtatgtttaattggtcattcagccaaccatcagtattttccccccacaacatgtgtaacacttttcagtctgtggatatctgatacattaagatttctttttataagtattcattttgaatgtgcatatagttatttgaccccttccaaatacttgtagccaaacattggctagaacatcccaagatatgctgacactgtcctgttagcttcatattatacttgctagtttaggtctctatagaagccctatataatttagaatatgcccactgaatatctttaatagaaagtaacataaagctagtattcaatgtagagtattttcatatgtttttcacagcccgttacaaattggcaatgtttggttaatgtttgtattacttggaaatcgctacagcttggactatttttttctaaatttttagcattagtccatttctgctgctaacaattgaatccagaaatctactttctccatcttccactgttagtgccagtgagcaatactgttgtgcaacaaaaatgtcactttatctcagtgtgaatgagtagtctaaattccctttctaccattgatttaaatatatatattggtaagagagactgcccatgtgtttagaatagaattttttaaatgaaatgatcaacaggtggaatttgaaatatattcttctacaaaagagatttctttcccttttatattttgatgattgttttcttaagattaagatatgttcttgctcttttataagattatttaaattatgtttccctctgattttttttcaccattgtatttactaagttattggatttacatgaaatctggcactttagggtgttctttttctcacagagtatatttaataaaaatgctgtgtatat

SEQ ID NO: 22660 - DNA, 3706 bp, Homo sapiens
  source 1..3706: mol_type = unassigned DNA
atgcgcagtggcgcgagcgcagcggctacgcgggcgcggagaggtagccgcagagtggacctgcaggtacttggatctccagtgggagctgccctctcgaaggcaggacagcggtggcggcagatataaagacctgaagatagtcttttctgtccaaagatggaaaacagtactactaccatttctcgggaggagcttgaagaactacaagaggcatttaataaaatagatattgacaatagtgggtatgtcagtgactatgaacttcaagacctgtttaaggaagcaagccttcctctgcctggctacaaggtgcgcgagattgtggagaaaattctatcagttgctgacagcaacaaagatggcaaaatcagttttgaagagtttgtgtcactaatgcaagaattaaaaagcaaagatatcagcaaaacattccgaaaaataattaacaagagggaagggattactgctattggaggaacttcaactatttccagtgagggcacacagcattcttattcagaggaagaaaaagtggcttttgttaactggataaacaaagccctggagaatgaccctgactgtaagcatcttatacccatgaatcccaatgatgatagtcttttcaagtcacttgcagatggcatccttctttgcaaaatgatcaacttatctgaaccagatacaattgatgaaagagccatcaataagaaaaagctcacgccattcactatttctgaaaatttaaacctagctctgaattctgcctcagccattggttgtacagtggtcaacattggtgcatcagatctcaaagaaggaaaacctcacttggtcttgggacttctctggcagatcatcaaagttggcctttttgctgatattgagatttccaggaatgaagctctgattgcattgttaaatgaaggtgaggaactagaggagctgatgaagctttctcccgaggaattactgctgcgatgggtgaactaccatctgaccaatgcaggatggcataccatcagcaacttcagccaagacattaaggactcgagagcctattttcatctgcttaatcagattgcccctaaaggtggggaagatggacctgccattgccattgacctttcaggaattaatgagacaaatgacctgaagcgtgctggactcatgcttcaagaagcagataaactgggctgcaaacagtttgttactcctgcagatgtggtttcaggcaatcctaaacttaatttagcttttgtagctaatttgtttaacacatacccgtgcctgcacaagccgaataataatgacatcgatatgaatttactggaaggagagagcaaggaagagagaacatttcggaactggatgaattccttgggagtcaacccatacattaatcatttgtacagtgaccttgcagatgctttagtgatctttcagctctatgagatgatccgagtgccagtcaactggagccatgtcaacaaacctccttatcctgcccttggagggaacatgaagaagattgaaaactgtaactatgcagtggaacttgggaagaacaaggccaaattctccttggttggcattgctgggcaggacctaaatgaagggaattcaacacttaccctggcattggtatggcagctgatgagaaggtacacattgaatgtgttatcggatcttggagagggtgaaaaagtaaatgatgaaattataattaaatgggtcaatcagactcttaaaagtgcaaacaaaaagacttctatttccagcttcaaggataaatctataagcacaagtttacctgtcctagatttaatagatgccattgcaccaaatgcagttcgtcaagaaatgatcaggagagaaaacttatctgatgaggacaagctgaacaatgctaaatacgccatttcagttgctcgaaagatcggtgcccggatatatgcattacctgatgacctcgtagaagtgaaaccaaagatggttatgacggtgtttgcatgcttaatgggaaaaggactgaacagaataaaataatcatttcatatgattttctgccacattaaacatattgtatgcctcacagtttacaggattctgaaatgtagtgggtgtaaaaccagagattatttgtatgctcaaaatagttatatattcattaatgaattcaatatcctgttcatactagttagagctggtcagcctttttgggtaacacagttaatttaccaactgatacagataatagaatatattcataatcaagctgatacttcatgattaaattatttttgttgcttaaaagtcgtattagacaagactaaatcattcttttttatggttcaaaaaagatgaatacaaacgtttttgcaggttctgctgtgaaatgtggtttgatttttttggtgtgttaattttgatcataaatgcattcatactcataatccagtttaatccttttatttgcttcctccaactatttaaagtggtccaaaaacacttttctgtaagtttctatactgtctaaaaccttatggtgaccagaattgtttattaatatcaaacttttttatatatgagaactaattcttgaataaaccccaaagttcactctcttgtttaagtagcagcagctttttacttaaaatttaattttaactacattgatactttacacatcctagtttggtaacacagctttaactatgtcatgcaacatatatatgttggtaggatgttattagagagatatgtgtgcatatatatttttttgcacctgaatcacccagcttttcataagtggtatgtttaattggtcattcagccaaccatcagtattttccccccacaacatgtgtaacacttttcagtctgtggatatctgatacattaagatttctttttataagtattcattttgaatgtgcatatagttatttgaccccttccaaatacttgtagccaaacattggctagaacatcccaagatatgctgacactgtcctgttagcttcatattatacttgctagtttaggtctctatagaagccctatataatttagaatatgcccactgaatatctttaatagaaagtaacataaagctagtattcaatgtagagtattttcatatgtttttcacagcccgttacaaattggcaatgtttggttaatgtttgtattacttggaaatcgctacagcttggactatttttttctaaatttttagcattagtccatttctgctgctaacaattgaatccagaaatctactttctccatcttccactgttagtgccagtgagcaatactgttgtgcaacaaaaatgtcactttatctcagtgtgaatgagtagtctaaattccctttctaccattgatttaaatatatatattggtaagagagactgcccatgtgtttagaatagaattttttaaatgaaatgatcaacaggtggaatttgaaatatattcttctacaaaagagatttctttcccttttatattttgatgattgttttcttaagattaagatatgttcttgctcttttataagattatttaaattatgtttccctctgattttttttcaccattgtatttactaagttattggatttacatgaaatctggcactttagggtgttctttttctcacagagtatatttaataaaaatgctgtgtatatagaaa

SEQ ID NO: 22661 - DNA, 567 bp, Homo sapiens
  source 1..567: mol_type = unassigned DNA
agtggacctgcaggtacttggatctccagtgggagctgccctctcgaaggcaggacagcggtggcggcagccacggtgttggatacacttgtatgaggcttcagctgtgctgcataaatttcttgaagaacctgtgagccagaagcaaaatttcaggacagggggcacacactgaacttgaagaaacattttccaagatgctaaaagtatggcttctactcatttttcccaaaaactgaagtaaaatgctaaaaagaatccatgtcatctgccagatttccaaaggctgtttttgagttcttctctaagatgttttcctccataaatgtgtacagcattaaagaagcccctgcagcatcttggagataatataaagacctgaagatagtcttttctgtccaaagatggaaaacagtactactaccatttctcgggaggagcttgaagaactacaagaggcatttaataaaatagatattgacaatagtgggtatgtcagtgactatgaacttcaagacctgtttaaggaagcaagccttcctctgcctggctacaaggtgcgcgaga

SEQ ID NO: 22662 - DNA, 564 bp, Homo sapiens
  source 1..564: mol_type = unassigned DNA
acttggatctccagtgggagctgccctctcgaaggcaggacagcggtggcggcagccacggtgttggatacacttgtatgaggcttcagctgtgctgcataaatttcttgaagaacctgtgagccagaagcaaaatttcaggacagggggcacacactgaacttgaaatataaagacctgaagatagtcttttctgtccaaagatggaaaacagtactactaccatttctcgggaggagcttgaagaactacaagaggcatttaataaaatagatattgacaatagtgggtatgtcagtgactatgaacttcaagacctgtttaaggaagcaagccttcctctgcctggctacaaggtgcgcgagattgtggagaaaattctatcagttgctgacagcaacaaagatggcaaaatcagttttgaagagtttgtgtcactaatgcaagaattaaaaagcaaagatatcagcaaaacattccgaaaaataattaacaagagggaagggattactgctattggaggaacttcaactatttccagtgagggcacacagcattcttatt

SEQ ID NO: 22663 - DNA, 580 bp, Homo sapiens
  source 1..580: mol_type = unassigned DNA
gggcgcggagaggtagccgcagagtggacctgcaggtacttggatctccagtgggagctgccctctcgaaggcaggacagcggtggcggcagagacagagtctccctgtgttgcccaggctggtcttgaactcctggcctcaagcaatccacctgccttggcctcccaaagtgctgcaattacagatataaagacctgaagatagtcttttctgtccaaagatggaaaacagtactactaccatttctcgggaggagcttgaagaactacaagaggcatttaataaaatagatattgacaatagtgggtatgtcagtgactatgaacttcaagacctgtttaaggaagcaagccttcctctgcctggctacaaggtgcgcgagattgtggagaaaattctatcagttgctgacagcaacaaagatggcaaaatcagttttgaagagtttgtgtcactaatgcaagaattaaaaagcaaagatatcagcaaaacattccgaaaaataattaacaagagggaagggattactgctattggaggaacttcaactatttccagtgagggcacacagcattctta

SEQ ID NO: 22664 - DNA, 608 bp, Homo sapiens
  source 1..608: mol_type = unassigned DNA
gcgggcgcggagaggtagccgcagagtggacctgcaggtacttggatctccagtgggagctgccctctcgaaggcaggacagcggtggcggcagagacagagtctccctgtgttgcccaggctggtcttgaactcctggcctcaagcaatccacctgccttggcctcccaaagtgctgcaattacagggaaggccagcgttggattgtgtaggttgcaaaatgcagtacctcagacttgcaactctgaaaagcactgtttgaaatctctgtaaagagtgaaaaacttcaagttttaaccaatgagtgttttagaggttaaagtttaaactctgacttggaagcacgctgggtaggactcctctgctcactcagactcaagttggatcatcagaatctctcttgtgttgctgtgaatgatttgcattgaaattcccagctagaactggaggaaagaggattacaaaccaggagatataaagacctgaagatagtcttttctgtccaaagatggaaaacagtactactaccatttctcgggaggagcttgaagaactacaagaggcatttaataaaatagatattgacaatagtgggtatgtcagtgact

SEQ ID NO: 22665 - DNA, 574 bp, Homo sapiens
  source 1..574: mol_type = unassigned DNA
agccgcagagtggacctgcaggtacttggatctccagtgggagctgccctctcgaaggcaggacagcggtggcggcagggaaggccagcgttggattgtgtaggttgcaaaatgcagtacctcagacttgcaactctgaaaagcactgtttgaaatctctgtaaagagtgaaaaacttcaagttttaaccaatgagtgttttagaggttaaagtttaaactctgacttggaagcacgctgggtaggactcctctgctcactcagactcaagttggatcatcagaatctctcttgtgttgctgtgaatgatttgcattgaaattcccagctagaactggaggaaagaggattacaaaccaggagatataaagacctgaagatagtcttttctgtccaaagatggaaaacagtactactaccatttctcgggaggagcttgaagaactacaagaggcatttaataaaatagatattgacaatagtgggtatgtcagtgactatgaacttcaagacctgtttaaggaagcaagccttcctctgcctggctacaaggtgcgcgagattgtggagaaaa

SEQ ID NO: 22666 - DNA, 2258 bp, Homo sapiens
  source 1..2258: mol_type = unassigned DNA
aattctccataggaacactatcaagtctttttccataaaagtcagataaaagaaagatcacatttcttgatattctttgaagcaactttatttttattgtcatgcttcatcctgcccgaatactgccaagtctttctcaggcacctggaatctgctcctcagcctctgttgtcctgggtctaatgtagagcaaaaggctgagaggaagctcttctattctccatcatcggtcttcagtggctacctgggaaacaccccttggcttagtcggcagattctctccgatataaagacctgaagatagtcttttctgtccaaagatggaaaacagtactactaccatttctcgggaggagcttgaagaactacaagaggcatttaataaaatagatattgacaatagtgggtatgtcagtgactatgaacttcaagacctgtttaaggaagcaagccttcctctgcctggctacaaggtgcgcgagattgtggagaaaattctatcagttgctgacagcaacaaagatggcaaaatcagttttgaagagtttgtgtcactaatgcaagaattaaaaagcaaagatatcagcaaaacattccgaaaaataattaacaagagggaagggattactgctattggaggaacttcaactatttccagtgagggcacacagcattcttattcagaggaagaaaaagtggcttttgttaactggataaacaaagccctggagaatgaccctgactgtaagcatcttatacccatgaatcccaatgatgatagtcttttcaagtcacttgcagatggcatccttctttgcaaaatgatcaacttatctgaaccagatacaattgatgaaagagccatcaataagaaaaagctcacgccattcactatttctgaaaatttaaacctagctctgaattctgcctcagccattggttgtacagtggtcaacattggtgcatcagatctcaaagaaggaaaacctcacttggtcttgggacttctctggcagatcatcaaagttggcctttttgctgatattgagatttccaggaatgaagctctgattgcattgttaaatgaaggtgaggaactagaggagctgatgaagctttctcccgaggaattactgctgcgatgggtgaactaccatctgaccaatgcaggatggcataccatcagcaacttcagccaagacattaaggactcgagagcctattttcatctgcttaatcagattgcccctaaaggtggggaagatggacctgccattgccattgacctttcaggaattaatgagacaaatgacctgaagcgtgctggactcatgcttcaagaagcagataaactgggctgcaaacagtttgttactcctgcagatgtggtttcaggcaatcctaaacttaatttagcttttgtagctaatttgtttaacacatacccgtgcctgcacaagccgaataataatgacatcgatatgaatttactggaaggagagagcaaggaagagagaacatttcggaactggatgaattccttgggagtcaacccatacattaatcatttgtacagtgaccttgcagatgctttagtgatctttcagctctatgagatgatccgagtgccagtcaactggagccatgtcaacaaacctccttatcctgcccttggagggaacatgaagaagattgaaaactgtaactatgcagtggaacttgggaagaacaaggccaaattctccttggttggcattgctgggcaggacctaaatgaagggaattcaacacttaccctggcattggtatggcagctgatgagaaggtacacattgaatgtgttatcggatcttggagagggtgaaaaagtaaatgatgaaattataattaaatgggtcaatcagactcttaaaagtgcaaacaaaaagacttctatttccagcttcaaggataaatctataagcacaagtttacctgtcctagatttaatagatgccattgcaccaaatgcagttcgtcaagaaatgatcaggagagaaaacttatctgatgaggacaagctgaacaatgctaaatacgccatttcagttgctcgaaagatcggtgcccggatatatgcattacctgatgacctcgtagaagtgaaaccaaagatggttatgacggtgtttgcatgcttaatgggaaaaggactgaacagaataaaataatcatttcatatgattttctgccacattaaacatattgtatgcctcaca

SEQ ID NO: 22667 - DNA, 635 bp, Homo sapiens
  source 1..635: mol_type = unassigned DNA
aataggcagaacacttcagtgtggaattgcttcttttctttggtcaaacactaactttggcagaggatagacacagcttaggaagactgaattttaagtcttctgaattgtttttctggacttccaaatctcaagtgataagaccagcagaagcagggaaggccagcgttggattgtgtaggttgcaaaatgcagtacctcagacttgcaactctgaaaagcactgtttgaaatctctgtaaagagtgaaaaacttcaagttttaaccaatgagtgttttagaggttaaagtttaaactctgacttggaagcacgctgggtaggactcctctgctcactcagactcaagttggatcatcagaatctctcttgtgttgctgtgaatgatttgcattgaaattcccagctagaactggaggaaagaggattacaaaccaggagatataaagacctgaagatagtcttttctgtccaaagatggaaaacagtactactaccatttctcgggaggagcttgaagaactacaagaggcatttaataaaatagatattgacaatagtgggtatgtcagtgactatgaacttcaagacctgtttaaggaagcaagccttcctctgcctggctacaaggtgcg

SEQ ID NO: 22668 - DNA, 2250 bp, Homo sapiens
  source 1..2250: mol_type = unassigned DNA
ctttacatctttaaatggatgagatggctaccactcagatttccaaagatgagcttgatgaactcaaagaggcctttgcaaaagttgatcgttctacctcgccacgttaaattatagcttcagtataagatgagaaggcatagcatgctatttgatttatcctttatcatcatataacatgccttacaattgagcagctatggaagatctcaacagcaacggattcatttgtgactatgaacttcatgagctcttcaaggaagctaatatgccattaccaggatataaagtgagagaaattattcagaaactcatgctggatggtgacaggaataaagatgggaaaataagttttgacgaatttgtttatatttttcaagaggtaaaaagtagtgatattgccaagaccttccgcaaagcaatcaacaggaaagaaggtatttgtgctctgggtggaacttcagagttgtccagcgaaggaacacagcattcttactcagaggaagaaaaatatgcttttgttaactggataaacaaagctttggaaaatgatcctgattgtagacatgttataccaatgaaccctaacaccgatgacctgttcaaagctgttggtgatggaattgtgctttgtaaaatgattaacctttcagttcctgataccattgatgaaagagcaatcaacaagaagaaacttacacccttcatcattcaggaaaacttgaacttggcactgaactctgcttctgccattgggtgtcatgttgtgaacattggtgcagaagatttgagggctgggaaacctcatctggttttgggactgctttggcagatcattaagatcggtttgttcgctgacattgaattaagcaggaatgaagccttggctgctttactccgagatggtgagactttggaggaacttatgaaattgtctccagaagagcttctgcttagatgggcaaactttcatttggaaaactcgggctggcaaaaaattaacaactttagtgctgacatcaagcttattgacttcagtaattcagtgaaggattccaaagcctatttccatcttctcaatcaaatcgcaccaaaaggacaaaaggaaggtgaaccacggatagatattaacatgtcaggtttcaatgaaacagatgatttgaagagagctgagagtatgcttcaacaagcagataaattaggttgcagacagtttgttacccctgctgatgttgtcagtggaaaccccaaactcaacttagctttcgtggctaacctgtttaataaatacccagcactaactaagccagagaaccaggatattgactggactctattagaaggagaaactcgtgaagaaagaaccttccgtaactggatgaactctcttggtgtcaatcctcacgtaaaccatctctatgctgacctgcaagatgccctggtaatcttacagttatatgaacgaattaaagttcctgttgactggagtaaggttaataaacctccatacccgaaactgggagccaacatgaaaaagctagaaaactgcaactatgctgttgaattagggaagcatcctgctaaattctccctggttggcattggagggcaagacctgaatgatgggaaccaaaccctgactttagctttagtctggcagctgatgagaagatataccctcaatgtcctggaagatcttggagatggtcagaaagccaatgacgacatcattgtgaactgggtgaacagaacgttgagtgaagctggaaaatcaacttccattcagagttttaaggacaagacgatcagctccagtttggcagttgtggatttaattgatgccatccagccaggctgtataaactatgaccttgtgaagagtggcaatctaacagaagatgacaagcacaataatgccaagtatgcagtgtcaatggctagaagaatcggagccagagtgtatgctctccctgaagaccttgtggaagtaaagcccaagatggtcatgactgtgtttgcatgtttgatgggcaggggaatgaagagagtgtaaaataaccaatctgaataaaacagccatgctcccaggtgcatgattcgcaggtcagctatttccaggtgaagtgcttatggcttaaggaactcttggccattcaaaggacttttcattttgattaacaggactagcttatcatgagagccctcaggggaaagggtttaagaaaaacaactcctctttcccatagtcag

SEQ ID NO: 22669 - DNA, 3276 bp, Homo sapiens
  source 1..3276: mol_type = unassigned DNA
aaagattccgaggtgcagaagttgtctgagtgcgttggtcggcggcagtcgggccagacccaggactctgcgactttacatctttaaatggatgagatggctaccactcagatttccaaagatgagcttgatgaactcaaagaggcctttgcaaaagttgatctcaacagcaacggattcatttgtgactatgaacttcatgagctcttcaaggaagctaatatgccattaccaggatataaagtgagagaaattattcagaaactcatgctggatggtgacaggaataaagatgggaaaataagttttgacgaatttgtttatatttttcaagaggtaaaaagtagtgatattgccaagaccttccgcaaagcaatcaacaggaaagaaggtatttgtgctctgggtggaacttcagagttgtccagcgaaggaacacagcattcttactcagaggaagaaaaatatgcttttgttaactggataaacaaagctttggaaaatgatcctgattgtagacatgttataccaatgaaccctaacaccgatgacctgttcaaagctgttggtgatggaattgtgctttgtaaaatgattaacctttcagttcctgataccattgatgaaagagcaatcaacaagaagaaacttacacccttcatcattcaggaaaacttgaacttggcactgaactctgcttctgccattgggtgtcatgttgtgaacattggtgcagaagatttgagggctgggaaacctcatctggttttgggactgctttggcagatcattaagatcggtttgttcgctgacattgaattaagcaggaatgaagccttggctgctttactccgagatggtgagactttggaggaacttatgaaattgtctccagaagagcttctgcttagatgggcaaactttcatttggaaaactcgggctggcaaaaaattaacaactttagtgctgacatcaaggattccaaagcctatttccatcttctcaatcaaatcgcaccaaaaggacaaaaggaaggtgaaccacggatagatattaacatgtcaggtttcaatgaaacagatgatttgaagagagctgagagtatgcttcaacaagcagataaattaggttgcagacagtttgttacccctgctgatgttgtcagtggaaaccccaaactcaacttagctttcgtggctaacctgtttaataaatacccagcactaactaagccagagaaccaggatattgactggactctattagaaggagaaactcgtgaagaaagaaccttccgtaactggatgaactctcttggtgtcaatcctcacgtaaaccatctctatgctgacctgcaagatgccctggtaatcttacagttatatgaacgaattaaagttcctgttgactggagtaaggttaataaacctccatacccgaaactgggagccaacatgaaaaagctagaaaactgcaactatgctgttgaattagggaagcatcctgctaaattctccctggttggcattggagggcaagacctgaatgatgggaaccaaaccctgactttagctttagtctggcagctgatgagaagatataccctcaatgtcctggaagatcttggagatggtcagaaagccaatgacgacatcattgtgaactgggtgaacagaacgttgagtgaagctggaaaatcaacttccattcagagttttaaggacaagacgatcagctccagtttggcagttgtggatttaattgatgccatccagccaggctgtataaactatgaccttgtgaagagtggcaatctaacagaagatgacaagcacaataatgccaagtatgcagtgtcaatggctagaagaatcggagccagagtgtatgctctccctgaagaccttgtggaagtaaagcccaagatggtcatgactgtgtttgcatgtttgatgggcaggggaatgaagagagtgtaaaataaccaatctgaataaaacagccatgctcccaggtgcatgattcgcaggtcagctatttccaggtgaagtgcttatggcttaaggaactcttggccattcaaaggacttttcattttgattaacaggactagcttatcatgagagccctcaggggaaagggtttaagaaaaacaactcctctttcccatagtcagagttgaatttgtcaggcacgcctgaaatgtgctcatagccaaaacattttactctctcctcctagaatgctgcccttgacatttcccattgctgtatgttatttcttgctctgttatcttttgccctcttagaatgtccctctcttgggacttgcttagatgatgggatatgaatattattagacagtaattttgctttccatccagtatgctagttcttattcgagaactatggtcagagcgtatttggatatgagtatcctttgcttatctttgtagtactgaaaatttgccgaagtaactggctgtgcagaatgtaatagaagcttttcttattcttttattcttaagatcagtatctttttacagtattctttctacatgatccttttttgtacatttaagaatattttgattatattaaacaagactgctgattttgctactttttttaaggggtcttcaagtaagtaaaacatacatcgtagctagaagaaaaatgtaccttaaatttgcatcttccctctcatacccaagctgtaaacaattgaaatattttgtcttaaatcacttggttcaatacatgcttatttgttttaaaacctgtatcatcaaactctctctctaaatttaaaatgctgttgaatatgatacttttgaggagagagtgtgctcagaacttagacgggatttggtaggccaagtatgctaagtgtacaatatattttttaattttacacctgaaacaaagaaatgtggtcactaaaaataaaagtatatatgtaggaattaatgtactcttgctttgtcaagctgtttgctatagtttccaaggtattatgttactctaactctgaaaagtgatgtaatctggtagcaatgtagtagttcaaataaaggcatttacataataattagtctgttcttcatgcttttgtctcttaggaagtatgccaatgtttgtcaggatttttttctttttgtttttctgatgtattctgtaaaatggtgtttgttaaatttgagttttgggagctgaattagaggtactgaattaaggacagtacaaatgaagtaaaaaggttttctccaatttacc

SEQ ID NO: 22670 - DNA, 3327 bp, Homo sapiens
  source 1..3327: mol_type = unassigned DNA
gacttgctctctaaagttgcaattgtaagaagaatgttgggtttccagattgctcttctgggcgtgggagaaggttctgtctatcagtgctgcgagaaaggaaagaaacaagtttgctctcagcggatctttaaatggatgagatggctaccactcagatttccaaagatgagcttgatgaactcaaagaggcctttgcaaaagttgatctcaacagcaacggattcatttgtgactatgaacttcatgagctcttcaaggaagctaatatgccattaccaggatataaagtgagagaaattattcagaaactcatgctggatggtgacaggaataaagatgggaaaataagttttgacgaatttgtttatatttttcaagaggtaaaaagtagtgatattgccaagaccttccgcaaagcaatcaacaggaaagaaggtatttgtgctctgggtggaacttcagagttgtccagcgaaggaacacagcattcttactcagaggaagaaaaatatgcttttgttaactggataaacaaagctttggaaaatgatcctgattgtagacatgttataccaatgaaccctaacaccgatgacctgttcaaagctgttggtgatggaattgtgctttgtaaaatgattaacctttcagttcctgataccattgatgaaagagcaatcaacaagaagaaacttacacccttcatcattcaggaaaacttgaacttggcactgaactctgcttctgccattgggtgtcatgttgtgaacattggtgcagaagatttgagggctgggaaacctcatctggttttgggactgctttggcagatcattaagatcggtttgttcgctgacattgaattaagcaggaatgaagccttggctgctttactccgagatggtgagactttggaggaacttatgaaattgtctccagaagagcttctgcttagatgggcaaactttcatttggaaaactcgggctggcaaaaaattaacaactttagtgctgacatcaaggattccaaagcctatttccatcttctcaatcaaatcgcaccaaaaggacaaaaggaaggtgaaccacggatagatattaacatgtcaggtttcaatgaaacagatgatttgaagagagctgagagtatgcttcaacaagcagataaattaggttgcagacagtttgttacccctgctgatgttgtcagtggaaaccccaaactcaacttagctttcgtggctaacctgtttaataaatacccagcactaactaagccagagaaccaggatattgactggactctattagaaggagaaactcgtgaagaaagaaccttccgtaactggatgaactctcttggtgtcaatcctcacgtaaaccatctctatgctgacctgcaagatgccctggtaatcttacagttatatgaacgaattaaagttcctgttgactggagtaaggttaataaacctccatacccgaaactgggagccaacatgaaaaagctagaaaactgcaactatgctgttgaattagggaagcatcctgctaaattctccctggttggcattggagggcaagacctgaatgatgggaaccaaaccctgactttagctttagtctggcagctgatgagaagatataccctcaatgtcctggaagatcttggagatggtcagaaagccaatgacgacatcattgtgaactgggtgaacagaacgttgagtgaagctggaaaatcaacttccattcagagttttaaggacaagacgatcagctccagtttggcagttgtggatttaattgatgccatccagccaggctgtataaactatgaccttgtgaagagtggcaatctaacagaagatgacaagcacaataatgccaagtatgcagtgtcaatggctagaagaatcggagccagagtgtatgctctccctgaagaccttgtggaagtaaagcccaagatggtcatgactgtgtttgcatgtttgatgggcaggggaatgaagagagtgtaaaataaccaatctgaataaaacagccatgctcccaggtgcatgattcgcaggtcagctatttccaggtgaagtgcttatggcttaaggaactcttggccattcaaaggacttttcattttgattaacaggactagcttatcatgagagccctcaggggaaagggtttaagaaaaacaactcctctttcccatagtcagagttgaatttgtcaggcacgcctgaaatgtgctcatagccaaaacattttactctctcctcctagaatgctgcccttgacatttcccattgctgtatgttatttcttgctctgttatcttttgccctcttagaatgtccctctcttgggacttgcttagatgatgggatatgaatattattagacagtaattttgctttccatccagtatgctagttcttattcgagaactatggtcagagcgtatttggatatgagtatcctttgcttatctttgtagtactgaaaatttgccgaagtaactggctgtgcagaatgtaatagaagcttttcttattcttttattcttaagatcagtatctttttacagtattctttctacatgatccttttttgtacatttaagaatattttgattatattaaacaagactgctgattttgctactttttttaaggggtcttcaagtaagtaaaacatacatcgtagctagaagaaaaatgtaccttaaatttgcatcttccctctcatacccaagctgtaaacaattgaaatattttgtcttaaatcacttggttcaatacatgcttatttgttttaaaacctgtatcatcaaactctctctctaaatttaaaatgctgttgaatatgatacttttgaggagagagtgtgctcagaacttagacgggatttggtaggccaagtatgctaagtgtacaatatattttttaattttacacctgaaacaaagaaatgtggtcactaaaaataaaagtatatatgtaggaattaatgtactcttgctttgtcaagctgtttgctatagtttccaaggtattatgttactctaactctgaaaagtgatgtaatctggtagcaatgtagtagttcaaataaaggcatttacataataattagtctgttcttcatgcttttgtctcttaggaagtatgccaatgtttgtcaggatttttttctttttgtttttctgatgtattctgtaaaatggtgtttgttaaatttgagttttgggagctgaattagaggtactgaattaaggacagtacaaatgaagtaaaaaggttttctccaatttaccaaaa

SEQ ID NO: 22671 - DNA, 2277 bp, Homo sapiens
  source 1..2277: mol_type = unassigned DNA
agtcgggccagacccaggactctgcgactttacatctttaaatggatgagatggctaccactcagatttccaaagatgagcttgatgaactcaaagaggcctttgcaaaagttgatcgttctacctcgccacgttaaattatagcttcagtataagatgagaaggcatagcatgctatttgatttatcctttatcatcatataacatgccttacaattgagcagctatggaagatctcaacagcaacggattcatttgtgactatgaacttcatgagctcttcaaggaagctaatatgccattaccaggatataaagtgagagaaattattcagaaactcatgctggatggtgacaggaataaagatgggaaaataagttttgacgaatttgtttatatttttcaagaggtaaaaagtagtgatattgccaagaccttccgcaaagcaatcaacaggaaagaaggtatttgtgctctgggtggaacttcagagttgtccagcgaaggaacacagcattcttactcagaggaagaaaaatatgcttttgttaactggataaacaaagctttggaaaatgatcctgattgtagacatgttataccaatgaaccctaacaccgatgacctgttcaaagctgttggtgatggaattgtgctttgtaaaatgattaacctttcagttcctgataccattgatgaaagagcaatcaacaagaagaaacttacacccttcatcattcaggaaaacttgaacttggcactgaactctgcttctgccattgggtgtcatgttgtgaacattggtgcagaagatttgagggctgggaaacctcatctggttttgggactgctttggcagatcattaagatcggtttgttcgctgacattgaattaagcaggaatgaagccttggctgctttactccgagatggtgagactttggaggaacttatgaaattgtctccagaagagcttctgcttagatgggcaaactttcatttggaaaactcgggctggcaaaaaattaacaactttagtgctgacatcaagcttattgacttcagtaattcagtgaaggattccaaagcctatttccatcttctcaatcaaatcgcaccaaaaggacaaaaggaaggtgaaccacggatagatattaacatgtcaggtttcaatgaaacagatgatttgaagagagctgagagtatgcttcaacaagcagataaattaggttgcagacagtttgttacccctgctgatgttgtcagtggaaaccccaaactcaacttagctttcgtggctaacctgtttaataaatacccagcactaactaagccagagaaccaggatattgactggactctattagaaggagaaactcgtgaagaaagaaccttccgtaactggatgaactctcttggtgtcaatcctcacgtaaaccatctctatgctgacctgcaagatgccctggtaatcttacagttatatgaacgaattaaagttcctgttgactggagtaaggttaataaacctccatacccgaaactgggagccaacatgaaaaagctagaaaactgcaactatgctgttgaattagggaagcatcctgctaaattctccctggttggcattggagggcaagacctgaatgatgggaaccaaaccctgactttagctttagtctggcagctgatgagaagatataccctcaatgtcctggaagatcttggagatggtcagaaagccaatgacgacatcattgtgaactgggtgaacagaacgttgagtgaagctggaaaatcaacttccattcagagttttaaggacaagacgatcagctccagtttggcagttgtggatttaattgatgccatccagccaggctgtataaactatgaccttgtgaagagtggcaatctaacagaagatgacaagcacaataatgccaagtatgcagtgtcaatggctagaagaatcggagccagagtgtatgctctccctgaagaccttgtggaagtaaagcccaagatggtcatgactgtgtttgcatgtttgatgggcaggggaatgaagagagtgtaaaataaccaatctgaataaaacagccatgctcccaggtgcatgattcgcaggtcagctatttccaggtgaagtgcttatggcttaaggaactcttggccattcaaaggacttttcattttgattaacaggactagcttatcatgagagccctcaggggaaagggtttaagaaaaacaactcctctttcccatagtcag

SEQ ID NO: 22672 - DNA, 2858 bp, Homo sapiens
  source 1..2858: mol_type = unassigned DNA
agattgctcttctgggcgtgggagaaggttctgtctatcagtgctgcgagaaaggaaagaaacaagtttgctctcagcggatctttaaatggatgagatggctaccactcagatttccaaagatgagcttgatgaactcaaagaggcctttgcaaaagttgtggagacggagtttcaccgtgttagccaggatggtctcgatctcctgacctcgtgatccgcccgtctcggcctcccaaagtgctgggattacagacgtgagccaccgcgcctggcctacacacatgtatttttaaaacgagagttgcagcaggggaaaaatgatggccaaactgctggaaattttgagtcagaaaaggactgataaacatttttgattgcctggtctcaccctctaaacttgtccagccttctgctgtacttgacctccatctttggaaatccactagtacagtgaattctaaagcagcaacctccagtctacccttagctggaactcattaaactgcctcttatatttgctgcagtgagctacctcaaaagatctcaacagcaacggattcatttgtgactatgaacttcatgagctcttcaaggaagctaatatgccattaccaggatataaagtgagagaaattattcagaaactcatgctggatggtgacaggaataaagatgggaaaataagttttgacgaatttgtttatatttttcaagaggtaaaaagtagtgatattgccaagaccttccgcaaagcaatcaacaggaaagaaggtatttgtgctctgggtggaacttcagagttgtccagcgaaggaacacagcattcttactcagaggaagaaaaatatgcttttgttaactggataaacaaagctttggaaaatgatcctgattgtagacatgttataccaatgaaccctaacaccgatgacctgttcaaagctgttggtgatggaattgtgctttgtaaaatgattaacctttcagttcctgataccattgatgaaagagcaatcaacaagaagaaacttacacccttcatcattcaggaaaacttgaacttggcactgaactctgcttctgccattgggtgtcatgttgtgaacattggtgcagaagatttgagggctgggaaacctcatctggttttgggactgctttggcagatcattaagatcggtttgttcgctgacattgaattaagcaggaatgaagccttggctgctttactccgagatggtgagactttggaggaacttatgaaattgtctccagaagagcttctgcttagatgggcaaactttcatttggaaaactcgggctggcaaaaaattaacaactttagtgctgacatcaaggattccaaagcctatttccatcttctcaatcaaatcgcaccaaaaggacaaaaggaaggtgaaccacggatagatattaacatgtcaggtttcaatgaaacagatgatttgaagagagctgagagtatgcttcaacaagcagataaattaggttgcagacagtttgttacccctgctgatgttgtcagtggaaaccccaaactcaacttagctttcgtggctaacctgtttaataaatacccagcactaactaagccagagaaccaggatattgactggactctattagaaggagaaactcgtgaagaaagaaccttccgtaactggatgaactctcttggtgtcaatcctcacgtaaaccatctctatgctgacctgcaagatgccctggtaatcttacagttatatgaacgaattaaagttcctgttgactggagtaaggttaataaacctccatacccgaaactgggagccaacatgaaaaagctagaaaactgcaactatgctgttgaattagggaagcatcctgctaaattctccctggttggcattggagggcaagacctgaatgatgggaaccaaaccctgactttagctttagtctggcagctgatgagaagatataccctcaatgtcctggaagatcttggagatggtcagaaagccaatgacgacatcattgtgaactgggtgaacagaacgttgagtgaagctggaaaatcaacttccattcagagttttaaggacaagacgatcagctccagtttggcagttgtggatttaattgatgccatccagccaggctgtataaactatgaccttgtgaagagtggcaatctaacagaagatgacaagcacaataatgccaagtatgcagtgtcaatggctagaagaatcggagccagagtgtatgctctccctgaagaccttgtggaagtaaagcccaagatggtcatgactgtgtttgcatgtttgatgggcaggggaatgaagagagtgtaaaataaccaatctgaataaaacagccatgctcccaggtgcatgattcgcaggtcagctatttccaggtgaagtgcttatggcttaaggaactcttggccattcaaaggacttttcattttgattaacaggactagcttatcatgagagccctcaggggaaagggtttaagaaaaacaactcctctttcccatagtcagagttgaatttgtcaggcacgcctgaaatgtgctcatagccaaaacattttactctctcctcctagaatgctgcccttgacatttcccattgctgtatgttatttcttgctctgttatcttttgccctcttagaatgtccctctcttgggacttgcttagatgatgggatatgaatattattagacagtaattttgctttccatccagtatgctagttcttattcgagaactatggtcagagcgtatttggatatgagtatcctttgcttatctttgtagtactgaaaatttgccgaag

SEQ ID NO: 22673 - DNA, 916 bp, Homo sapiens
  source 1..916: mol_type = unassigned DNA
aaatcgcaccaaaaggacaaaaggaaggtgaaccacggatagatattaacatgtcaggtttcaatgagaaactcgtgaagaaagaaccttccgtaactggatgaactctcttggtgtcaatcctcacgtaaaccatctctatgctgacctgcaagatgccctggtaatcttacagttatatgaacgaattaaagttcctgttgactggagtaaggttaataaacctccatacccgaaactgggagccaacatgaaaaagctagaaaactgcaactatgctgttgaattagggaagcatcctgctaaattctccctggttggcattggagggcaagacctgaatgatgggaaccaaaccctgactttagctttagtctggcagctgatgagaagatataccctcaatgtcctggaagatcttggagatggtcagaaagccaatgacgacatcattgtgaactgggtgaacagaacgttgagtgaagctggaaaatcaacttccattcagagttttaaggacaagacgatcagctccagtttggcagttgtggatttaattgatgccatccagccaggctgtataaactatgaccttgtgaagagtggcaatctaacagaagatgacaagcacaataatgccaagtatgcagtgtcaatggctagaagaatcggagccagagtgtatgctctccctgaagaccttgtggaagtaaagcccaagatggtcatgactgtgtttgcatgtttgatgggcaggggaatgaagagagtgtaaaataaccaatctgaataaaacagccatgctcccaggtgcatgattcgcaggtcagctatttccaggtgaagtgcttatggcttaaggaactcttggccattcaaaggacttttcattttgattaacaggactagcttatca

SEQ ID NO: 22674 - DNA, 604 bp, Homo sapiens
  source 1..604: mol_type = unassigned DNA
atcttagtttccgcaccgcagttcctcggtgtccacttcaggcttccggactggaaggacagccgggaataaaacgtgccggcgaggctcaggagtcattggccacagagacccagcccgagtttcccatcgcactgagcactgagatcctgctggaagctctgccgcagcatgagctccgcagccgggttctgcgcctcacgccccgggctgctgttcctggggttgctgctcctgccacttgtggtcgccttcgccagcgctgaagctgaagaagatggggacctgcagtgcctgtgtgtgaagaccacctcccaggtccgtcccaggcacatcaccagcctggaggtgatcaaggccggaccccactgccccactgcccaactgatagccacgctgaagaatggaaggaaaatttgcttggacctgcaagccccgctgtacaagaaaataattaagaaacttttggagagttagctactagctgcctacgtgtgtgcatttgctatatagcatacttcttttttccagtttcaatctaactgtgaaagaacttctgatatttgtgttatccttatgattttaaataaacaaaataaatcaa

SEQ ID NO: 22675 - DNA, 522 bp, Homo sapiens
  source 1..522: mol_type = unassigned DNA
tcttagctcctgcaccacagttcctcgctgtccaccccaggcttccggactggaaggacagtgggacagtgacgggggataaaagaagcctggtgaggccaggagtcactgcctgcagaaccccagcccgactttccctgcgcactgggatcctgctggaacctcagctgcaacatgagctccgcagccaggtcccgcctcacccgcgccacccgccaggagatgctgttcttggcgttgctgctcctgccagttgtggtcgccttcgccagagctgaagctgaagaagatggggacctgcagtgcctgtgtgtgaagaccacctcccaggtccgtcccaggcacatcaccagcctggaggtgatcaaggccggaccccactgccccactgcccaactcatagccacgctgaagaatgggaggaaaatttgcttggatctgcaagccctgctgtacaagaaaatcattaaggaacatttggagagttagctactagctgcctaagtgtgcactttcaatcta

SEQ ID NO: 22676 - DNA, 2517 bp, Homo sapiens
  source 1..2517: mol_type = unassigned DNA
agtggaggagctgctgctggtgctggggccggaggagggacgcgccggagcgggaccgacgggaccgagcgagcgaccgacgcgccacccgccgacgcctcagccgcttggggcccgcacggaccctctacttcagtgtagaatgagccaaggagactcaaacccagcagctattccgcatgcagcagaagatattcaaggagatgaccgatggatgtctcagcacaacagatttgttttggactgtaaagacaaagagcctgatgtactgttcgtgggagactccatggtgcagttaatgcagcaatatgagatatggcgagagcttttttccccacttcatgcactgaattttggaattgggggagatacaacaagacatgttttgtggagactaaagaatggagaactggagaatattaagcctaaggtcattgttgtctgggtaggaacaaataaccacgaaaatacagcagaagaagtagcaggtgggatcgaggccattgtacaacttatcaacacaaggcagccacaggcgtgagtcaccgcaccaggccatcttcaggtcattttaacaatacccctgagccacctgaagcttcctccctgtcctctcaccccaaacttcataaatcccctgtgacttaaaatggagctggactcatgggtccagcaagctcctcagctgtgtgttgaatggtcccatttctttggtccattcaacactcaggctcaggaagggtggtccacagggaaatataagtcaaataagccttatggccccaccctgaccgcttgagggccacggttagggttgagctctttgtatattatgccagggaatgcggtagctggacctgtgcacaaggccaggatcacatccctgaggccccgacatctcccctgtgtgctcacaagtctggctttgagacacaccactgcctttttttgctgactgctgcagccaacaaaaaggcattctctcccagtggacagacctcagaaaggacctattcataagtgcggggtagggcagagggactgaggaaagttctgcagacctgggaacagcaagaaaatgtgcagttgctgccctcccactctgtagacgcagggtcctgacgattcaaaagttaagtcttgagaccttgcaaaagggaaggatcccttcagagtttgcttggatggatttctctccagatattgccagcggaaagggagcaaacagaaatagtgatagtccacagttgtttggttccagagcagtggttctcaaacttcattgtgcatagcaagcttctggagtgccccgttaaattgcagttttctgggctccacctcccaagatgaattaagtgtgaagtaggactctggatgtgcgtttaaaacaggcgtagggtcacatcttgccccaaagttatgaggccaacttagagtagtggtgcttgcctgtaatccagctactcgagaggctgtggcagatcgcttgaagccaggagttcaagaccagcctgggcaatgtatcacgagtgtttcttaatgtttcagattatttactggcaagatgagcaggattaccatgaaagaaaagtccagatggactgaggaaatcctacactgattctccaaacttggcagctgactgcatggagggctcatgatgaagaaacctcttttgccatcctgaggattctctgattcatattcgcctagatgtgctggaaacagtactggaccaaggtgcaaacttgagtctagtgaggtactaatgggctgaagtttttctgagcgtcactttcctcatctgtataatgaggggttggccaaggaaacccataaggttatcttccagctgactttctaattggtgaaccctttggaaaaggggtgcagcttgcttctggtcttcatcctcaagtatgctgtgcttggacaggggccaaaactaattcctccactcaccatttgcccagcataactacaacagtacctggcacatcgtggatgcttattaaatatttattgcaggaatgagtaaatataactaactgatcataaggtaaaatagtcttcattggaacaaggctccagatagttgggcagggctgggagctgagactgctgcaatcctgccagctgagagaactctgacaaggcactgatctgggtggctttattaggatgtctgacagcttcagaggtggccacatttcttttcctttaaacatgtctaatttggccgggcgcagtggctcacgcctgtaatcccaacactttgggaagcctaggtgggtggatcactcgaggtcaggagttcgagatcagcctgaccaatatggtgaaaccccgctttactaaaaatacaagaaattagcagggtgtggtggcgggtgcctgtagtcccagctacttgggaggctgaggcaggagcatcgcctgaactcaggaggcggagattgcagtgagctgagatcacaccactgtactccagcatgggtgacagtgagactccatctc

SEQ ID NO: 22677 - DNA, 4195 bp, Homo sapiens
  source 1..4195: mol_type = unassigned DNA
gtggcaggggaaccggaagtggaggagctgctgctggtgctggggccggaggagggacgcgccggagcgggaccgacgggaccgagcgagcgaccgacgcgccacccgccgacgcctcagccgcttggggcccgcacggaccctctacttcagtgtagaatgagccaaggagactcaaacccagcagctattccgcatgcagcagaagatattcaaggagatgaccgatggatgtctcagcacaacagatttgttttggactgtaaagacaaagagcctgatgtactgttcgtgggagactccatggtgcagttaatgcagcaatatgagatatggcgagagcttttttccccacttcatgcactgaattttggaattgggggagatacaacaagacatgttttgtggagactaaagaatggagaactggagaatattaagcctaaggtcattgttgtctgggtaggaacaaataaccacgaaaatacagcagaagaagtagcaggtgggatcgaggccattgtacaacttatcaacacaaggcagccacaggccaaaatcattgtattgggtttgttacctcgaggtgagaaacccaatcctttgaggcaaaagaacgccaaggtgaaccaactcctcaaggtttcgctgccgaagcttgccaacgtgcagctcctggataccgacgggggttttgtgcactcggacggtgccatctcctgccacgacatgtttgattttctgcatctgacaggagggggctatgcaaagatctgcaaacccctgcatgaactgatcatgcagttgttggaggaaacacctgaggagaaacaaaccaccattgcctgactggctcttatcagtgttaatagcatctcagcttcctcagatcagttctatcactggcactacagaatccttctctttcttaaggcactttgcattgtagaatgttcctggatgttcatatctagtgtttgaaggggaggagggatttaaactggtcctgtacatagaaggtttgtttgacagaggagaaaaattagccaaggaagattgttgtttaaattcatttgaaaccagaaggggactttttagttgtatgtgtaacacattcattgaattattatcactgttttcttgggacaacatcaagcctaaatactgaacaatatgaagattcttttcttggcctttctgtggattatgtcatatataataattatcagaatcattctacttggctttaaaacatgttttctccaatttttttaaggttcataatttagccttttgtttttatgttgcttagattcttatgtatactgaatattttattaacatgtagcatcaggttgaacatgcttgtcattgatatatggaagatgctatagttagaagtgaatttgttctgctttcttaatcttttccatgcttagcagtgaaaaacaggttttgccccagtagagggattctttggagggtattattttttatgctgctgaatatcatgtctataatagacccgtgcatgcagcctttcctccttattccccttcatgcccccctttccccttcattccccccgccaccccgtttttttttttttttttttttttttggttcttgttgacattacaagcttttaacacatttttgacctaggagccctgttgctggaagtatagtctccagccagttactctcatgatagtactgctataaaactcattcttgtgtggtgttctgtgctatagattctgtgtattgctgttcatattcggagttctggttttgtttttcccttaaaacctgttaacagttttttttgggggtggggggattcagaactcttgtttcccattccatagcacctgacattatttcaagttttataatatcttaaggtgtatattttattttttttattggcttagttgttttttgttttgttttgtttgagatggagtttcactgttgcccaggctggggtgcaatggtgtgatcttggctcactgcagcctccacctcccgagttcaaatgattctcctgcctcagcttcctgagtagctgggattacaggtgcatgccaccatgcccggctaatttttatatttttattagagacgggatttcgccatgttaaccaggctggtctcgaactcctgacctcaggtgatctgcccgccttggcctcccaaagtgctgggattacaggcatgagccaccgtgcctggccttattggcttagtttttaaattatcctccaaaaattttgggcctttttctgtggggaaacaagtgaagctgctcttcagcatagacactacctttatcccatcattttagtaaaaactaggtttgtttcacttctgaggtgtcttattaatgtacttcatctgagaatttgttgatcttaatgttcgagctatataagaactgccattaaaaaaaatgggataatagatgattttatcagtatacctgtggaatatgtacaaactggatctatagatattttgaactggaccaggtgggtattgaagtaacccatcaaaatatgctctgcagtgattccgcttaatgtttaaattcagtaacgtacttgaaaggcaaatttcagtgcttttgtatgttggaggagggcttactgatgcgtgctaagaccgatttctgattgagggatgaaccttgggctcatttttttcttgtgaagtctctttctagaaaattttttggttttgttctttttaaaaaatacatacttttttgaatgtatcatgtcttcattaacaacagaaaatccacatggtgtttactaaacttgtttacgacattaaaaatttcctttttatttttagtagcccaggttgagtttttcacaagagatttttttcttagctgaggtatagttgtatagcaagaagaattaagccagatttttgtgtgtggaaagacagttttctatccacgtctttttctgtttgtcagaaggtgggagtatggtccaaataaatccattaggttactcctgcagcatgcgcttttagcttctctcttgactgaggatcaaatatccctttgtgagctggccctcagctcctttgctcatgtgtacaaacctcagatgttactacattttatatctaccagagctattcaagcaatagtatttgaaccactagccttttaaataaaattctgccccattactgatgtgcagatattgagttcactttcattttttgccagatttctttgcactactttaggtaaaaatagttaatctatttttctttgacatcctagtttgcgtcagtgacagaacttactgcttagtctttgtactttttaaaaaatctataaatttaatgcactgtccaagtgaaatgtcctagttgtcattgtgattaaggggccaactttccaggcagctagcagagatactattctcttcctctcccagcaaatttgtattccttcgcccacgcattcctgctatactagatggcagccagtgatggaactataaagatgtctgtggtcatatgttgaatgtggcagcttgaagatgtactgccacgggtgatctagggcaggctgtcttccagtccatgtgttctcggtcgccgtagacagcgctctggctaccaccgtgaggctacttgaactgtcaggggcatctgcctaaaccagaatcttttgtcagaaaccttaacccaacaaaacaaatcttgagtagctcatgcccggctcttaggaattttgtctgtttaaaaaaaaaaaaaaaaaaaaagtccaacttactttattttatttttttaacctagtcactgtttacaattgtatgctaaagcctgaaatattgtctgtgctgtggtgtatgagcattgccaactttatatttattgcagtgaagaagaaactaaaaatatatggaaatgaggagcatgtccaagctcctaaatccgtgtgggtgcatgtgggagaagtgagttagggcctcttgaaaggaggctttttggagaggggtcccccaggtttcttggtgttcctgcttggggatcactgctgctagctgactggacctccccattggaagtttgtgattttgctttggcaaagtttcattgactagtagaactcattctgttttagtgtatatttcaatataaatgtaaacattttgctcaa

SEQ ID NO: 22678 - DNA, 1056 bp, Homo sapiens
  source 1..1056: mol_type = unassigned DNA
tgctggtgctggggccggaggagggacgcgccggagcgggaccgacgggaccgagcgagcgaccgacgcgccacccgccgacgcctcagccgcttggggcccgcacggaccctctacttcagtgtagaatgagccaaggagactcaaacccagcagctattccgcatgcagcagaagatattcaaggagatgaccgatggatgtctcagcacaacagatttgttttggactgtaaagacaaagagcctgatgtactgttcgtgggagactccatggtgcagttaatgcagcaatatgagatatggcgagagcttttttccccacttcatgcactgaattttggaattgggggagatacaacaagacatgttttgtggagactaaagaatggagaactggagaatattaagcctaaggtcattgttgtctgggtaggaacaaataaccacgaaaatacagcagaagaagtagcaggtgggatcgaggccattgtacaacttatcaacacaaggcagccacaggccaaaatcattgtattgattatttactggcaagatgagcaggattaccatgaaagaaaagtccagatggactgaggaaatcctacactgattctccaaacttggcagctgactgcatggagggctcatgatgaagaaacctcttttgccatcctgaggattctctgattcatattcgcctagatgtgctggaaacagtactggaccaaggtgcaaacttgagtctagtgaggtactaatgggctgaagtttttctgagcgtcactttcctcatctgtataatgaggggttggccaaggaaacccataaggttatcttccagctgactttctaattggtgaaccctttggaaaaggggtgcagcttgcttctggtcttcatcctcaagtatgctgtgcttggacaggggccaaaactaattcctccactcaccatttgcccagcataactacaacagtacctggcacatcgtggatgcttattaaatatttattgcaggaatgagtaaatataactaactgatcataaggtaaaa

SEQ ID NO: 22679 - DNA, 850 bp, Homo sapiens
  source 1..850: mol_type = unassigned DNA
gggaccgagcgagcgaccgacgcgccacccgccgacgcctcagccgcttggggcccgcacggaccctctacttcagtgtagaatgagccaaggagactcaaacccagcagctattccgcatgcagcagaagatattcaaggagatgaccgatggatgtctcagcacaacagatttgttttggactgtaaagacaaagagcctgatgtactgttcgtgggagactccatggtgcagttaatgcagcaatatgagatatggcgagagcttttttccccacttcatgcactgaattttggaattgggggagatacaacaagacatgttttgtggagactaaagaatggagaactggagaatattaagcctaaggtcattgttgtctgggtaggaacaaataaccacgaaaatacagcagaagaagtagcaggtgggatcgaggccattgtacaacttatcaacacaaggcagccacaggccaaaatcattgtattgggtaaagcagccgcctccaaatactctatctcagagatagtgagactagaacaagggtcggttaactggtcgatcgggacctatcctgatgacacaccagcaactaccaggccagcaatattacaattatttactggcaagatgagcaggattaccatgaaagaaaagtccagatggactgaggaaatcctacactgattctccaaacttggcagctgactgcatggagggctcatgatgaagaaacctcttttgccatcctgaggattctctgattcatattcgcctagatgtgctggaaacagtactggaccaaggtgcaaacttgagtctagtgaggtactaatgggctgaagt

SEQ ID NO: 22680 - DNA, 1076 bp, Homo sapiens
  source 1..1076: mol_type = unassigned DNA
ggagctggatggtctcgcctctccctccccccaccccgtgccgggtgcgcggcctgggagtcagcggcccgagcgggaagcgccgggcgagcccactgtgcggccgtcgtgggggaagcgaaggttcctgattccacctacctcctaagtgaaggcttccgtccctggagaggaggcggcgccctgtatcggccttcgtcctccgcgggtgtgctagcgttgggacggtcctttgttgccgcgaggggtaggagtgggcgtggcggagccagctccgttcggaacactcccgggccgacccgactcgctcatcctgcaggagctgcggcgccaagatgagtggagaggagaacccagccagcaagcccacgccggtgcaggacgtacagggcgacgggcgctggatgtccctgcaccatcggttcgtggctgacagcaaagataaggaacccgaagtcgtcttcatcggggactccttggtccagctcatgcaccagtgcgagatctggcgcgagctcttctctcctctgcatgcacttaactttggcattggtggtgacggcacacagcatgtactgtggcggctggagaatggggagctggaacacatccggcccaagattgtggtggtctgggtgggcaccaacaaccacggacacacagcagagcaggtgactggtggcatcaaggccattgtgcaactggtgaatgagcgacagccccaggcccgggttgtggtgctgggcctgcttccgcgaggccaacatcccaacccacttcgggagaagaaccgacaggtgaacgagctggtacgggcggcactggctggccaccctcgggcccacttcctagatgccgaccctggctttgtgcactcagatggcaccatcagccatcatgacatgtatgattacctgcatctgagccgcctgggctacacacctgtttgccgggctctgcactccctgcttctgcgtctgctggcccaagaccagggccaaggtgctcccctgctggagcccgcaccctaagcatcctgctgccttcccacaacattaaactctccttcctcagtg

SEQ ID NO: 22681 - DNA, 1098 bp, Homo sapiens
  source 1..1098: mol_type = unassigned DNA
tcactctgtacagcaaatggtttcttcccatttgctagacagagggctagattttccccgcccactctcgactcttcaggtagttcgcccctccccgtgaccggtgggtggtttctccctcctccccgcctcgggagctggatggtctcgcctctccctccccccaccccgtgccgggtgcgcggcctgggagtcagcggcccgagcgggaagcgccgggcgagcccactgtgcggccgtcgtgggggaagcgaaggttcctgattccacctacctcctaagtgaaggcttccgtccctggagaggaggcggcgccctgtatcggccttcgtcctccgcgggagctgcggcgccaagatgagtggagaggagaacccagccagcaagcccacgccggtgcaggacgtacagggcgacgggcgctggatgtccctgcaccatcggttcgtggctgacagcaaagataaggaacccgaagtcgtcttcatcggggactccttggtccagctcatgcaccagtgcgagatctggcgcgagctcttctctcctctgcatgcacttaactttggcattggtggtgacggcacacagcatgtactgtggcggctggagaatggggagctggaacacatccggcccaagattgtggtggtctgggtgggcaccaacaaccacggacacacagcagagcaggtgactggtggcatcaaggccattgtgcaactggtgaatgagcgacagccccaggcccgggttgtggtgctgggcctgcttccgcgaggccaacatcccaacccacttcgggagaagaaccgacaggtgaacgagctggtacgggcggcactggctggccaccctcgggcccacttcctagatgccgaccctggctttgtgcactcagatggcaccatcagccatcatgacatgtatgattacctgcatctgagccgcctgggctacacacctgtttgccgggctctgcactccctgcttctgcgtctgctggcccaagaccagggccaaggtgctcccctgctggagcccgcaccctaagcatcctgctgccttcccacaacattaaactctccttcctcagtg

SEQ ID NO: 22682 - DNA, 1277 bp, Homo sapiens
  source 1..1277: mol_type = unassigned DNA
actgcactccagcctgggcgacagagccacactctgtctcaaaaaaaaaaagcagacttaatagggtgaagaaaattaaaagatcctgaaaatgagggcctatgaagagggacaggaggtactctgaaacgtgtgatttggttctaaatcttaaaagacagaattggaataaaatatcattgtggctcctgagaggcatgctgccaggtgtgggattatgagactggagattttgaacgaactcttaaaggacatacagactctgtacaggacatttcattcgaccacagcggcaagcttctggcttcctgttctgcagatatgaccattaaactatgggattttcagggctttgaatgcatcagaaccatgcacggccatgaccacaatgtttcttcagtagccatcatgcccaatggagatcatatagtgtctgcctcaagggataaaactataaaaatgtgggaagtgcaaactggctactgtgtgaagacattcacaggacacagagaatgggtacgtatggtacggccaaatcaagatggcactctgatagccagctgttccaatgaccagactgtgcgtgtatgggtcgtagcaacaaaggaatgcaaggctgagctccgagagcatgagcatgtggtagaatgcatttcctgggctccagaaagctcatattcctccatctctgaagcaacaggatctgagactaaaaaaagtggtaaacctgggccattcttgctgtctggatccagagacaagactattaagatgtgggatgtcagtactggcatgtgccttatgaccctcgtgggtcatgataactgggtacgtggagttctgttccattctggggggaagtttattttgagttgtgctgatgacaagaccctacgcgtatgggattacaagaacaagcgatgcatgaagaccctcaatgcgcatgaacactttgttacctccttggatttccacaagacggcaccctatgtcgtcactggcagcgtagatcaaacagtaaaagtgtgggagtgccgttgattgtgtctccttcggcccctcctccctcttttcctctggatgcactctgatgataccatggttaccccattgagctctgtttaaataaatattgtcctttcatgtaaattattctggatgtagattgagcttattaaatgttacacacaaagtattcatgcatggtgaatccaaattgtatactgtaaatttacatacgttgtctagaagtaccatagggtttaaaaacctgggct

SEQ ID NO: 22683 - DNA, 5614 bp, Homo sapiens
  source 1..5614: mol_type = unassigned DNA
agggcgttggggcagctcctgtgacagacggagctggagcggcggggcggcggcggagtccggcggccgggagagcgagtgagcgagcggaggagcagcgacacgggagtctagggagcgagaaggagaaggaggggagcgctcgggcgcgagcgagagaaaccgcgagcgccgagcttggactcgagccccggaacggctgaggagcccgcccgctcccctcccctccccctccccgggcccgggcccagcgcgccatcctcccccctccttccctccctccctccttcctccctcccctctccctccccctcccccgccggtggatgggagtgaaggacggaagaggccctgcggaggcggcggtgcagcgctccggtggaatgaatcttacttgttgaatatcttctggttactagttggattcatttgtgaaagaatcattttcccctgtgtggaagacacttagtggcatatttaaattataagtccacggatcaaaaagctttttgatttcccaaaggagggacataccactatatcagataagcttgacattacagccaagatggtgctgtcccagagacaacgagatgaactaaatcgagctatagcagattatcttcgttcaaatggctatgaagaggcatattcagtttttaaaaaggaagctgaattagatgtgaatgaagaattagataaaaagtatgctggtcttttggaaaaaaaatggacatctgttattagattacaaaagaaggttatggaattagaatcaaagctaaatgaagcaaaagaagaatttacgtcaggtggacctcttggtcagaaacgagacccaaaagaatggattccccgtccgccagaaaaatatgcattgagtggtcacaggagtccagtcactcgagtcattttccatcctgtgttcagtgttatggtctctgcttcagaggatgctacaattaaggtgtgggattatgagactggagattttgaacgaactcttaaaggacatacagactctgtacaggacatttcattcgaccacagcggcaagcttctggcttcctgttctgcagatatgaccattaaactatgggattttcagggctttgaatgcatcagaaccatgcacggccatgaccacaatgtttcttcagtagccatcatgcccaatggagatcatatagtgtctgcctcaagggataaaactataaaaatgtgggaagtgcaaactggctactgtgtgaagacattcacaggacacagagaatgggtacgtatggtacggccaaatcaagatggcactctgatagccagctgttccaatgaccagactgtgcgtgtatgggtcgtagcaacaaaggaatgcaaggctgagctccgagagcatgagcatgtggtagaatgcatttcctgggctccagaaagctcatattcctccatctctgaagcaacaggatctgagactaaaaaaagtggtaaacctgggccattcttgctgtctggatccagagacaagactattaagatgtgggatgtcagtactggcatgtgccttatgaccctcgtgggtcatgataactgggtacgtggagttctgttccattctggggggaagtttattttgagttgtgctgatgacaagaccctacgcgtatgggattacaagaacaagcgatgcatgaagaccctcaatgcgcatgaacactttgttacctccttggatttccacaagacggcaccctatgtcgtcactggcagcgtagatcaaacagtaaaagtgtgggagtgccgttgattgtgtctccttcggcccctcctccctcttttcctctggatgcactctgatgataccatggttaccccattgagctctgtttaaataaatattgtcctttcatgtaaattattctggatgtagattgagcttattaaatgttacacacaaagtattcatgcatggtgaatccaaattgtatactgtaaatttacatacgttgtctagaagtaccatagggtttaaaaacctgggctggcattggtcacaccaggcctaagaaggcagaagttgaatcaattgaactagggcactaaactgaatagttgacagtgtcattttatgttggattattaattcctgtttttctttctgctatctgttggtgcctgacttgatggcctcatttggggaaaagtggtggttattagggctttttctgaaatgtgtatctatgtaacatcacttaagtgtgcttaataaatcttctgtaaggattttagatgataaggctacaattcagaatcttctgaaccatctatgtaatgaatggggattatacattggaatttttgtcatgacacatttgccaaatcagtaggatatatttgttttggcagcctatcacgcagaggctagtggtatatttatgtaagaaaatgactgtaaatctcaagaaaaatctcagcagctaatagcaactcatttatttcattttggtcttaatgctttgtaaacaggtcaaaaaatactgtcatactctaagcttctattttccacactggacatacttctagttgtattctccatactattagactgtgtagtgatgtgacttccaagtagaatttaatctccccattgagtgtgtcatggtacaaatcactattcgtttttggtgttttttagggatgtgcaatgtgcattacataatgacagaaatactgagaaggttctgtgtgcccatttgaaaggagtgggaggaatacagcagtttgtttttcaacatgaatctgatattgatttaaactgtgtttcacttacaagttttaaaaaaatgacagggtttaatggagcgtgcataaaaatgtactgttttcaccttttgtttatatgtaaatgtttgtaagtatatgggcctatctgtaagtggataagtctgtatgtgtgtatcatacacatcaacctccatgtccttagtcctgggtttttgaaaaagtgctaaaacggacaagtagaataaatgttgctgtggaatgccatgctttagaacaaaccctttttgatcttaatgcttctgaaaactaggtctgactctggggatttttttccagccgaaggaaaatcacttccgttatgtccccctctaatttagccgctcgacattttacacaacccggatatgttgtatattttgacccaaagttacaggtaggtttaagagaatttttagccatgacttttggagcactattccattgtcagttattaataaagaattccattgcttagctaaccaacaggttttttttgtttccaagagagttatttgaaaagttaacagaacaatgagataacagtgacagtttaacaaagataaaattctgaactgcgttttattcatttgtgtactatgtgattttttaaatgtcccctttagtatttaatggaaaattggttcctgcaaaagacaaagggtgagagttagcgtcctgtagatacacacagagactaggccgtatattaactagaagcagctttatgtctagcttgtgtctttttgtttgtttgcttgtttgtttttagattcctgagagatgtctctggaagggaaagttttgagaactaatggctatttttgaggacaaaaattacatcttaagctaattccttaaatacatacagtaggtgaattttcaggacaatattgcctcacaaccctgcttacattgaaaagtctttttcccttagctcttctgactggatttttctacaaaaactatggaaaatatctttgttcttgtttgctgctattttctgtcctattttgagaaatataaatacatagaaatggtgcatcttaacatttgtttgtacatgtataaatgtcttgtattttaattcatttttagcatgaattgtttaagggtaagccacaacatctagaaatcactcatagatattgaacaataaaggagaatggtaccgatgcaggaggaagcaagcgtgtcttcccctgcagcacacagcgacttgcgttgacaaaggaggaggaaacgattactctgtaaacaaagttatccttacttgggagattgccacagcctgctgctgagttgagttaccagacatcctccatgtgagaagcagcgaacattgaatctcagggatggcccacaactgggtccacatgtaatgagccctgtttaataacgaaggggtgggggagagcagtccgtctacaacctggaatcagatttgcaaaatttcctgcactgctgtctgacactgtcctgttgatgccctttctgactgtgttctctgttttctctgtctgctgtctaaccctgtgccttgcctgggataaggacaatgatgaggttactggtttggattgtaagtagaggacttttattaattggtttagaggttcactgctgctttgtcactttctcaatcaaattggccacttaagaaataaagagctggtagaattgcatcctcagatgattattgactgtgtgtgtgtgtgaaaacagacattccagtgccacccaaatatatatctgtaacgtgcccaagaaatcctagctgcgctcttgagagtgcatgccatggagactggtttagacaccgcgtggagcctagttgcctgttgtcacggcatcttgcactttaggagactaagaccgtcctggttcgtctgtgtgtggtgtgaccaatggtgtgcccagagcactactctcaaaatcactagtgttagcaagtcgtcccgggctggggagcgttcgccgtagtctttggaagctttggctttagatttaccaagccccgcctccccgctgccagtgccctgctctcccgttcgcctctttctgtttctgtgtgaactttcccggtaatatcactcgttaaataggttttctttaaacttaattaaagaaaaactatttaaaggtaaaggatattttgttgacatcggtggctcgatcatccttaagcaactgaagttaaaattgttgaaggaaaaggcacttaaattggttactttcatgtccagctgtatataagtccagtgtgttcatctagatgacgcaaagaatctcctggtagagaagcgacatgtaaaaaactggtggaaaaaggttttggattttttttccagtggggtggggggagggcaagctggatttacaggtcacggctggactgaatgggcctttttatcttcccactgtatcatggaagtagctgcttgcttgtactgtccatccttcaggcatccctaaagctcactctgaagatgttagagacaaacacaaactcttcgagttaaagttgatcctgacactgacatgaaggcaagccttgatttcgtatgaacgttgctgaagtggtaattgaggaaaacagttccccagattgttaagagttcactgaagatattgacacaattttaaaaaatcagtaaaggaatgtatataatattgctctcgtgttttacagtaagatttgttgctctcagactgtgtaaaacaaaatttattcatgttttctgcatattaaaaaatcttattgtaccaactggtaaactattaaatgcctataaaacta

SEQ ID NO: 22684 - DNA, 1021 bp, Homo sapiens
  source 1..1021: mol_type = unassigned DNA
tctgcagatatgaccattaaactatgggattttcagggctttgaatgcatcagaaccatgcacggccatgaccacaatgtttcttcagtagccatcatgcccaatggagatcatatagtgtctgcctcaagggataaaactataaaaatgtgggaagtgcaaactggctactgtgtgaagacattcacaggacacagagaatgggtacgtatggtacggccaaatcaagatggcactctgatagccagctgttccaatgaccagactgtgcgtgtatgggtcgtagcaacaaaggaatgcaaggctgagctccgagagcatgagcatgtggtagaatgcatttcctgggctccagaaagctcatattcctccatctctgaagcaacaggatctgaggtgggtcatgataactgggtacgtggagttctgttccattctggggggaagtttattttgagttgtgctgatgacaagaccctacgcgtatgggattacaagaacaagcgatgcatgaagaccctcaatgcgcatgaacactttgttacctccttggatttccacaagacggcaccctatgtcgtcactggcagcgtagatcaaacagtaaaagtgtgggagtgccgttgattgtgtctccttcggcccctcctccctcttttcctctggatgcactctgatgataccatggttaccccattgagctctgtttaaataaatattgtcctttcatgtaaattattctggatgtagattgagcttattaaatgttacacacaaagtattcatgcatggtgaatccaaattgtatactgtaaatttacatacgttgtctagaagtaccatagggtttaaaaacctgggctggcattggtcacaccaggcctaagaaggcagaagttgaatcaattgaactagggcactaaactgaatagttgacagtgtcattttatgttggattattaattcctgtttttctttctgctatctgttggtgcctgacttgatggcctcatttggggaa

SEQ ID NO: 22685 - DNA, 1539 bp, Homo sapiens
  source 1..1539: mol_type = unassigned DNA
cctcctgtgcactcattacctgcttcctgagctccccgagaagtcatccaggacctccccgagaagccgtccaggaaacatgctctcaggggacccccatctgcctcagcctctttgtcactgcctggaccattgtccctgctgtttctcaggcaccaccaggaccagctgatcattccagcccacagcaatggagccacatgactcctcccacatggactctgagttccgatacactctcttcccgattgtttacagcatcatctttgtgctcggggtcattgctaatggctacgtgctgtgggtctttgcccgcctgtacccttgcaagaaattcaatgagataaagatcttcatggtgaacctcaccatggcggacatgctcttcttgatcaccctgccactttggattgtctactaccaaaaccagggcaactggatactccccaaattcctgtgcaacgtggctggctgccttttcttcatcaacacctactgctctgtggccttcctgggcgtcatcacttataaccgcttccaggcagtaactcggcccatcaagactgctcaggccaacacccgcaagcgtggcatctctttgtccttggtcatctgggtggccattgtgggagctgcatcctacttcctcatcctggactccaccaacacagtgcccgacagtgctggctcaggcaacgtcactcgctgctttgagcattacgagaagggcagcgtgccagtcctcatcatccacatcttcatcgtgttcagcttcttcctggtcttcctcatcatcctcttctgcaacctggtcatcatccgtaccttgctcatgcagccggtgcagcagcagcgcaacgctgaagtcaagcgccgggcgctgtggatggtgtgcacggtcttggcggtgttcatcatctgcttcgtgccccaccacgtggtgcagctgccctggacccttgctgagctgggcttccaggacagcaaattccaccaggccattaatgatgcacatcaggtcaccctctgcctccttagcaccaactgtgtcttagaccctgttatctactgtttcctcaccaagaagttccgcaagcacctcaccgaaaagttctacagcatgcgcagtagccggaaatgctcccgggccaccacggatacggtcactgaagtggttgtgccattcaaccagatccctggcaattccctcaaaaattagtccctgcttccaggcctgaagtcttctcctccatgaacatcatggactgagctgggggaagaagggatatctactgtggtctgggcaccacctctgtgggcactggtgggccattagatttggaggctacctcacctgggcagggatgatggcagagccaggctgttggaaaatccagaactcaaatgagccccttcatccgcctgtgggcgcatactacagtaactgtgactgatgactttatcctgagtcccttaatcttatggggccggaaggaatgtcagggccaggtgcagaccttgggggaagactttaaacca

SEQ ID NO: 22686 - DNA, 4491 bp, Homo sapiens
  source 1..4491: mol_type = unassigned DNA
ggcacatgctcgctgtctgtgtcttgtcatctcgtcttttgtcttggatcttaccttgtctttgtccctgaatctccttgttcctctcatctctcccggtgtttacatctgtctttttccctgagcctcgctccctccatccattcctccgccctctcattttttttcccgactccctcctgcctcctccctttctcctttgattttcctggtccctcatctctcctccctcctctttctcactctcatgctccctttttcgctctcttgagtacatgcacttgctttctctctcttgcttttcctctttctcaccttagctcctggcctcgggcgctgtctacaccccaccccatccctcgctctttgagaagcctctgtgcagtgcccaggtcctggcggcccagcttggaagttcctgtggtaccccttgagaggccctagggccacagcatttcctcccaggggtgacttggtagtgatacgctctgtttcttcacttctgcaattgccagacagcatagaggctgaggctggggccaggacccagacagagacacacggtcactgcagctgaagccgctgcccctgctacaggcaccaccaggaccagctgatcattccagcccacagcaatggagccacatgactcctcccacatggactctgagttccgatacactctcttcccgattgtttacagcatcatctttgtgctcggggtcattgctaatggctacgtgctgtgggtctttgcccgcctgtacccttgcaagaaattcaatgagataaagatcttcatggtgaacctcaccatggcggacatgctcttcttgatcaccctgccactttggattgtctactaccaaaaccagggcaactggatactccccaaattcctgtgcaacgtggctggctgccttttcttcatcaacacctactgctctgtggccttcctgggcgtcatcacttataaccgcttccaggcagtaactcggcccatcaagactgctcaggccaacacccgcaagcgtggcatctctttgtccttggtcatctgggtggccattgtgggagctgcatcctacttcctcatcctggactccaccaacacagtgcccgacagtgctggctcaggcaacgtcactcgctgctttgagcattacgagaagggcagcgtgccagtcctcatcatccacatcttcatcgtgttcagcttcttcctggtcttcctcatcatcctcttctgcaacctggtcatcatccgtaccttgctcatgcagccggtgcagcagcagcgcaacgctgaagtcaagcgccgggcgctgtggatggtgtgcacggtcttggcggtgttcatcatctgcttcgtgccccaccacgtggtgcagctgccctggacccttgctgagctgggcttccaggacagcaaattccaccaggccattaatgatgcacatcaggtcaccctctgcctccttagcaccaactgtgtcttagaccctgttatctactgtttcctcaccaagaagttccgcaagcacctcaccgaaaagttctacagcatgcgcagtagccggaaatgctcccgggccaccacggatacggtcactgaagtggttgtgccattcaaccagatccctggcaattccctcaaaaattagtccctgcttccaggcctgaagtcttctcctccatgaacatcatggactgagctgggggaagaagggatatctactgtggtctgggcaccacctctgtgggcactggtgggccattagatttggaggctacctcacctgggcagggatgatggcagagccaggctgttggaaaatccagaactcaaatgagccccttcatccgcctgtgggcgcatactacagtaactgtgactgatgactttatcctgagtcccttaatcttatggggccggaaggaatgtcagggccaggtgcagaccttgggggaagactttaaaccacctagttctccccgatggggcatcggtctaaagctttgggggagtgggcgcagtggctcacacctgtaatcccagcactttgggaggccgaggtgggcagatcatgggtcaagagatcgagaccatcctggccaacattgtaaaaccccatctctactaaaacatacaaaaattagccgggcatggtggcacacgcctgtagtcccagctactcaggaggctgaggcaggagaatcgcttgaacctgggaggcagaggttgcagtgaacctagattgcaccattgcactctagcctggcaacagagcgagattccatctcaaaaaaaaaaaaaaaaaaaaaaaaaaagctttgggcaactactctcaagtgatagaggtagactgggttaggaaaggacactgccctcactgtatggcactaccttggggcagacttttgagctaagatgttgccatcctctctccaccctccggcacaaggtctttgtgacctttctcaggggaaggggcttgatggaaccttctctgactcatctggcaacctgtccctaatggtgaccaaagaagataaaacatgaacagaccaaaagctaggacaagagcttgcttcccaagacagacgtgtctgtctgcaaaggccttgcctctagtccagtcagctctgggggagtgggaaggagatgcccacctcctctttctgtctcaacaatagtccctaattaagtaccttctgtggggcagccacccactgagggtgggcaaaggccccttgaaagcaaaattggggctgggctcagtggctcatgcctataatcccagcactttgggaggccaaggcaggcagatcacctgaggtccggagttcgagaccagcctggccaacgtggtgaaacgccatctccactaagaatacaaaaatatggctcatgcctgtaatcccagtactttgggaggctgaggtgggccgatcatttgaagttaggagtttgagaccagcctgaccaatatggtaaaaccccgtctctactaaaaatacaaaaaaattagcctggcgtggtggcgcatgcctgtagtcccataggctgtagctactgggaggaggcggagcttgcagtgagccgagatcacgccactgctctccagcctgggcgacagagtgagactctgtgtcaaaaacaaacaaacaaacaaaaaaggcaaaattggagctgtccaggccaggacaccccgatgtccaggggcttccatacgaacaggcacatgggctgggaagtacatgaggcccctgggtagaagggtctgtcagttctctcctcccttgccctctgggagggtcctcctaacatagcttccaggaggtgggaggagcagttactgtcagcaggtgtcagccaggtgtcagcttctcctggggatctctagatgtctgcttgtgatttttggcaagtatatgcaaatgagcctcctctcctgccctgagacaagtatctgcagtgtgaacctggcagcctcagacccaaggggctcagaggaaacttctctggtttctagagctctgtgctccttcagagaagtcttccttccttccagtcagtgtccctgtgaagctgggatactcatttcctgtgtaccgggcaaacaccggattgctgattttgagaaatgcctctcgatggacctgtaacctgctggagtctgggatggtagctgtgggctggacttggctgatgggatgacccggtggctagtgcagcatcacacaagcctggttcaagtcttggctgtgtcatttcctgctgagggaccaggcactgaatttcctacctcttagggtcattacctatgaggttaaagctacctcatgggattgttatacgccactaatgttgaggcagacacctcttggcagggtgactgctcatcttagaccctccccttttctgcgaatttgggccccttgatcctctgatgggagctgaaaggatgagaggtgggcatctagatttagggaggctgttcaggctttgcaggtcccttacctgaacacatagaaaccctggagctgtgactgtgtccatgtgtgtgtgtttgtctgtgtgtgttgcgggggatgggcacctgcatgaatgtggtagagaaaatggctctgctcagagggaagatacgcatagcaaggcagggaccagaggaatcacaggcgcctggagagcagccgggcaccgcctccagggacctgccggcttccctcagtcctccaggggcccagcactcttcctttaggccctgtgagcgtcccttgtcaggatacattctctcattttgctgaagctgatttgattgggtgtctgtttctcgcagccaaaagagctctgaatgaggaaagtgcttctgtgctaactccccgcgtctcctgaatttcagtcattcatgtacccgcctcgaaatttttgcaatatctgtgtaccaactgtccatttacttaataaagaagttttctttaaattaa

SEQ ID NO: 22687 - DNA, 4191 bp, Homo sapiens
  source 1..4191: mol_type = unassigned DNA
gctgctgctcattggagggtagagcagagtgagtcacacacctgtgcctgggcccgtcctctgcctcctgtgcactcattacctgcttcctgagctccccgagaagtcatccaggacctccccgagaagccgtccaggaaacatgctctcaggggacccccatctgcctcagcctctttgtcactgcctggaccattgtccctgctgtttctcagacagcatagaggctgaggctggggccaggacccagacagagacacacggtcactgcagctgaagccgctgcccctgctacaggcaccaccaggaccagctgatcattccagcccacagcaatggagccacatgactcctcccacatggactctgagttccgatacactctcttcccgattgtttacagcatcatctttgtgctcggggtcattgctaatggctacgtgctgtgggtctttgcccgcctgtacccttgcaagaaattcaatgagataaagatcttcatggtgaacctcaccatggcggacatgctcttcttgatcaccctgccactttggattgtctactaccaaaaccagggcaactggatactccccaaattcctgtgcaacgtggctggctgccttttcttcatcaacacctactgctctgtggccttcctgggcgtcatcacttataaccgcttccaggcagtaactcggcccatcaagactgctcaggccaacacccgcaagcgtggcatctctttgtccttggtcatctgggtggccattgtgggagctgcatcctacttcctcatcctggactccaccaacacagtgcccgacagtgctggctcaggcaacgtcactcgctgctttgagcattacgagaagggcagcgtgccagtcctcatcatccacatcttcatcgtgttcagcttcttcctggtcttcctcatcatcctcttctgcaacctggtcatcatccgtaccttgctcatgcagccggtgcagcagcagcgcaacgctgaagtcaagcgccgggcgctgtggatggtgtgcacggtcttggcggtgttcatcatctgcttcgtgccccaccacgtggtgcagctgccctggacccttgctgagctgggcttccaggacagcaaattccaccaggccattaatgatgcacatcaggtcaccctctgcctccttagcaccaactgtgtcttagaccctgttatctactgtttcctcaccaagaagttccgcaagcacctcaccgaaaagttctacagcatgcgcagtagccggaaatgctcccgggccaccacggatacggtcactgaagtggttgtgccattcaaccagatccctggcaattccctcaaaaattagtccctgcttccaggcctgaagtcttctcctccatgaacatcatggactgagctgggggaagaagggatatctactgtggtctgggcaccacctctgtgggcactggtgggccattagatttggaggctacctcacctgggcagggatgatggcagagccaggctgttggaaaatccagaactcaaatgagccccttcatccgcctgtgggcgcatactacagtaactgtgactgatgactttatcctgagtcccttaatcttatggggccggaaggaatgtcagggccaggtgcagaccttgggggaagactttaaaccacctagttctccccgatggggcatcggtctaaagctttgggggagtgggcgcagtggctcacacctgtaatcccagcactttgggaggccgaggtgggcagatcatgggtcaagagatcgagaccatcctggccaacattgtaaaaccccatctctactaaaacatacaaaaattagccgggcatggtggcacacgcctgtagtcccagctactcaggaggctgaggcaggagaatcgcttgaacctgggaggcagaggttgcagtgaacctagattgcaccattgcactctagcctggcaacagagcgagattccatctcaaaaaaaaaaaaaaaaaaaaaaaaaaagctttgggcaactactctcaagtgatagaggtagactgggttaggaaaggacactgccctcactgtatggcactaccttggggcagacttttgagctaagatgttgccatcctctctccaccctccggcacaaggtctttgtgacctttctcaggggaaggggcttgatggaaccttctctgactcatctggcaacctgtccctaatggtgaccaaagaagataaaacatgaacagaccaaaagctaggacaagagcttgcttcccaagacagacgtgtctgtctgcaaaggccttgcctctagtccagtcagctctgggggagtgggaaggagatgcccacctcctctttctgtctcaacaatagtccctaattaagtaccttctgtggggcagccacccactgagggtgggcaaaggccccttgaaagcaaaattggggctgggctcagtggctcatgcctataatcccagcactttgggaggccaaggcaggcagatcacctgaggtccggagttcgagaccagcctggccaacgtggtgaaacgccatctccactaagaatacaaaaatatggctcatgcctgtaatcccagtactttgggaggctgaggtgggccgatcatttgaagttaggagtttgagaccagcctgaccaatatggtaaaaccccgtctctactaaaaatacaaaaaaattagcctggcgtggtggcgcatgcctgtagtcccataggctgtagctactgggaggaggcggagcttgcagtgagccgagatcacgccactgctctccagcctgggcgacagagtgagactctgtgtcaaaaacaaacaaacaaacaaaaaaggcaaaattggagctgtccaggccaggacaccccgatgtccaggggcttccatacgaacaggcacatgggctgggaagtacatgaggcccctgggtagaagggtctgtcagttctctcctcccttgccctctgggagggtcctcctaacatagcttccaggaggtgggaggagcagttactgtcagcaggtgtcagccaggtgtcagcttctcctggggatctctagatgtctgcttgtgatttttggcaagtatatgcaaatgagcctcctctcctgccctgagacaagtatctgcagtgtgaacctggcagcctcagacccaaggggctcagaggaaacttctctggtttctagagctctgtgctccttcagagaagtcttccttccttccagtcagtgtccctgtgaagctgggatactcatttcctgtgtaccgggcaaacaccggattgctgattttgagaaatgcctctcgatggacctgtaacctgctggagtctgggatggtagctgtgggctggacttggctgatgggatgacccggtggctagtgcagcatcacacaagcctggttcaagtcttggctgtgtcatttcctgctgagggaccaggcactgaatttcctacctcttagggtcattacctatgaggttaaagctacctcatgggattgttatacgccactaatgttgaggcagacacctcttggcagggtgactgctcatcttagaccctccccttttctgcgaatttgggccccttgatcctctgatgggagctgaaaggatgagaggtgggcatctagatttagggaggctgttcaggctttgcaggtcccttacctgaacacatagaaaccctggagctgtgactgtgtccatgtgtgtgtgtttgtctgtgtgtgttgcgggggatgggcacctgcatgaatgtggtagagaaaatggctctgctcagagggaagatacgcatagcaaggcagggaccagaggaatcacaggcgcctggagagcagccgggcaccgcctccagggacctgccggcttccctcagtcctccaggggcccagcactcttcctttaggccctgtgagcgtcccttgtcaggatacattctctcattttgctgaagctgatttgattgggtgtctgtttctcgcagccaaaagagctctgaatgaggaaagtgcttctgtgctaactccccgcgtctcctgaatttcagtcattcatgtacccgcctcgaaatttttgcaatatctgtgtaccaactgtccatttacttaataaagaagttttctttaaattaa

SEQ ID NO: 22688 - DNA, 1875 bp, Homo sapiens
  source 1..1875: mol_type = unassigned DNA
acttctgccttgttatcagaggagcgaggatgtggcctgtgtgccgcctaatcatgcctagaactgtctgcacctgctgatcttttgcttctgcgaactggctgcacctgctgttctcctgctcataccctagcccgtgcttaccctaattccctgttctcctgcctcaccaccagaggcccgggttgtctgcacagtctcattttccacgttattcctgtaatgaacccgtcctcccacccccaccagcagttacagggctgggtgcggagaccaactctggccagacacagaggagcagcaagaacccggggcaacggtcctaaaccgaatcctcccgcttcggcgtcccaggagcccgcccctcgcccgccgcctcccctgcgtccccgccccgcgcagccgccgcgctcctgcgctccgaggtccgaggttcccgagatgaaggtctggctgctgcttggtcttctgctggtgcacgaagcgctggaggatgttactggccaacaccttcccaagaacaagcgtccaaaagaaccaggagagaatagaatcaaacctaccaacaagaaggtgaagcccaaaattcctaaaatgaaggacagggactcagccaattcagcaccaaagacgcagtctatcatgatgcaagtgctggataaaggtcgcttccagaaacccgccgctaccctgagtctgctggcggggcaaactgtagagcttcgatgtaaagggagtagaattgggtggagctaccctgcgtatctggacacctttaaggattctcgcctcagcgtcaagcagaatgagcgctacggccagttgactctggtcaactccacctcggcagacacaggtgaattcagctgctgggtgcagctctgcagcggctacatctgcaggaaggacgaggccaaaacgggctccacctacatcttttttacagagaaaggagaactctttgtaccttctcccagctacttcgatgttgtctacttgaacccggacagacaggctgtggttccttgtcgggtgaccgtgctgtcggccaaagtcacgctccacagggaattcccagccaaggagatcccagccaatggaacggacattgtttatgacatgaagcggggctttgtgtatctgcaacctcattccgagcaccagggtgtggtttactgcagggcggaggccgggggcagatctcagatctccgtcaagtaccagctgctctatgtggcggttcccagtggccctccctcaacaaccatcttggcttcttcaaacaaagtgaaaagtggggacgacatcagtgtgctctgcactgtcctgggggagcccgatgtggaggtggagttcacctggatcttcccagggcagaaggatgaaaggcctgtgacgatccaagacacttggaggttgatccacagaggactgggacacaccacgagaatctcccagagtgtcattacagtggaagactttgagacgattgatgcaggatattacatttgcactgctcagaatcttcaaggacagaccacagtagctaccactgttgagttttcctgacttggaaaaggaaatgtaatgaacttatggaaagcccatttgtgtacacagtcagctttggggttccttttattagtgctttgccagaggctgatgtcaagcaccacaccccaaccccagcgtctcgtgagtccgacccagacatccaaactaaaaggaagtcatccagtctattcacagaagtgttaacttttctaacagaaagcatgattttgattgcttacctacatacgtgttcctagtttttatacatgtgtaaacaattttatataatcaatcatttctattaaatgagcacgtttttgt

SEQ ID NO: 22689 - DNA, 1495 bp, Homo sapiens
  source 1..1495: mol_type = unassigned DNA
cctgcgtccccgccccgcgcagccgccgcgctcctgcgctccgaggtccgaggttcccgagatgaaggtctggctgctgcttggtcttctgctggtgcacgaagcgctggaggatgttactggccaacaccttcccaagaacaagcgtccaaaagaaccaggagagaatagaatcaaacctaccaacaagaaggtgaagcccaaaattcctaaaatgaaggacagggactcagccaattcagcaccaaagacgcagtctatcatgatgcaagtgctggataaaggtcgcttccagaaacccgccgctaccctgagtctgctggcggggcaaactgtagagcttcgatgtaaagggagtagaattgggtggagctaccctgcgtatctggacacctttaaggattctcgcctcagcgtcaagcagaatgagcgctacggccagttgactctggtcaactccacctcggcagacacaggtgaattcagctgctgggtgcagctctgcagcggctacatctgcaggaaggacgaggccaaaacgggctccacctacatcttttttacagagaaaggagaactctttgtaccttctcccagctacttcgatgttgtctacttgaacccggacagacaggctgtggttccttgtcgggtgaccgtgctgtcggccaaagtcacgctccacagggaattcccagccaaggagatcccagccaatggaacggacattgtttatgacatgaagcggggctttgtgtatctgcaacctcattccgagcaccagggtgtggtttactgcagggcggaggccgggggcagatctcagatctccgtcaagtaccagctgctctatgtggcggttcccagtggccctccctcaacaaccatcttggcttcttcaaacaaagtgaaaagtggggacgacatcagtgtgctctgcactgtcctgggggagcccgatgtggaggtggagttcacctggatcttcccagggcagaaggatgaaaggcctgtgacgatccaagacacttggaggttgatccacagaggactgggacacaccacgagaatctcccagagtgtcattacagtggaagactttgagacgattgatgcaggatattacatttgcactgctcagaatcttcaaggacagaccacagtagctaccactgttgagttttcctgacttggaaaaggaaatgtaatgaacttatggaaagcccatttgtgtacacagtcagctttggggttccttttattagtgctttgccagaggctgatgtcaagcaccacaccccaaccccagcgtctcgtgagtccgacccagacatccaaactaaaaggaagtcatccagtctattcacagaagtgttaacttttctaacagaaagcatgattttgattgcttacctacatacgtgttcctagtttttatacatgtgtaaacaattttatataatcaatcatttctattaaatgagcacgtttttgt

SEQ ID NO: 22690 - DNA, 1905 bp, Homo sapiens
  source 1..1905: mol_type = unassigned DNA
acttctgccttgttatcagaggagcgaggatgtggcctgtgtgccgcctaatcatgcctagaactgtctgcacctgctgatcttttgcttctgcgaactggctgcacctgctgttctcctgctcataccctagcccgtgcttaccctaattccctgttctcctgcctcaccaccagaggcccgggttgtctgcacagtctcattttccacgttattcctgtaatgaacccgtcctcccacccccaccagcagttacagggctgggtgcggagaccaactctggccagacacagaggagcagcaagaacccggggcaacggtcctgtgaaaaccgaatcctcccgcttcggcgtcccaggagcccgcccctcgcccgccgcctcccctgcgtccccgccccgcgcagccgccgcgctcctgcgctccgaggtccgaggttcccgagatgaaggtctggctgctgcttggtcttctgctggtgcacgaagcgctggaggatgttactggccaacaccttcccaagaacaagcgtccaaaagaaccaggagagaatagaatcaaacctaccaacaagaaggtgaagcccaaaattcctaaaatgaaggacagggactcagccaattcagcaccaaagacgcagtctatcatgatgcaagtgctggataaaggtcgcttccagaaacccgccgctaccctgagtctgctggcggggcaaactgtagagcttcgatgtaaagggagtagaattgggtggagctaccctgcgtatctggacacctttaaggattctcgcctcagcgtcaagcagaatgagcgctacggccagttgactctggtcaactccacctcggcagacacaggtgaattcagctgctgggtgcagctctgcagcggctacatctgcaggaaggacgaggccaaaacgggctccacctacatcttttttacagagaaaggagaactctttgtaccttctcccagctacttcgatgttgtctacttgaacccggacagacaggctgtggttccttgtcgggtgaccgtgctgtcggccaaagtcacgctccacagggaattcccagccaaggagatcccagccaatggaacggacattgtttatgacatgaagcggggctttgtgtatctgcaacctcattccgagcaccagggtgtggtttactgcagggcggaggccgggggcagatctcagatctccgtcaagtaccagctgctctatgtggcggttcccagtggccctccctcaacaaccatcttggcttcttcaaacaaagtgaaaagtggggacgacatcagtgtgctctgcactgtcctgggggagcccgatgtggaggtggagttcacctggatcttcccagggcagaaggatgaaaggcctgtgacgatccaagacacttggaggttgatccacagaggactgggacacaccacgagaatctcccagagtgtcattacagtggaagactttgagacgattgatgcaggatattacatttgcactgctcagaatcttcaaggacagaccacagtagctaccactgttgagttttcctgacttggaaaaggaaatgtaatgaacttatggaaagcccatttgtgtacacagtcagctttggggttccttttattagtgctttgccagaggctgatgtcaagcaccacaccccaaccccagcgtctcgtgagtccgacccagacatccaaactaaaaggaagtcatccagtctattcacagaagtgttaacttttctaacagaaagcatgattttgattgcttacctacatacgtgttcctagtttttatacatgtgtaaacaattttatataatcaatcatttctattaaatgagcacgtttttgtaaaaaataaaaagtgggataagtgtt

SEQ ID NO: 22691 - DNA, 4183 bp, Homo sapiens
  source 1..4183: mol_type = unassigned DNA
atgtaacaggtcatgtggcagcctcctagggacacgcgtggggtctggagcgggacacgcgtgtgcagccgggccttacgtgtggctcaaggggcggtgggcgagagagacgtggacacaagtggggtggggcacgtgagggtctggggaatagaaccaggggttccatgcgccctcctccttgtctggggcgggtcttaggttggcgggagagcccagcggggacctagcgacaaggggggctggcagcctccggggctctgggccctgggagagggcggggggtgggggggattagcgttgcctgagcggcgcgtagggggtagggggagggactgagaggcgggcgggcctggagcaaacgggagccgcgctgccttcacagctcagctgggcccagcctctcctctgtctctcctcggtctcagctctgggcgagcagcggcctgtctgaagagcatgcagcccccttactccccgcctggcctcgccatccctgcccccccagcctgacccccggccccagcatggcccagggtgccatgcgcttctgctcggaaggcgactgtgccatctccccaccacgatgcccacgccgctggctccccgaaggcccggtgccccagagccccccagccagcatgtatggcagcacaggctccttgctacggcgagtggcaggtccaggtcctcgaggccgggaactgggacgtgtgacagcaccctgtacacctctgcgtggccccccctcaccccgtgttgctccctcaccctgggcaccctcttcacccactgggcagcccccacccggggcccagagctctgtggtcatcttccgctttgtggagaaggccagtgtgaggccactgaatgggctacctgctccagggggcttgagtcggagctgggatctgggtggggtttctcctcccaggcccaccccagcccttgggcctggctccaaccggaagttacggctggaagcatccacatcagacccactccccgccagaggaggctcggccctacctggcagccggaaccttgtacatgggccgccagccccaccccaggttggagcagatggcctttactcctctctccccaatgggctggggggcccccctgagcgcctggccacactcttcggaggacctgctgacactggattcctgaaccagggggatacctggtcctccccccgggaagtctcctctcatgcccagagaatcgctagagccaaatgggaattcttctatggctccttggacccccccagctcaggtgctaagcccccagagcaggcccccccatctccacctggggtgggctcaaggcagggctctggggtggctgtggggcgagcagccaagtactccgagacagacctggacacggtgcccctgaggtgctaccgcgagactgacatcgatgaggtgctggctgagcgggaggaggccgactcggccatcgaaagtcagcccagctctgagggcccaccaggcactgcctacccacctgccccacggcccggcccactccctggccctcatcccagcctcggcagtggcaatgaggatgaggacgacgatgaggcaggtggggaagaagatgtggacgacgaggtgtttgaggcctctgaaggggcccggccagggagccggatgcctctcaagtcacctgtgccctttctacctgggacgagcccctcggctgatgggcctgactctttcagttgtgtgttcgaagccatcctggagtcacaccgggccaaaggcacctcctataccagcctcgcctcgctggaggccttggcctcacctggcccaacccagagccccttcttcacctttgagctgcctccccaaccccctgcaccccggcccgacccaccagctcccgccccacttgcccctcttgaaccggattctggtaccagctctgctgctgatggtccttggacacagagaggggaggaggaggaggcagaggccagagccaagctggccccagggagggagccccctagtccctgccactcagaggacagccttgggctgggggcagcaccccttggcagcgaaccacccctgagccagctggtgtccgactcagactcagagctggacagcacagagcggctggccctgggaagcacagacaccttgtccaatgggcagaaagcggacctggaggctgcgcagcgcctggccaagaggctgtaccgactagatggcttcaggaaggccgatgtggcccggcacctgggcaagaacaatgacttcagcaaactggtggctggggagtacctcaagttctttgtcttcacgggcatgactctggaccaagctctcagggtgtttctgaaggagctggccttaatgggtgagacccaggaacgagagcgcgtgctggcccacttctcccagcgatacttccagtgcaatcctgaagccctgtcctcagaggacggcgcccacacgctgacctgtgcgctcatgctgctcaacacggatctccacggccataacatcgggaagcgcatgacctgcggggacttcatcgggaacctggagggcctcaatgatggcggcgacttccctagggagctgctcaaggccttgtacagctccatcaagaatgagaagctgcagtgggccatagacgaggaggagctgagacgctctctgtctgagttggccgaccccaaccccaaggtcatcaagcggatcagcgggggcagtggcagtggctccagccctttcctggacctgactcccgagcctggggctgccgtctacaagcacggggccctggtgcgaaaggtgcacgcagaccctgactgcaggaagacacctcggggcaagcggggctggaagagcttccacgggatcctcaagggcatgatcctctacctgcagaaggaggagtacaagcctgggaaggccctttcagagacggagctcaagaatgccatcagcatccaccatgccctggccactcgtgccagtgactacagcaagaggccccacgtcttctacctgcgcacagctgactggcgggtcttcctcttccaggccccgagcctggagcagatgcagtcctggatcactcgcatcaatgtagtagccgctatgttctctgcgccccccttcccagctgctgttagctcccaaaagaagttcagccgccctctcctgcccagcgctgccacccgcctctcccaggaggagcaggtgcggacccacgaggccaagctgaaggccatggcaagtgagctgcgggagcaccgggccgcccagctgggcaagaagggccggggcaaggaggctgaagagcagcggcagaaggaggcctacctggagtttgagaaatcccgctacagcacctatgcagcgctgcttcgggtcaagctgaaggcaggcagtgaggagctggatgcagtggaggcagcactggcccaggccgggagcacagaggatggactccctccttctcactccagtccctccctgcagcccaaaccctccagccagccccgggctcagcgtcacagctcagagcctcggccaggggcaggcagtgggcggcggaagccctgagatgaggtttagggtggggagtgcctgctgggcacctgaaggatgacatggccctgcctgagcccgggccggcctcgggccacccacgagggcctcccggcctagggcccgaccgcgccggacgcggtgtccggggcagggcagggctggggcctgggcctcaggagcctaggctaggggcacctccgagagcccctttttgtgataatgttttgcactttttcgtacagggtgggcgggggcgggaggggctagcgcccctgaacttttgatgctttttttttgtgtgggagaggcctgatgccgtttctgctttctgctgagaccacccccaccctgacaccatcagtccccctctgtcctggggcctggcttggacagagaccaggatttggggctgagctggtttcccctccttcctccccaagggcttactctttctcttgctggaggtggaggaagggcgtccatgccaaggccccatacctgggccgggggcagcacggcctggctttcccccgcttcagtgggccttgccctttgtacagcctccacccccattaaaactgctctggacttgc

SEQ ID NO: 22692 - DNA, 3859 bp, Homo sapiens
  source 1..3859: mol_type = unassigned DNA
cgcaaggcagcgagaagggagaagctagcagcggggagagacaagaaaggggtcaagttagctcagctgggcccagcctctcctctgtctctcctcggtctcagctctgggcgagcagcggcctgtctgaagagcatgcagcccccttactccccgcctggcctcgccatccctgcccccccagcctgacccccggccccagcatggcccagggtgccatgcgcttctgctcggaaggcgactgtgccatctccccaccacgatgcccacgccgctggctccccgaaggcccggtgccccagagccccccagccagcatgtatggcagcacaggctccttgctacggcgagtggcaggtccaggtcctcgaggccgggaactgggacgtgtgacagcaccctgtacacctctgcgtggccccccctcaccccgtgttgctccctcaccctgggcaccctcttcacccactgggcagcccccacccggggcccagagctctgtggtcatcttccgctttgtggagaaggccagtgtgaggccactgaatgggctacctgctccagggggcttgagtcggagctgggatctgggtggggtttctcctcccaggcccaccccagcccttgggcctggctccaaccggaagttacggctggaagcatccacatcagacccactccccgccagaggaggctcggccctacctggcagccggaaccttgtacatgggccgccagccccaccccaggttggagcagatggcctttactcctctctccccaatgggctggggggcccccctgagcgcctggccacactcttcggaggacctgctgacactggattcctgaaccagggggatacctggtcctccccccgggaagtctcctctcatgcccagagaatcgctagagccaaatgggaattcttctatggctccttggacccccccagctcaggtgctaagcccccagagcaggcccccccatctccacctggggtgggctcaaggcagggctctggggtggctgtggggcgagcagccaagtactccgagacagacctggacacggtgcccctgaggtgctaccgcgagactgacatcgatgaggtgctggctgagcgggaggaggccgactcggccatcgaaagtcagcccagctctgagggcccaccaggcactgcctacccacctgccccacggcccggcccactccctggccctcatcccagcctcggcagtggcaatgaggatgaggacgacgatgaggcaggtggggaagaagatgtggacgacgaggtgtttgaggcctctgaaggggcccggccagggagccggatgcctctcaagtcacctgtgccctttctacctgggacgagcccctcggctgatgggcctgactctttcagttgtgtgttcgaagccatcctggagtcacaccgggccaaaggcacctcctataccagcctcgcctcgctggaggccttggcctcacctggcccaacccagagccccttcttcacctttgagctgcctccccaaccccctgcaccccggcccgacccaccagctcccgccccacttgcccctcttgaaccggattctggtaccagctctgctgctgatggtccttggacacagagaggggaggaggaggaggcagaggccagagccaagctggccccagggagggagccccctagtccctgccactcagaggacagccttgggctgggggcagcaccccttggcagcgaaccacccctgagccagctggtgtccgactcagactcagagctggacagcacagagcggctggccctgggaagcacagacaccttgtccaatgggcagaaagcggacctggaggctgcgcagcgcctggccaagaggctgtaccgactagatggcttcaggaaggccgatgtggcccggcacctgggcaagaacaatgacttcagcaaactggtggctggggagtacctcaagttctttgtcttcacgggcatgactctggaccaagctctcagggtgtttctgaaggagctggccttaatgggtgagacccaggaacgagagcgcgtgctggcccacttctcccagcgatacttccagtgcaatcctgaagccctgtcctcagaggacggcgcccacacgctgacctgtgcgctcatgctgctcaacacggatctccacggccataacatcgggaagcgcatgacctgcggggacttcatcgggaacctggagggcctcaatgatggcggcgacttccctagggagctgctcaaggccttgtacagctccatcaagaatgagaagctgcagtgggccatagacgaggaggagctgagacgctctctgtctgagttggccgaccccaaccccaaggtcatcaagcggatcagcgggggcagtggcagtggctccagccctttcctggacctgactcccgagcctggggctgccgtctacaagcacggggccctggtgcgaaaggtgcacgcagaccctgactgcaggaagacacctcggggcaagcggggctggaagagcttccacgggatcctcaagggcatgatcctctacctgcagaaggaggagtacaagcctgggaaggccctttcagagacggagctcaagaatgccatcagcatccaccatgccctggccactcgtgccagtgactacagcaagaggccccacgtcttctacctgcgcacagctgactggcgggtcttcctcttccaggccccgagcctggagcagatgcagtcctggatcactcgcatcaatgtagtagccgctatgttctctgcgccccccttcccagctgctgttagctcccaaaagaagttcagccgccctctcctgcccagcgctgccacccgcctctcccaggaggagcaggtgcggacccacgaggccaagctgaaggccatggcaagtgagctgcgggagcaccgggccgcccagctgggcaagaagggccggggcaaggaggctgaagagcagcggcagaaggaggcctacctggagtttgagaaatcccgctacagcacctatgcagcgctgcttcgggtcaagctgaaggcaggcagtgaggagctggatgcagtggaggcagcactggcccaggccgggagcacagaggatggactccctccttctcactccagtccctccctgcagcccaaaccctccagccagccccgggctcagcgtcacagctcagagcctcggccaggggcaggcagtgggcggcggaagccctgagatgaggtttagggtggggagtgcctgctgggcacctgaaggatgacatggccctgcctgagcccgggccggcctcgggccacccacgagggcctcccggcctagggcccgaccgcgccggacgcggtgtccggggcagggcagggctggggcctgggcctcaggagcctaggctaggggcacctccgagagcccctttttgtgataatgttttgcactttttcgtacagggtgggcgggggcgggaggggctagcgcccctgaacttttgatgctttttttttgtgtgggagaggcctgatgccgtttctgctttctgctgagaccacccccaccctgacaccatcagtccccctctgtcctggggcctggcttggacagagaccaggatttggggctgagctggtttcccctccttcctccccaagggcttactctttctcttgctggaggtggaggaagggcgtccatgccaaggccccatacctgggccgggggcagcacggcctggctttcccccgcttcagtgggccttgccctttgtacagcctccacccccattaaaactgctctggacttgc

SEQ ID NO: 22693 - DNA, 3365 bp, Homo sapiens
  source 1..3365: mol_type = unassigned DNA
caaatctggcgctgtccccttcagcaccacgcggagtccgcgccgcccctccccgcgctcagctgggcccagcctctcctctgtctctcctcggtctcagctctgggcgagcagcggcccaccccagcccttgggcctggctccaaccggaagttacggctggaagcatccacatcagacccactccccgccagaggaggctcggccctacctggcagccggaaccttgtacatgggccgccagccccaccccaggttggagcagatggcctttactcctctctccccaatgggctggggggcccccctgagcgcctggccacactcttcggaggacctgctgacactggattcctgaaccagggggatacctggtcctccccccgggaagtctcctctcatgcccagagaatcgctagagccaaatgggaattcttctatggctccttggacccccccagctcaggtgctaagcccccagagcaggcccccccatctccacctggggtgggctcaaggcagggctctggggtggctgtggggcgagcagccaagtactccgagacagacctggacacggtgcccctgaggtgctaccgcgagactgacatcgatgaggtgctggctgagcgggaggaggccgactcggccatcgaaagtcagcccagctctgagggcccaccaggcactgcctacccacctgccccacggcccggcccactccctggccctcatcccagcctcggcagtggcaatgaggatgaggacgacgatgaggcaggtggggaagaagatgtggacgacgaggtgtttgaggcctctgaaggggcccggccagggagccggatgcctctcaagtcacctgtgccctttctacctgggacgagcccctcggctgatgggcctgactctttcagttgtgtgttcgaagccatcctggagtcacaccgggccaaaggcacctcctataccagcctcgcctcgctggaggccttggcctcacctggcccaacccagagccccttcttcacctttgagctgcctccccaaccccctgcaccccggcccgacccaccagctcccgccccacttgcccctcttgaaccggattctggtaccagctctgctgctgatggtccttggacacagagaggggaggaggaggaggcagaggccagagccaagctggccccagggagggagccccctagtccctgccactcagaggacagccttgggctgggggcagcaccccttggcagcgaaccacccctgagccagctggtgtccgactcagactcagagctggacagcacagagcggctggccctgggaagcacagacaccttgtccaatgggcagaaagcggacctggaggctgcgcagcgcctggccaagaggctgtaccgactagatggcttcaggaaggccgatgtggcccggcacctgggcaagaacaatgacttcagcaaactggtggctggggagtacctcaagttctttgtcttcacgggcatgactctggaccaagctctcagggtgtttctgaaggagctggccttaatgggtgagacccaggaacgagagcgcgtgctggcccacttctcccagcgatacttccagtgcaatcctgaagccctgtcctcagaggacggcgcccacacgctgacctgtgcgctcatgctgctcaacacggatctccacggccataacatcgggaagcgcatgacctgcggggacttcatcgggaacctggagggcctcaatgatggcggcgacttccctagggagctgctcaaggccttgtacagctccatcaagaatgagaagctgcagtgggccatagacgaggaggagctgagacgctctctgtctgagttggccgaccccaaccccaaggtcatcaagcggatcagcgggggcagtggcagtggctccagccctttcctggacctgactcccgagcctggggctgccgtctacaagcacggggccctggtgcgaaaggtgcacgcagaccctgactgcaggaagacacctcggggcaagcggggctggaagagcttccacgggatcctcaagggcatgatcctctacctgcagaaggaggagtacaagcctgggaaggccctttcagagacggagctcaagaatgccatcagcatccaccatgccctggccactcgtgccagtgactacagcaagaggccccacgtcttctacctgcgcacagctgactggcgggtcttcctcttccaggccccgagcctggagcagatgcagtcctggatcactcgcatcaatgtagtagccgctatgttctctgcgccccccttcccagctgctgttagctcccaaaagaagttcagccgccctctcctgcccagcgctgccacccgcctctcccaggaggagcaggtgcggacccacgaggccaagctgaaggccatggcaagtgagctgcgggagcaccgggccgcccagctgggcaagaagggccggggcaaggaggctgaagagcagcggcagaaggaggcctacctggagtttgagaaatcccgctacagcacctatgcagcgctgcttcgggtcaagctgaaggcaggcagtgaggagctggatgcagtggaggcagcactggcccaggccgggagcacagaggatggactccctccttctcactccagtccctccctgcagcccaaaccctccagccagccccgggctcagcgtcacagctcagagcctcggccaggggcaggcagtgggcggcggaagccctgagatgaggtttagggtggggagtgcctgctgggcacctgaaggatgacatggccctgcctgagcccgggccggcctcgggccacccacgagggcctcccggcctagggcccgaccgcgccggacgcggtgtccggggcagggcagggctggggcctgggcctcaggagcctaggctaggggcacctccgagagcccctttttgtgataatgttttgcactttttcgtacagggtgggcgggggcgggaggggctagcgcccctgaacttttgatgctttttttttgtgtgggagaggcctgatgccgtttctgctttctgctgagaccacccccaccctgacaccatcagtccccctctgtcctggggcctggcttggacagagaccaggatttggggctgagctggtttcccctccttcctccccaagggcttactctttctcttgctggaggtggaggaagggcgtccatgccaaggccccatacctgggccgggggcagcacggcctggctttcccccgcttcagtgggccttgccctttgtacagcctccacccccattaaaactgctctggacttgc

SEQ ID NO: 22694 - DNA, 6665 bp, Homo sapiens
  source 1..6665: mol_type = unassigned DNA
aggctcggcagtcactgaacttgggagctgaagaatactggacggggcttcggagaggaaggatggtccaggcgcaccccaggggttgcgatgggctcttcttggtgtctgtatggttgctgcaatgctggggtgaaaacaacacggctagaagctcattctgaaatggggagcactgaaattttggaaaaggagaccccagaaaatctcagtaatggtaccagcagcaatgtggaagcagccaaaaggttggccaaacgcctttatcagctggacagattcaaaagatcagatgttgcaaaacaccttggcaagaacaacgaatttagcaaactagttgcagaagaatatctgaagttttttgattttacaggaatgacgctggatcagtcactcaggtatttctttaaagcattctctcttgtgggagaaactcaagaacgagagagagttttaatacacttctccaatagatatttttattgtaacccagataccattgcttcacaagatggagtccattgccttacctgtgcaataatgcttcttaataccgatctacatggccacaatattggaaagaagatgacctgtcaggagttcattgcaaatctgcaaggggtaaatgagggtgttgatttctccaaggatctgctgaaagctctgtacaactcaatcaagaatgagaagcttgaatgggcagtagatgatgaagagaaaaaaaagtctccctcagaaagtactgaggagaaagctaacggaacacatccaaagaccatcagtcgtattggaagtactactaacccatttttggacattcctcatgatccaaatgctgctgtgtacaaaagtggattcttggctcggaaaattcatgcagatatggatggaaagaagactccaagaggaaaacgaggatggaaaaccttttatgctgtactgaagggaacagttctttacttgcaaaaggatgaatacaagccagaaaaggccttgtctgaagaggacttgaaaaacgctgtgagtgtgcaccacgcattggcatccaaggccacggactatgagaagaaaccaaacgtgtttaaacttaaaactgccgactggagggtcttgctttttcaaactcagagcccagaggaaatgcaagggtggataaacaaaatcaattgtgtggcagctgtattttctgcaccaccatttccagcagcaatcggctctcagaagaagtttagccgcccacttctgcctgccactacaacaaaactgtctcaggaggagcaactgaagtcacatgaaagtaagctgaagcagatcaccaccgagctggccgagcaccgctcatatccccccgacaagaaggtcaaagccaaggacgtcgatgagtacaaactgaaagaccactatctggagtttgagaaaacccgctatgaaatgtatgtcagcattctcaaggaaggaggcaaagagctactgagtaacgatgaaagcgaggctgcaggactgaagaagtcgcactcgagtccttcgctgaacccggatacttctccaatcactgccaaagtcaagcgtaacgtgtcagagaggaaggatcaccgacctgaaacaccaagcattaagcaaaaagttacttagagtccatctgcggccaggaagtgctggtcatggagcaaaatagggtttttcaagatctttctggtaatccgtgaatatatttaaaaaaaaaaagtctgtgacaaaacggtgcattagtaattttttctattgtatatttttgttagtttctgtacagattgtctttgctcttgatttcttttgctttgatgatttttgcaacttgatagctaatgcaccttttctgtgaggaggaggggatcgtgatttcagaatgaattatgtatcccttctcttttggttttctcttgtttgcagtctgctcagttgttttatgtattctcatatcaactgttaaacttttttttaaggttaaagaatttaatccattgtgaaacacttaactggacaaactgtagttttagtaaattctagctggagttaatatacgcctttatatgtgaaatcttgcccagtcacagaggtagaattgagcactcacagatgctccagtaagaatcacagtgctgggaatctagttgctccaatatgaggcagcttcatgtgcagcttagcacttgttgttgagatcggaccctgctggaagcagggaaaagaagcgtgaagatcgtaggattgagaacttagggaagcacattagcttgcttgaagtgctgattccatttcagccaagcaagggaaagaggaagtggagtcattttgcctttgaaggctgaggaaagattgatacccagttaattttgtttgctaaaggatgggggcaataatcggcccttgaggagctgcagcagtaggcatgtgctcagtctgcaggaattgttacctcactcccacagggtctagactagaaatccatcatctctatcgttgatatccttccatccaggaatagatttttcttactctacatatgtgtgtgtgcgtgcgtgtgtgtgcgtgtgtgggcatggggttgtgtcctggttgtgatattgaggtcttccttcctaacaaattaatactaaaatgaaacagcttttcttgtgtccttaagacaaaataaggaaggaaaacgtagctgcagttgtccacgatggatattggttctttaaaatatatctgaaagtagtagtcagaatgaattatggttggaaaactgaggaatcttctggttgcaggtgcaaagtgactttgtttattcttgtctcagtctccttgatagccacttcactctgctactactcaactttctcctaaaaatacttcatctattttcagtcctttctttctgtctactcaaaatggttctattaactttgcagtcatgagcttgttccagttacagtccctttgaagttcagggtgataaacagaatattcttctgtagaggaagagaaaggagtgaaagtttagcccactgagacctagagctttgtgatttcctaaccttgaaactctgtaatccctaaagttaaaatctccgcaagtggcacaacttcagaactaatagtatcactttgatttttctttttcctcccttagaaagtttctctagttctatagtttatttgttgaaggtactatgaccaaagaatcagctgctctacaggaatagcatggttccagtgaattagagaaaacctgctgtaaagccatggtagtgtctaagtggtatgttattatgatgtactagcatttatttacagaattatttattaacgtttacttccttcccctctgtaaatgtccatgactattgcccagagaaggcttacccctctctagggttgcagttgctttctttgtaataagtattttgccacacctgtaaaaaaaaaaacctcacttttaactctctgccttgtttgggtaaaggcagtaactaagtttatgtttcagaactgcaaaacaaacaggatagttaccaatatggcccatgtatcagattgatttttgtagcctctcactgaatccaacatatccacaagcaagttatctgtctttctacctgataatctaaattatcaggatatttgttttctgcctaaatgtttatactaagccgaggggagagaggtacctagaccatgtcatctacaagcttcagtaactaaagaaaaaggaacttccctgagtggcttgaatgtgtttgcccacagtctatatctatgtatatagaatgtctgtatgtattttacttatttaatatacattgaatggtaccttgctacagtatttctgacatttagagtagtgttgaaatactcggctagcatcagcaccactatagcactgtccgtgtcatatgagtcactaatattaactccagggacttctggataggctaatagatcattggatacgaagggctcttttgaagcttcagtataccatgtttgcatagtttatctttaaaaacaactttaaaggttcttttgtgagccaggatctcagactgccgtagcatgatgctgtccatctttagcgcatgggctgagaacacctcttccctgaggcttctgaaggttgctgtctgtcatgagtgcatgaaggaggccaagagtttatgctatgggaggaaacagtcactgatttgcctagattctgagagtctggcccatagccaaccacattttcctttgggataatttatttcctgtggcatctagccagaagaaattgaggatgtttcctttcacagctgctccaagcctgttgcccaattcacggtacaagggagcaccccttccctttcctctgaaggtacgccacccacctccgtcgcccacctcagcgcccaggagccttgggacttccttccatatgataaatcattcttcttcacgtcaatacacttcatattaatttctagtacagaaaatcttgacagctatcagaatgccttggtcatagtgttgttgcaaaattgaccatacaggtggcccatgtataaaatctgaattttaggggtttgtccccacctcgcatgctggcttttacagggaggtgtctgggattcctcattagcaatcaaaacttaattactgggatgcagagtccttactttatcgccagcccgtaggcatttctgaagtgcacttttttgaaacatcattttgctaactctcagcagtgtctaattaaactgagcaatacttttgtgaattttaattaatctcagcaaaaccatgatgggagagagtcctctgatggaaatgtagtccctggattatgtgtaacctttttattcctcttagatgcagaggatagaaagcattttttggtgcagtggtcttgtggcaaacacaagaccctctatgcgtctccaactgttatcctaatctagaaaatgaggactggcccctgggcaaaagtgacatgaggaatttactctggaagaggaaaatctgggtggctttccaaggctaagataggtttgtatttcaccctgtggccaagctacagaacttctgagattgtggaagaatttttgcaaccagcagggaaagaggcctcttactgcctaaacacaaagttacactgagcttttctactgtcctttgcctattgctccctctatcatgtaaagatctgggaaggatgagaggcagggcctgcttgtcatgagctgcactcttttctttttaactaatcattgacaattggaagaaaattgacgttaaagaagtttctccattgtcttactaacaaaaccttttgggtttcattaattgtccttgaaattgagttcctttggcatttttccttgcagtcatcagttaagcatgttgcatcctgaattcacagaagtttagctttgcaggtttgaatctctgtaatttaactcccgtggacttggtcgagttttcagcaggttgggagccacctctcttcatttcagcagtgagtcatcccttgacttttcaaatgacagaattttttccaattgtaaaattagcactgtaaaacaaagaaccaaagtggcatcctaagagttgttaaacctgaagtctagtttatgaggaattgtccaagttggagtttaaatagtatctgcttttgtctcaaagcatctaagttattctgacagaaaatggtaagtcagctttgcaggcagatgcgcctctgggcctcctaccttgctccacagctttctggccatcttgtctcccaggccatgccactgctctgccacatgtcagcaaatttctttccaccagtcttatagcatcttacatgatcaaatcatcacagaataaccccgtgatagattattgatagcaatagagaggggctttgtcactgatttttctctcagattccttttccatctctcatccataaaggaaggactgaaatccaaaggcattctccttttgtacctacagtatccagaacccacgtgggcagccttctgcttatgacaataattggcccattgcatgcagagagaatgtcttcatagagagaatgtcattaaatacttgaatctgcatgacagtttgacttgaatgcaacagcaggaaaattttgcaagttacataattgtatatacagtaggttttcttaagtctcttcggttcatcctttgtaatttgtgtgtgtatctgtagtattgcaggcttttggagactattcttacaggcagtatgtcagtcatcaaagaaaatgctgtcacctgccattgttgtatttgtgggtatttatagttgtatgtatgtaaatgcatcagtgtgtagattgcatatcagtgtatggtacatgtacatcaaaattatttttgtccttaatcagtgtgatatgaaaagcaagtacaacctcataggactgattatataatgaagttgttgagagtatatatagtggtattgttttattaaacttaaactcaaataatattttgattaaaatttttaataagactttatgctagaaaattctttgagctttgaatcaccagggcaaaaatgactttcaactaaccttgtgaatcttttgcagtgtactgtgtgcaataccaagggcatagctccctgtaatttgggaaatacag

SEQ ID NO: 22695 - DNA, 11689 bp, Homo sapiens
  source 1..11689: mol_type = unassigned DNA
aacaaagagcacgcggcgctggccgccggcactcgcgccctgaggctgcggccccggagcgcccggcggcggtttcggcgcgcggccgggctggcgatggaagatggaaggaaggagcgcagcggcagagacatttgtttgggtgaacaatgcatctgcacattcccagagtgttgccaaggccaaatatgaatttttatttggcagatctgaagggaaagctccagatactagtgatcatggaggaagcactttactcccaccaaatgtcacaaatgaatttccagaatatgggaccatggaggaaggtggagaaggcctaagggcttctctggaatttgatggtgaggctctgccatgccacccacaagagcagcagggtgtccagcctcttactggctgccactctgggctcgacagtgttacagaaggaccaaaagatgtcagagaggccccctctcaaagtcatctcaaggaacaaagtttacagcccattgactctttgatttcagctctgaaagccacagaagccagaatcatttccggaacattacaggctacaaaggtactggaccaagatgctgtttctagtttttcagttcagcaggtggaaaaagagctggacactgccagtcgtaaaacacagagagtcaacaaaacgctccctgctggccaaaaaaatttaccagaaatacctctttcagctgaagtaacaacggaggaaagtttttatttgagcatccagaaagatctcaccgcgctgttaactggagacactcaggcagagatttcccagataatgaataatgggaggaaaggggctgtctgtgtgcaggagccatcttgtcctttggcctccctcgggagctcagcagtgacctgccactctgcaggcagtgttggtttcttgaaagagcagaggtctgctcttgggagagagcacccagggggatgtgatcgaagcagctccatgggacgcccaggccgggtcaaacatgtggaatttcaaggagtggaaatactgtggacaggaggagacaagagagagacccagcatcctatagattttgagacatcactgcaaagaacagcctctcctgacagcaaagagtcttccaaagtgccacgccatctcatctcatcagctggtttgtgtaattcaagtagtttaactgagaatgtttgggatgaatcctggaaagctccttcagagaggcctggcactagctcggggacattttcccctgtgcgtcttgatgagagtggagaggatgaagtcttcctacaggaaaacaaacagcatcttgagaagacacctaaaccagagagagacagggaaaggatcagcgaacaagaggagcacgttaagggggaagatgaagacatccttgggcctggatatacggaggactccaccgacgtgtacagctcccagtttgaaaccattttggacaacacttctttatactacagtgcagagtccctggagacattatactcagagcctgatagctattttagctttgaaatgcccctcactccaatgatacaacagcgcattaaagaaggtggtcagttcttggagaggacatcagggggaggacatcaggatatcctgagtgtgtctgcagatggtggcatcgtgatgggctattctagtggcgtcaccaatgggctgaatgatgccagcgactccatctacacgaaaggcaccccggagattgctttctggggaagcaatgctggggtgaaaacaacacggctagaagctcattctgaaatggggagcactgaaattttggaaaaggagaccccagaaaatctcagtaatggtaccagcagcaatgtggaagcagccaaaaggttggccaaacgcctttatcagctggacagattcaaaagatcagatgttgcaaaacaccttggcaagaacaacgaatttagcaaactagttgcagaagaatatctgaagttttttgattttacaggaatgacgctggatcagtcactcaggtatttctttaaagcattctctcttgtgggagaaactcaagaacgagagagagttttaatacacttctccaatagatatttttattgtaacccagataccattgcttcacaagatggagtccattgccttacctgtgcaataatgcttcttaataccgatctacatggccacaatattggaaagaagatgacctgtcaggagttcattgcaaatctgcaaggggtaaatgagggtgttgatttctccaaggatctgctgaaagctctgtacaactcaatcaagaatgagaagcttgaatgggcagtagatgatgaagagaaaaaaaagtctccctcagaaagtactgaggagaaagctaacggaacacatccaaagaccatcagtcgtattggaagtactactaacccatttttggacattcctcatgatccaaatgctgctgtgtacaaaagtggattcttggctcggaaaattcatgcagatatggatggaaagaagactccaagaggaaaacgaggatggaaaaccttttatgctgtactgaagggaacagttctttacttgcaaaaggatgaatacaagccagaaaaggccttgtctgaagaggacttgaaaaacgctgtgagtgtgcaccacgcattggcatccaaggccacggactatgagaagaaaccaaacgtgtttaaacttaaaactgccgactggagggtcttgctttttcaaactcagagcccagaggaaatgcaagggtggataaacaaaatcaattgtgtggcagctgtattttctgcaccaccatttccagcagcaatcggctctcagaagaagtttagccgcccacttctgcctgccactacaacaaaactgtctcaggaggagcaactgaagtcacatgaaagtaagctgaagcagatcaccaccgagctggccgagcaccgctcatatccccccgacaagaaggtcaaagccaaggacgtcgatgagtacaaactgaaagaccactatctggagtttgagaaaacccgctatgaaatgtatgtcagcattctcaaggaaggaggcaaagagctactgagtaacgatgaaagcgaggctgcaggactgaagaagtcgcactcgagtccttcgctgaacccggatacttctccaatcactgccaaagtcaagcgtaacgtgtcagagaggaaggatcaccgacctgaaacaccaagcattaagcaaaaagttacttagagtccatctgcggccaggaagtgctggtcatggagcaaaatagggtttttcaagatctttctggtaatccgtgaatatatttaaaaaaaaaaagtctgtgacaaaacggtgcattagtaattttttctattgtatatttttgttagtttctgtacagattgtctttgctcttgatttcttttgctttgatgatttttgcaacttgatagctaatgcaccttttctgtgaggaggaggggatcgtgatttcagaatgaattatgtatcccttctcttttggttttctcttgtttgcagtctgctcagttgttttatgtattctcatatcaactgttaaacttttttttaaggttaaagaatttaatccattgtgaaacacttaactggacaaactgtagttttagtaaattctagctggagttaatatacgcctttatatgtgaaatcttgcccagtcacagaggtagaattgagcactcacagatgctccagtaagaatcacagtgctgggaatctagttgctccaatatgaggcagcttcatgtgcagcttagcacttgttgttgagatcggaccctgctggaagcagggaaaagaagcgtgaagatcgtaggattgagaacttagggaagcacattagcttgcttgaagtgctgattccatttcagccaagcaagggaaagaggaagtggagtcattttgcctttgaaggctgaggaaagattgatacccagttaattttgtttgctaaaggatgggggcaataatcggcccttgaggagctgcagcagtaggcatgtgctcagtctgcaggaattgttacctcactcccacagggtctagactagaaatccatcatctctatcgttgatatccttccatccaggaatagatttttcttactctacatatgtgtgtgtgcgtgcgtgtgtgtgcgtgtgtgggcatggggttgtgtcctggttgtgatattgaggtcttccttcctaacaaattaatactaaaatgaaacagcttttcttgtgtccttaagacaaaataaggaaggaaaacgtagctgcagttgtccacgatggatattggttctttaaaatatatctgaaagtagtagtcagaatgaattatggttggaaaactgaggaatcttctggttgcaggtgcaaagtgactttgtttattcttgtctcagtctccttgatagccacttcactctgctactactcaactttctcctaaaaatacttcatctattttcagtcctttctttctgtctactcaaaatggttctattaactttgcagtcatgagcttgttccagttacagtccctttgaagttcagggtgataaacagaatattcttctgtagaggaagagaaaggagtgaaagtttagcccactgagacctagagctttgtgatttcctaaccttgaaactctgtaatccctaaagttaaaatctccgcaagtggcacaacttcagaactaatagtatcactttgatttttctttttcctcccttagaaagtttctctagttctatagtttatttgttgaaggtactatgaccaaagaatcagctgctctacaggaatagcatggttccagtgaattagagaaaacctgctgtaaagccatggtagtgtctaagtggtatgttattatgatgtactagcatttatttacagaattatttattaacgtttacttccttcccctctgtaaatgtccatgactattgcccagagaaggcttacccctctctagggttgcagttgctttctttgtaataagtattttgccacacctgtaaaaaaaaaaacctcacttttaactctctgccttgtttgggtaaaggcagtaactaagtttatgtttcagaactgcaaaacaaacaggatagttaccaatatggcccatgtatcagattgatttttgtagcctctcactgaatccaacatatccacaagcaagttatctgtctttctacctgataatctaaattatcaggatatttgttttctgcctaaatgtttatactaagccgaggggagagaggtacctagaccatgtcatctacaagcttcagtaactaaagaaaaaggaacttccctgagtggcttgaatgtgtttgcccacagtctatatctatgtatatagaatgtctgtatgtattttacttatttaatatacattgaatggtaccttgctacagtatttctgacatttagagtagtgttgaaatactcggctagcatcagcaccactatagcactgtccgtgtcatatgagtcactaatattaactccagggacttctggataggctaatagatcattggatacgaagggctcttttgaagcttcagtataccatgtttgcatagtttatctttaaaaacaactttaaaggttcttttgtgagccaggatctcagactgccgtagcatgatgctgtccatctttagcgcatgggctgagaacacctcttccctgaggcttctgaaggttgctgtctgtcatgagtgcatgaaggaggccaagagtttatgctatgggaggaaacagtcactgatttgcctagattctgagagtctggcccatagccaaccacattttcctttgggataatttatttcctgtggcatctagccagaagaaattgaggatgtttcctttcacagctgctccaagcctgttgcccaattcacggtacaagggagcaccccttccctttcctctgaaggtacgccacccacctccgtcgcccacctcagcgcccaggagccttgggacttccttccatatgataaatcattcttcttcacgtcaatacacttcatattaatttctagtacagaaaatcttgacagctatcagaatgccttggtcatagtgttgttgcaaaattgaccatacaggtggcccatgtataaaatctgaattttaggggtttgtccccacctcgcatgctggcttttacagggaggtgtctgggattcctcattagcaatcaaaacttaattactgggatgcagagtccttactttatcgccagcccgtaggcatttctgaagtgcacttttttgaaacatcattttgctaactctcagcagtgtctaattaaactgagcaatacttttgtgaattttaattaatctcagcaaaaccatgatgggagagagtcctctgatggaaatgtagtccctggattatgtgtaacctttttattcctcttagatgcagaggatagaaagcattttttggtgcagtggtcttgtggcaaacacaagaccctctatgcgtctccaactgttatcctaatctagaaaatgaggactggcccctgggcaaaagtgacatgaggaatttactctggaagaggaaaatctgggtggctttccaaggctaagataggtttgtatttcaccctgtggccaagctacagaacttctgagattgtggaagaatttttgcaaccagcagggaaagaggcctcttactgcctaaacacaaagttacactgagcttttctactgtcctttgcctattgctccctctatcatgtaaagatctgggaaggatgagaggcagggcctgcttgtcatgagctgcactcttttctttttaactaatcattgacaattggaagaaaattgacgttaaagaagtttctccattgtcttactaacaaaaccttttgggtttcattaattgtccttgaaattgagttcctttggcatttttccttgcagtcatcagttaagcatgttgcatcctgaattcacagaagtttagctttgcaggtttgaatctctgtaatttaactcccgtggacttggtcgagttttcagcaggttgggagccacctctcttcatttcagcagtgagtcatcccttgacttttcaaatgacagaattttttccaattgtaaaattagcactgtaaaacaaagaaccaaagtggcatcctaagagttgttaaacctgaagtctagtttatgaggaattgtccaagttggagtttaaatagtatctgcttttgtctcaaagcatctaagttattctgacagaaaatggtaagtcagctttgcaggcagatgcgcctctgggcctcctaccttgctccacagctttctggccatcttgtctcccaggccatgccactgctctgccacatgtcagcaaatttctttccaccagtcttatagcatcttacatgatcaaatcatcacagaataaccccgtgatagattattgatagcaatagagaggggctttgtcactgatttttctctcagattccttttccatctctcatccataaaggaaggactgaaatccaaaggcattctccttttgtacctacagtatccagaacccacgtgggcagccttctgcttatgacaataattggcccattgcatgcagagagaatgtcttcatagagagaatgtcattaaatacttgaatctgcatgacagtttgacttgaatgcaacagcaggaaaattttgcaagttacataattgtatatacagtaggttttcttaagtctcttcggttcatcctttgtaatttgtgtgtgtatctgtagtattgcaggcttttggagactattcttacaggcagtatgtcagtcatcaaagaaaatgctgtcacctgccattgttgtatttgtgggtatttatagttgtatgtatgtaaatgcatcagtgtgtagattgcatatcagtgtatggtacatgtacatcaaaattatttttgtccttaatcagtgtgatatgaaaagcaagtacaacctcataggactgattatataatgaagttgttgagagtatatatagtggtattgttttattaaacttaaactcaaataatattttgattaaaatttttaataagactttatgctagaaaattctttgagctttgaatcaccagggcaaaaatgactttcaactaaccttgtgaatcttttgcagtgtactgtgtgcaataccaagggcatagctccctgtaatttgggaaatacagaaagaaaagaaaaaaaaaaaaaaaggcagcctgtgcagtcttagtaactttagtattaagagcacttaaagtcaaactgacaattttgggcttattacaaaatgtgatgctttaaagcacacgttctttattgttgttgtaattagtccataaaaaatatagctttcggaagaattaagtacccaccatatcatttatgtatttgtgtatgttttacgggagatcaaaccactctcgtggtgccgcatccgtactcgcttgacttggaagaaatatcacaagcactaaagtatatcagggcatcccaggattgggtactgtatcctaggtttgcagttgcagaaattagcatctagtgtcacaggtaaaagaatttcaggaccaggtttaaactttattttaaatatttttatacttaggtctctttttcctgcctctccccaaagaagagccactggccttagttgtttgagcttactgcttatattatagagtgtaaataggtaactagagactaaaattttattaaccagcatgtttggtatatttaaagcagtgactgagtgtgtttgagtgagtggctgagtgcagtgtcttttgtttaaacacactgcctcgtgtctttgtagctgattcagagagtttgaattgtggggtgggagactaacttcagctccaggctgcagtaatgtgttggtagttacacttgaggcatttttttgttgttgttaattaactctatagtctcaaactatttttgcaaatatatcatttttcctaattggttcttgacgtgcagtggactggctctgtgaatgattggcagggtcttagttttgcgagagtatttccttctaagaattattgtgatctgcagaaacagccatttgattcaaaaatcatgtagaaaaggagtaggagaagcaaaacgtttcatttttgggccttaaccatttgaaatgtttggactttaaacataaagccatggagtttataaagccaagtaaccatttgatatggataataatatctactctagagagagtatatatatgcacattgatttttaatgctgttaagatacttttgtaaaactgtaggaacaagagtaattagaccaaattgaagcttaggggacagtaaagtggttgctttccatttagggtaaccatgcatgtggttagtcctctcctcctgagattcagaaccagttgactgtccccttaggtgtataaggagaaaagttgacatgtctgggacctctgacatgtgtacacatgcttgcacacatgcacacacagtgaatgttttaagttatacaaacataagaccttaagatgcaaagagccagaatattctaaagaggtgatgaacagagggggtggaaactgcatcacagatgttttccaagggccagggtggaatctgagctctagtgtctgactttgagatgcattatatttttaacacataaatgaggggatccatatcacattctttcttgtggaccaccaaattgaaggctttcttgtaattcacaagcagcagctctccagcatctctccgtagcctgggtgaagtcccagaagctggtgtgcatcattttccaaggtggcagagctgcttgctctgcagatcattcctttgagagaggagtacaagtgaagaaacaaggaggcacttcctgtaggagcactgatgtgccttgtccacactcccctctgagctttactggtaagagagctccgactgaacatgctgagcagttgagcacttttccatcagcaacaacagcgaggatggaaatggaaaggaaccgaactaaaatgcatttccctttgcagggcagagagctaagctcttaggaatagtgttatagaaataagcaccctaacttcaattcctgaaaatgttggttaatggagagaattttggagtttcacttaatattttcccatcggtcgccataaataagtcttcaggcgctcctagaagagtcccagcccaaggctcgattaaggaccacactgcaggtctgaggctcactgctctgagtcctgaacaccagagccctgcagagagtggtgataacacatcatctctgcaaagaggaacctctcccccggccgccacttcactcaggcttctactgagcagcaaggacagcctgggtttcaaatgccacttcccctgctttagggatccaggtgtcctgatagcgtgaccctgctgaggcaaggtatcaactccgagagtgactgagtcactgagcgtggcacatgaacaaacgtcatgacaaagattctctgagtgaagttaacaccacgtattttacctttgcaaaaaacaaactggcaccctgagttctaactacggacggacgatatctttgcctccacacccagattcctggaaatggctaacgtttcctttctaggggaagggtcgaggaatactcaagtgctagcttagcagctttgttcagtccagatcagagctgttaggtaaaggcctaaccacctccctgcagtctcttatatctcaagctttaggaacccatttctaaatgtacactagcggagaatttatattgtcagccttgattaccataggacaggcagaaaggcgataatttgtatcttttaatataaaagaagcttttaacttttccagcctattataataactgagttatattcactgtggctcaaactaattggcattgtggaacatttctttaccttcaaagttttctccaccaatcatttcagttctattgcagtcctggtgccatatgtcccctgcaaattgtgaaagtaattagtgacaaaatagcagcctgctccttttcaatggcgaaactgtcggcattagcagttttgggtaagctggcggtactataacacgtactggaaacctgttcctcatcaccacctaccagattctggaaatgccgtcttctagaaaacgatggcgtttgtggtggtcttcttttgaaaggaacagtaatttgtgtggatattgttaaagtgtttaaagaatattttgacaattaagtttacattttacaattgctttattttttattaaaatagttgtatataaatattaccctatttcactgttgttcaagtaaatctaaaccttgtagacaagtgagtcatctgatatgtatagaagctgtgatatatagagtacatttattgtgtaaatgtttatgaatataattgttcctgtgtttttataagttggggatattttgttgttttacggcaacaaaatttattgcatttaaatggtttttatgtaatagaaatcacgcaaaatagtgaaggatttaaaatatgtatatgatacatgtaaatgtacaaactttagaaagaaataaatccaacaaatttcaatcatt

SEQ ID NO: 22696 - DNA, 6136 bp, Homo sapiens
  source 1..6136: mol_type = unassigned DNA
ggtgcttcttaagctaacgcggatcacggcgctcaggagctgctcaggcacaaccccgcagagttcctccagcgtgagagccttggaacggttggaaagtgcctttttatttctctaaaccccttccttagttgaccttcgaaaatgattggcgtgaatagtgtccagagtgccagcaaggtacgggtgaggacctcaggttccgtgaaatactcccgggaggattctatccggcggcagtctcacaggtcaaagtccatgaaaatttccaactcctcagagttttctgctaaggagaacaaggctctgtacaactcaatcaagaatgagaagcttgaatgggcagtagatgatgaagagaaaaaaaagtctccctcagaaagtactgaggagaaagctaacggaacacatccaaagaccatcagtcgtattggaagtactactaacccatttttggacattcctcatgatccaaatgctgctgtgtacaaaagtggattcttggctcggaaaattcatgcagatatggatggaaagaagactccaagaggaaaacgaggatggaaaaccttttatgctgtactgaagggaacagttctttacttgcaaaagcatgaaagtaagctgaagcagatcaccaccgagctggccgagcaccgctcatatccccccgacaagaaggtcaaagccaaggacgtcgatgagtacaaactgaaagaccactatctggagtttgagaaaacccgctatgaaatgtatgtcagcattctcaaggaaggaggcaaagagctactgagtaacgatgaaagcgaggctgcaggactgaagaagtcgcactcgagtccttcgctgaacccggatacttctccaatcactgccaaagtcaagcgtaacgtgtcagagaggaaggatcaccgacctgaaacaccaagcattaagcaaaaagttacttagagtccatctgcggccaggaagtgctggtcatggagcaaaatagggtttttcaagatctttctggtaatccgtgaatatatttaaaaaaaaaaagtctgtgacaaaacggtgcattagtaattttttctattgtatatttttgttagtttctgtacagattgtctttgctcttgatttcttttgctttgatgatttttgcaacttgatagctaatgcaccttttctgtgaggaggaggggatcgtgatttcagaatgaattatgtatcccttctcttttggttttctcttgtttgcagtctgctcagttgttttatgtattctcatatcaactgttaaacttttttttaaggttaaagaatttaatccattgtgaaacacttaactggacaaactgtagttttagtaaattctagctggagttaatatacgcctttatatgtgaaatcttgcccagtcacagaggtagaattgagcactcacagatgctccagtaagaatcacagtgctgggaatctagttgctccaatatgaggcagcttcatgtgcagcttagcacttgttgttgagatcggaccctgctggaagcagggaaaagaagcgtgaagatcgtaggattgagaacttagggaagcacattagcttgcttgaagtgctgattccatttcagccaagcaagggaaagaggaagtggagtcattttgcctttgaaggctgaggaaagattgatacccagttaattttgtttgctaaaggatgggggcaataatcggcccttgaggagctgcagcagtaggcatgtgctcagtctgcaggaattgttacctcactcccacagggtctagactagaaatccatcatctctatcgttgatatccttccatccaggaatagatttttcttactctacatatgtgtgtgtgcgtgcgtgtgtgtgcgtgtgtgggcatggggttgtgtcctggttgtgatattgaggtcttccttcctaacaaattaatactaaaatgaaacagcttttcttgtgtccttaagacaaaataaggaaggaaaacgtagctgcagttgtccacgatggatattggttctttaaaatatatctgaaagtagtagtcagaatgaattatggttggaaaactgaggaatcttctggttgcaggtgcaaagtgactttgtttattcttgtctcagtctccttgatagccacttcactctgctactactcaactttctcctaaaaatacttcatctattttcagtcctttctttctgtctactcaaaatggttctattaactttgcagtcatgagcttgttccagttacagtccctttgaagttcagggtgataaacagaatattcttctgtagaggaagagaaaggagtgaaagtttagcccactgagacctagagctttgtgatttcctaaccttgaaactctgtaatccctaaagttaaaatctccgcaagtggcacaacttcagaactaatagtatcactttgatttttctttttcctcccttagaaagtttctctagttctatagtttatttgttgaaggtactatgaccaaagaatcagctgctctacaggaatagcatggttccagtgaattagagaaaacctgctgtaaagccatggtagtgtctaagtggtatgttattatgatgtactagcatttatttacagaattatttattaacgtttacttccttcccctctgtaaatgtccatgactattgcccagagaaggcttacccctctctagggttgcagttgctttctttgtaataagtattttgccacacctgtaaaaaaaaaaacctcacttttaactctctgccttgtttgggtaaaggcagtaactaagtttatgtttcagaactgcaaaacaaacaggatagttaccaatatggcccatgtatcagattgatttttgtagcctctcactgaatccaacatatccacaagcaagttatctgtctttctacctgataatctaaattatcaggatatttgttttctgcctaaatgtttatactaagccgaggggagagaggtacctagaccatgtcatctacaagcttcagtaactaaagaaaaaggaacttccctgagtggcttgaatgtgtttgcccacagtctatatctatgtatatagaatgtctgtatgtattttacttatttaatatacattgaatggtaccttgctacagtatttctgacatttagagtagtgttgaaatactcggctagcatcagcaccactatagcactgtccgtgtcatatgagtcactaatattaactccagggacttctggataggctaatagatcattggatacgaagggctcttttgaagcttcagtataccatgtttgcatagtttatctttaaaaacaactttaaaggttcttttgtgagccaggatctcagactgccgtagcatgatgctgtccatctttagcgcatgggctgagaacacctcttccctgaggcttctgaaggttgctgtctgtcatgagtgcatgaaggaggccaagagtttatgctatgggaggaaacagtcactgatttgcctagattctgagagtctggcccatagccaaccacattttcctttgggataatttatttcctgtggcatctagccagaagaaattgaggatgtttcctttcacagctgctccaagcctgttgcccaattcacggtacaagggagcaccccttccctttcctctgaaggtacgccacccacctccgtcgcccacctcagcgcccaggagccttgggacttccttccatatgataaatcattcttcttcacgtcaatacacttcatattaatttctagtacagaaaatcttgacagctatcagaatgccttggtcatagtgttgttgcaaaattgaccatacaggtggcccatgtataaaatctgaattttaggggtttgtccccacctcgcatgctggcttttacagggaggtgtctgggattcctcattagcaatcaaaacttaattactgggatgcagagtccttactttatcgccagcccgtaggcatttctgaagtgcacttttttgaaacatcattttgctaactctcagcagtgtctaattaaactgagcaatacttttgtgaattttaattaatctcagcaaaaccatgatgggagagagtcctctgatggaaatgtagtccctggattatgtgtaacctttttattcctcttagatgcagaggatagaaagcattttttggtgcagtggtcttgtggcaaacacaagaccctctatgcgtctccaactgttatcctaatctagaaaatgaggactggcccctgggcaaaagtgacatgaggaatttactctggaagaggaaaatctgggtggctttccaaggctaagataggtttgtatttcaccctgtggccaagctacagaacttctgagattgtggaagaatttttgcaaccagcagggaaagaggcctcttactgcctaaacacaaagttacactgagcttttctactgtcctttgcctattgctccctctatcatgtaaagatctgggaaggatgagaggcagggcctgcttgtcatgagctgcactcttttctttttaactaatcattgacaattggaagaaaattgacgttaaagaagtttctccattgtcttactaacaaaaccttttgggtttcattaattgtccttgaaattgagttcctttggcatttttccttgcagtcatcagttaagcatgttgcatcctgaattcacagaagtttagctttgcaggtttgaatctctgtaatttaactcccgtggacttggtcgagttttcagcaggttgggagccacctctcttcatttcagcagtgagtcatcccttgacttttcaaatgacagaattttttccaattgtaaaattagcactgtaaaacaaagaaccaaagtggcatcctaagagttgttaaacctgaagtctagtttatgaggaattgtccaagttggagtttaaatagtatctgcttttgtctcaaagcatctaagttattctgacagaaaatggtaagtcagctttgcaggcagatgcgcctctgggcctcctaccttgctccacagctttctggccatcttgtctcccaggccatgccactgctctgccacatgtcagcaaatttctttccaccagtcttatagcatcttacatgatcaaatcatcacagaataaccccgtgatagattattgatagcaatagagaggggctttgtcactgatttttctctcagattccttttccatctctcatccataaaggaaggactgaaatccaaaggcattctccttttgtacctacagtatccagaacccacgtgggcagccttctgcttatgacaataattggcccattgcatgcagagagaatgtcttcatagagagaatgtcattaaatacttgaatctgcatgacagtttgacttgaatgcaacagcaggaaaattttgcaagttacataattgtatatacagtaggttttcttaagtctcttcggttcatcctttgtaatttgtgtgtgtatctgtagtattgcaggcttttggagactattcttacaggcagtatgtcagtcatcaaagaaaatgctgtcacctgccattgttgtatttgtgggtatttatagttgtatgtatgtaaatgcatcagtgtgtagattgcatatcagtgtatggtacatgtacatcaaaattatttttgtccttaatcagtgtgatatgaaaagcaagtacaacctcataggactgattatataatgaagttgttgagagtatatatagtggtattgttttattaaacttaaactcaaataatattttgattaaaatttttaataagactttatgctagaaaattctttgagctttgaatcaccagggcaaaaatgactttcaactaaccttgtgaatcttttgcagtgtactgtgtgcaataccaagggcatagctccctgtaatttgggaaatacagaaagaaaagaaaaaaaaaaaaaaaggcagcctgtgcagtcttagtaactttagtattaagagcacttaaagtcaaactgacaattttgggcttattacaaaatgtgatgctttaaagcacacgttctttattgttgttgtaattagtcc

SEQ ID NO: 22697 - DNA, 11693 bp, Homo sapiens
  source 1..11693: mol_type = unassigned DNA
aacaaagagcacgcggcgctggccgccggcactcgcgccctgaggctgcggccccggagcgcccggcggcggtttcggcgcgcggccgggctggcgatggaagatggaaggaaggagcgcagcggcagagacatttgtttgggtgaacaatgcatctgcacattcccagagtgttgccaaggccaaatatgaatttttatttggcagatctgaagggaaagctccagatactagtgatcatggaggaagcactttactcccaccaaatgtcacaaatgaatttccagaatatgggaccatggaggaaggtggagaaggcctaagggcttctctggaatttgatggtgaggctctgccatgccacccacaagagcagcagggtgtccagcctcttactggctgccactctgggctcgacagtgttacagaaggaccaaaagatgtcagagaggccccctctcaaagtcatctcaaggaacaaagtttacagcccattgactctttgatttcagctctgaaagccacagaagccagaatcatttccggaacattacaggctacaaaggtactggaccaagatgctgtttctagtttttcagttcagcaggtggaaaaagagctggacactgccagtcgtaaaacacagagagtcaacaaaacgctccctgctggccaaaaaaatttaccagaaatacctctttcagctgaagtaacaacggaggaaagtttttatttgagcatccagaaagatctcaccgcgctgttaactggagacactcaggcagagatttcccagataatgaataatgggaggaaaggggctgtctgtgtgcaggagccatcttgtcctttggcctccctcgggagctcagcagtgacctgccactctgcaggcagtgttggtttcttgaaagagcagaggtctgctcttgggagagagcacccagggggatgtgatcgaagcagctccatgggacgcccaggccgggtcaaacatgtggaatttcaaggagtggaaatactgtggacaggaggagacaagagagagacccagcatcctatagattttgagacatcactgcaaagaacagcctctcctgacagcaaagagtcttccaaagtgccacgccatctcatctcatcagctggtttgtgtaattcaagtagtttaactgagaatgtttgggatgaatcctggaaagctccttcagagaggcctggcactagctcggggacattttcccctgtgcgtcttgatgagagtggagaggatgaagtcttcctacaggaaaacaaacagcatcttgagaagacacctaaaccagagagagacagggaaaggatcagcgaacaagaggagcacgttaagggggaagatgaagacatccttgggcctggatatacggaggactccaccgacgtgtacagctcccagtttgaaaccattttggacaacacttctttatactacagtgcagagtccctggagacattatactcagagcctgatagctattttagctttgaaatgcccctcactccaatgatacaacagcgcattaaagaaggtggtcagttcttggagaggacatcagggggaggacatcaggatatcctgagtgtgtctgcagatggtggcatcgtgatgggctattctagtggcgtcaccaatgggctgaatgatgccagcgactccatctacacgaaaggcaccccggagattgctttctggggaagcaatgctggggtgaaaacaacacggctagaagctcattctgaaatggggagcactgaaattttggaaaaggagaccccagaaaatctcagtaatggtaccagcagcaatgtggaagcagccaaaaggttggccaaacgcctttatcagctggacagattcaaaagatcagatgttgcaaaacaccttggcaagaacaacgaatttagcaaactagttgcagaagaatatctgaagttttttgattttacaggaatgacgctggatcagtcactcaggtatttctttaaagcattctctcttgtgggagaaactcaagaacgagagagagttttaatacacttctccaatagatatttttattgtaacccagataccattgcttcacaagatggagtccattgccttacctgtgcaataatgcttcttaataccgatctacatggccacgtaagtaatattggaaagaagatgacctgtcaggagttcattgcaaatctgcaaggggtaaatgagggtgttgatttctccaaggatctgctgaaagctctgtacaactcaatcaagaatgagaagcttgaatgggcagtagatgatgaagagaaaaaaaagtctccctcagaaagtactgaggagaaagctaacggaacacatccaaagaccatcagtcgtattggaagtactactaacccatttttggacattcctcatgatccaaatgctgctgtgtacaaaagtggattcttggctcggaaaattcatgcagatatggatggaaagaagactccaagaggaaaacgaggatggaaaaccttttatgctgtactgaagggaacagttctttacttgcaaaaggatgaatacaagccagaaaaggccttgtctgaagaggacttgaaaaacgctgtgagtgtgcaccacgcattggcatccaaggccacggactatgagaagaaaccaaacgtgtttaaacttaaaactgccgactggagggtcttgctttttcaaactcagagcccagaggaaatgcaagggtggataaacaaaatcaattgtgtggcagctgtattttctgcaccaccatttccagcagcaatcggctctcagaagaagtttagccgcccacttctgcctgccactacaacaaaactgtctcaggaggagcaactgaagtcacatgaaagtaagctgaagcagatcaccaccgagctggccgagcaccgctcatatccccccgacaagaaggtcaaagccaaggacgtcgatgagtacaaactgaaagaccactatctggagtttgagaaaacccgctatgaaatgtatgtcagcattctcaaggaaggaggcaaagagctactgagtaacgatgaaagcgaggctgcaggactgaagaagtcgcactcgagtccttcgctgaacccggatacttctccaatcactgccaaagtcaagcgtaacgtgtcagagaggaaggatcaccgacctgaaacaccaagcattaagcaaaaagttacttagagtccatctgcggccaggaagtgctggtcatggagcaaaatagggtttttcaagatctttctggtaatccgtgaatatatttaaaaaaaaaaagtctgtgacaaaacggtgcattagtaattttttctattgtatatttttgttagtttctgtacagattgtctttgctcttgatttcttttgctttgatgatttttgcaacttgatagctaatgcaccttttctgtgaggaggaggggatcgtgatttcagaatgaattatgtatcccttctcttttggttttctcttgtttgcagtctgctcagttgttttatgtattctcatatcaactgttaaacttttttttaaggttaaagaatttaatccattgtgaaacacttaactggacaaactgtagttttagtaaattctagctggagttaatatacgcctttatatgtgaaatcttgcccagtcacagaggtagaattgagcactcacagatgctccagtaagaatcacagtgctgggaatctagttgctccaatatgaggcagcttcatgtgcagcttagcacttgttgttgagatcggaccctgctggaagcagggaaaagaagcgtgaagatcgtaggattgagaacttagggaagcacattagcttgcttgaagtgctgattccatttcagccaagcaagggaaagaggaagtggagtcattttgcctttgaaggctgaggaaagattgatacccagttaattttgtttgctaaaggatgggggcaataatcggcccttgaggagctgcagcagtaggcatgtgctcagtctgcaggaattgttacctcactcccacagggtctagactagaaatccatcatctctatcgttgatatccttccatccaggaatagatttttcttactctacatatgtgtgtgtgcgtgcgtgtgtgtgcgtgtgtgggcatggggttgtgtcctggttgtgatattgaggtcttccttcctaacaaattaatactaaaatgaaacagcttttcttgtgtccttaagacaaaataaggaaggaaaacgtagctgcagttgtccacgatggatattggttctttaaaatatatctgaaagtagtagtcagaatgaattatggttggaaaactgaggaatcttctggttgcaggtgcaaagtgactttgtttattcttgtctcagtctccttgatagccacttcactctgctactactcaactttctcctaaaaatacttcatctattttcagtcctttctttctgtctactcaaaatggttctattaactttgcagtcatgagcttgttccagttacagtccctttgaagttcagggtgataaacagaatattcttctgtagaggaagagaaaggagtgaaagtttagcccactgagacctagagctttgtgatttcctaaccttgaaactctgtaatccctaaagttaaaatctccgcaagtggcacaacttcagaactaatagtatcactttgatttttctttttcctcccttagaaagtttctctagttctatagtttatttgttgaaggtactatgaccaaagaatcagctgctctacaggaatagcatggttccagtgaattagagaaaacctgctgtaaagccatggtagtgtctaagtggtatgttattatgatgtactagcatttatttacagaattatttattaacgtttacttccttcccctctgtaaatgtccatgactattgcccagagaaggcttacccctctctagggttgcagttgctttctttgtaataagtattttgccacacctgtaaaaaaaaaaacctcacttttaactctctgccttgtttgggtaaaggcagtaactaagtttatgtttcagaactgcaaaacaaacaggatagttaccaatatggcccatgtatcagattgatttttgtagcctctcactgaatccaacatatccacaagcaagttatctgtctttctacctgataatctaaattatcaggatatttgttttctgcctaaatgtttatactaagccgaggggagagaggtacctagaccatgtcatctacaagcttcagtaactaaagaaaaaggaacttccctgagtggcttgaatgtgtttgcccacagtctatatctatgtatatagaatgtctgtatgtattttacttatttaatatacattgaatggtaccttgctacagtatttctgacatttagagtagtgttgaaatactcggctagcatcagcaccactatagcactgtccgtgtcatatgagtcactaatattaactccagggacttctggataggctaatagatcattggatacgaagggctcttttgaagcttcagtataccatgtttgcatagtttatctttaaaaacaactttaaaggttcttttgtgagccaggatctcagactgccgtagcatgatgctgtccatctttagcgcatgggctgagaacacctcttccctgaggcttctgaaggttgctgtctgtcatgagtgcatgaaggaggccaagagtttatgctatgggaggaaacagtcactgatttgcctagattctgagagtctggcccatagccaaccacattttcctttgggataatttatttcctgtggcatctagccagaagaaattgaggatgtttcctttcacagctgctccaagcctgttgcccaattcacggtacaagggagcaccccttccctttcctctgaaggtacgccacccacctccgtcgcccacctcagcgcccaggagccttgggacttccttccatatgataaatcattcttcttcacgtcaatacacttcatattaatttctagtacagaaaatcttgacagctatcagaatgccttggtcatagtgttgttgcaaaattgaccatacaggtggcccatgtataaaatctgaattttaggggtttgtccccacctcgcatgctggcttttacagggaggtgtctgggattcctcattagcaatcaaaacttaattactgggatgcagagtccttactttatcgccagcccgtaggcatttctgaagtgcacttttttgaaacatcattttgctaactctcagcagtgtctaattaaactgagcaatacttttgtgaattttaattaatctcagcaaaaccatgatgggagagagtcctctgatggaaatgtagtccctggattatgtgtaacctttttattcctcttagatgcagaggatagaaagcattttttggtgcagtggtcttgtggcaaacacaagaccctctatgcgtctccaactgttatcctaatctagaaaatgaggactggcccctgggcaaaagtgacatgaggaatttactctggaagaggaaaatctgggtggctttccaaggctaagataggtttgtatttcaccctgtggccaagctacagaacttctgagattgtggaagaatttttgcaaccagcagggaaagaggcctcttactgcctaaacacaaagttacactgagcttttctactgtcctttgcctattgctccctctatcatgtaaagatctgggaaggatgagaggcagggcctgcttgtcatgagctgcactcttttctttttaactaatcattgacaattggaagaaaattgacgttaaagaagtttctccattgtcttactaacaaaaccttttgggtttcattaattgtccttgaaattgagttcctttggcatttttccttgcagtcatcagttaagcatgttgcatcctgaattcacagaagtttagctttgcaggtttgaatctctgtaatttaactcccgtggacttggtcgagttttcagcaggttgggagccacctctcttcatttcagcagtgagtcatcccttgacttttcaaatgacagaattttttccaattgtaaaattagcactgtaaaacaaagaaccaaagtggcatcctaagagttgttaaacctgaagtctagtttatgaggaattgtccaagttggagtttaaatagtatctgcttttgtctcaaagcatctaagttattctgacagaaaatggtaagtcagctttgcaggcagatgcgcctctgggcctcctaccttgctccacagctttctggccatcttgtctcccaggccatgccactgctctgccacatgtcagcaaatttctttccaccagtcttatagcatcttacatgatcaaatcatcacagaataaccccgtgatagattattgatagcaatagagaggggctttgtcactgatttttctctcagattccttttccatctctcatccataaaggaaggactgaaatccaaaggcattctccttttgtacctacagtatccagaacccacgtgggcagccttctgcttatgacaataattggcccattgcatgcagagagaatgtcttcatagagagaatgtcattaaatacttgaatctgcatgacagtttgacttgaatgcaacagcaggaaaattttgcaagttacataattgtatatacagtaggttttcttaagtctcttcggttcatcctttgtaatttgtgtgtgtatctgtagtattgcaggcttttggagactattcttacaggcagtatgtcagtcatcaaagaaaatgctgtcacctgccattgttgtatttgtgggtatttatagttgtatgtatgtaaatgcatcagtgtgtagattgcatatcagtgtatggtacatgtacatcaaaattatttttgtccttaatcagtgtgatatgaaaagcaagtacaacctcataggactgattatataatgaagttgttgagagtatatatagtggtattgttttattaaacttaaactcaaataatattttgattaaaatttttaataagactttatgctagaaaattctttgagctttgaatcaccagggcaaaaatgactttcaactaaccttgtgaatcttttgcagtgtactgtgtgcaataccaagggcatagctccctgtaatttgggaaatacagaaagaaaagaaaaaaaaaaaaaaaggcagcctgtgcagtcttagtaactttagtattaagagcacttaaagtcaaactgacaattttgggcttattacaaaatgtgatgctttaaagcacacgttctttattgttgttgtaattagtccataaaaaatatagctttcggaagaattaagtacccaccatatcatttatgtatttgtgtatgttttacgggagatcaaaccactctcgtggtgccgcatccgtactcgcttgacttggaagaaatatcacaagcactaaagtatatcagggcatcccaggattgggtactgtatcctaggtttgcagttgcagaaattagcatctagtgtcacaggtaaaagaatttcaggaccaggtttaaactttattttaaatatttttatacttaggtctctttttcctgcctctccccaaagaagagccactggccttagttgtttgagcttactgcttatattatagagtgtaaataggtaactagagactaaaattttattaaccagcatgtttggtatatttaaagcagtgactgagtgtgtttgagtgagtggctgagtgcagtgtcttttgtttaaacacactgcctcgtgtctttgtagctgattcagagagtttgaattgtggggtgggagactaacttcagctccaggctgcagtaatgtgttggtagttacacttgaggcatttttttgttgttgttaattaactctatagtctcaaactatttttgcaaatatatcatttttcctaattggttcttgacgtgcagtggactggctctgtgaatgattggcagggtcttagttttgcgagagtatttccttctaagaattattgtgatctgcagaaacagccatttgattcaaaaatcatgtagaaaaggagtaggagaagcaaaacgtttcatttttgggccttaaccatttgaaatgtttggactttaaacataaagccatggagtttataaagccaagtaaccatttgatatggataataatatctactctagagagagtatatatatgcacattgatttttaatgctgttaagatacttttgtaaaactgtaggaacaagagtaattagaccaaattgaagcttaggggacagtaaagtggttgctttccatttagggtaaccatgcatgtggttagtcctctcctcctgagattcagaaccagttgactgtccccttaggtgtataaggagaaaagttgacatgtctgggacctctgacatgtgtacacatgcttgcacacatgcacacacagtgaatgttttaagttatacaaacataagaccttaagatgcaaagagccagaatattctaaagaggtgatgaacagagggggtggaaactgcatcacagatgttttccaagggccagggtggaatctgagctctagtgtctgactttgagatgcattatatttttaacacataaatgaggggatccatatcacattctttcttgtggaccaccaaattgaaggctttcttgtaattcacaagcagcagctctccagcatctctccgtagcctgggtgaagtcccagaagctggtgtgcatcattttccaaggtggcagagctgcttgctctgcagatcattcctttgagagaggagtacaagtgaagaaacaaggaggcacttcctgtaggagcactgatgtgccttgtccacactcccctctgagctttactggtaagagagctccgactgaacatgctgagcagttgagcacttttccatcagcaacaacagcgaggatggaaatggaaaggaaccgaactaaaatgcatttccctttgcagggcagagagctaagctcttaggaatagtgttatagaaataagcaccctaacttcaattcctgaaaatgttggttaatggagagaattttggagtttcacttaatattttcccatcggtcgccataaataagtcttcaggcgctcctagaagagtcccagcccaaggctcgattaaggaccacactgcaggtctgaggctcactgctctgagtcctgaacaccagagccctgcagagagtggtgataacacatcatctctgcaaagaggaacctctcccccggccgccacttcactcaggcttctactgagcagcaaggacagcctgggtttcaaatgccacttcccctgctttagggatccaggtgtcctgatagcgtgaccctgctgaggcaaggtatcaactccgagagtgactgagtcactgagcgtggcacatgaacaaacgtcatgacaaagattctctgagtgaagttaacaccacgtattttacctttgcaaaaaacaaactggcaccctgagttctaactacggacggacgatatctttgcctccacacccagattcctggaaatggctaacgtttcctttctaggggaagggtcgaggaatactcaagtgctagcttagcagctttgttcagtccagatcagagctgttaggtaaaggcctaaccacctccctgcagtctcttatatctcaagctttaggaacccatttctaaatgtacactagcggagaatttatattgtcagccttgattaccataggacaggcagaaaggcgataatttgtatcttttaatataaaagaagcttttaacttttccagcctattataataactgagttatattcactgtggctcaaactaattggcattgtggaacatttctttaccttcaaagttttctccaccaatcatttcagttctattgcagtcctggtgccatatgtcccctgcaaattgtgaaagtaattagtgacaaaatagcagcctgctccttttcaatggcgaaactgtcggcattagcagttttgggtaagctggcggtactataacacgtactggaaacctgttcctcatcaccacctaccagattctggaaatgccgtcttctagaaaacgatggcgtttgtggtggtcttcttttgaaaggaacagtaatttgtgtggatattgttaaagtgtttaaagaatattttgacaattaagtttacattttacaattgctttattttttattaaaatagttgtatataaatattaccctatttcactgttgttcaagtaaatctaaaccttgtagacaagtgagtcatctgatatgtatagaagctgtgatatatagagtacatttattgtgtaaatgtttatgaatataattgttcctgtgtttttataagttggggatattttgttgttttacggcaacaaaatttattgcatttaaatggtttttatgtaatagaaatcacgcaaaatagtgaaggatttaaaatatgtatatgatacatgtaaatgtacaaactttagaaagaaataaatccaacaaatttcaatca

SEQ ID NO: 22698 - DNA, 5188 bp, Homo sapiens
  source 1..5188: mol_type = unassigned DNA
acattcactgggcaagccgactgtgagccaggaagtgctcttggggagcccaggccaagccatccattcttgggtcctttggagggtagatatggattcccagtttctccagcggccagtgctccccctagtccacacagtgagaccgtgaaagcagatgctccggggcactcctgggcagcttttgctcagtggatgatgggtgactacagactccctgaccacccccagcccatggaaattctcaacctgtacttgggagacagcctggagccccacccaggagagtgcccaagggaaacgtgcagccatgaggatccaccggagcctttcgaggagcaaacctgggccactgaccctcctgaacctaccagacaaaatgttcctccctggggctccggtgtggagctcacacacctggggagctgggtccatcaggacgggctggagccttgccaggagcaaacccgggccactgaccctcctgaatctaccagacaagatgctcctccctggggctccggtgtggagctcacacacctggggagcccctctgcccagagggagcacaggcagaacacagcatcaccagggtcaccagtgaacagccatctaccggggagcccaaagcagaaccggagcacgtccacacaggtagtgttctgggcaggcatcctgcaggcccagatgtgtgtcctagacctggaggaggagctggagaagacggaagggctcaaggctgggctgaaatgctgtctccccacgccccctgtggacctccccggggacacgggcctgcactccagcccacctgagaatgaagactcaggggaagacagcagtgagcctgagggagagggccaggcatggctgagagagggaaccccagactcttccccacagtggggagctgaggaggagagcatgttcttcagcaaccccctcttcctggcgagtccttgctcagagaacagtgcttctggagagtgcttttcctggggggcttcagactcccatgcaggtgtgaggactggacctgagagcccagcgactctggagcctcccctcccagaagacacagtgctgtgggagctggaaagtgagccagatttgggggacggcgctgctatcagtgggcattgtacccctccattccctgtgcccatctataaaccacactccatctgctgggcctcagtggctgccgctgagggggctcctgcagcacctcctggtcacggggagagtgagggagataggcttggtcctgctccatctgcagcaccgtgtgtggacgaagcattgacctgggaatcaggatgtgtcggatctgatcttggccctgctgcacatcctgtgcaaccttgggcctctctcagccctgagggctggcagagaggaggtcctttttggccccaggtgactcttaactcccaggacagagatgagagggagggtggacacccccaggaatctcttccctgcaccttggccccctgcccctggaggagcccagcttcttctccagagcctagcagcccagaatctgagagcagaggccctggtcccaggcccagccctgcatcgtcccaggagggcagcccgcagcttcaacaccacagctcaggcattttgcccaagtggacactagatgcttcacagtcttcactcttggagacggatggggaacagccaagttccttgaagaaaaaggaggcaggggaggccccaaaaccaggcgaggaagtaaagagtgaaggaacagccaggcctgcagagactggagacgtccagcctgacattcacctgacttctgcagaacatgagaatctgaggacaccgatgaactcttcttggcttcctgggagccctatgccccaagcacagtccccagaggaaggccagagaccaccagctggagacaagctagctaatggcgtcaggaacaacaaggtagcctggaacttggcctcacgcctctatcgcctggagggcttccggaagtctgaagtggctgcctacctgcagaagaacaatgactttagcagggctgtggctgaggagtacctgtccttcttccagtttggaggccagagtctggaccgagccctccggagcttcctccaggccttggtgctcagtggggagactcaggaacgggagcgaatcctctaccagttctccagacgcttccaccattgcaatccggggatcttcccctcagtagattctgtacacaccttgacatgtgcaatcatgctgcttaacacggacctgcatggacagaacattgggaagagcatgagctgccaggaattcataaccaacctgaatgggctgagggatggcgggaacttccccaaggagctgctgaaggccctctactggtctatccgcagcgagaagctcgagtgggccgtggatgaagaagacacagccagacctgagaaggcccagccgtccctgccagctggcaagatgagcaagcccttccttcagctggctcaggatcccacagtgcccacctacaagcagggcatcctggctcggaaaatgcatcaagatgcagacggcaagaagacgccatggggcaagcgtggctggaagatgttccacaccttactgcgagggatggttctctacttcctgaagcagggagaagaccactgtctggagggggagagcttggtggggcagatggtggatgagcccgtgggggtgcaccactcgctggccacccccgccacgcattacaccaagaagccgcacgtcttccagctgcgcacggctgactggcgcctctacctcttccaggcacccactgccaaggagatgagctcctggatcgcgcgcatcaacttggctgcggccacgcactccgcgccgcccttccccgccgctgtgggctcccagcgcagattcgtgcggcccatcctgcccgtgggccccgcccagagctccctggaggagcagcatcgatcccacgagaactgcctggacgctgccgcggacgacctgctggatctacagaggaacctgccggagcggcggggccgtggccgcgagctggaggagcaccgcctgcggaaggagtacctggagtacgagaaaacccgctacgagacctacgtgcagctgctggtggcccgcctgcactgcccctctgatgctctggacctgtgggaggagcagctggggagggaagctggaggcactcgggagcccaagctcagcctgaagaagtcccactcgagcccgtccctgcaccaggatgaggctcccaccacggccaaggtgaagcgcaacatctcagagcgcagaacctaccggaagatcatccctaagcggaaccgcaatcagctgtgaagccagcaccacctcagagacactgttccctgctccagggtagacctgagatgaacctccctggaggagacttatttcaatgagtccaccatgacggatgaggcacctcctttccctgctgaaggacaaaccttgtttccctgtggccctcattcttgtgctccctgaagctttcctaatattgctgtgctccccaccacccccatggcagtccctccgcagccccagtccctggccacgcccaagggaagagggaggtgaggacttgactttcctcccagagctcagcccatgtcaccctccaggccccagaatccagagtggcctcatttcctagacttgctgagaactcagcacttgtttgagaaccagtgcttatgtggtgtgcccttggcttctgggggagagcttggggcagcagaggcccctgggcagcccagccaggggagccacagccccaaggatggtcttgctctgggaattaggtgaccttcctggggaggccccaggagagtgaatcagggactcttgagaaattcctaaccagcctcctgtgacccagggagcagggtcgctaaggtcctgcccactgaggggacagccttctgggcagggacctcggggggcttcaagggctctgcacggctgtggggccctgtgcctttgtctccttgtgtctcctttcccccgaagtagatgaaacagtctcacatacccaactgctcatcaacagagcagagctgatggcatgagtgagggctgggcggggtggggcctccagagctttgcagggaaccctggaaccctaggaacaaggagcctttgttccaacagagcagagaaggaggttctctatgttcagaccactggagaggatagagaggtaaaaggtggcgacagtttcccttaggggtctgcctggcaggagccacagctcaggagagttgtgagggatgggacggaggctggcgaccaggcgaggcctaggccaggctcgggagacttttctgtgctcctttctacacatgccttaaaccttccttcctgtggggtgcctggaccccttccccatctctggcagctcagagggtctctgctgctctcccctgggaaatcccctcatcctgccctctggctgcctcccagctgggcttgttctctgagggaggttccggagactcatggacttggggctctgcctgtaggaaggaggctgggccggagggaccagccaccattgtctctgttcagccaagtgtgcaagtaggctgcccgccaagagggggcctctgctacccgctgctgcctgccggctgacacactgcctccccagccttcctgctaggccaccctcctcccttcccatgcttgtaaccagctctggggcttgcacctccacaaagtaaggttggcccttggaggccatgtttgggtctccggccagggcctagggctaggccatgcacccaatgggtgcacaataaataacaggtcaacaaagagggaggtgtgtcagtgtgtgaggaagggaggtcaggcagctaggaccacctgcagtgtggcaggcttcatccctctttgctccaagtgtgtatgtgtgtctgtgcatgtgtgtagtgtctgtgtctgtgtgttcatgcatatgcaggagtcacacggtcataggccatcaaagctggaggagacctcagaatcattcattcacctacttgctcatttattcattcattcattttgcagataatatgggacgctttctatgtgccagtaccaggggattcacaaatgaattaaacatgtccctgactccatgagttgacaa

SEQ ID NO: 22699 - DNA, 3791 bp, Homo sapiens
  source 1..3791: mol_type = unassigned DNA
gtgcgcagtgcgcgggctggccgtcgcggacgccgctccgggcagccgagcctctgtgggagccggggccgcggcggcgcgggtgctccgggccgaggccgcgtgtaatgttcaagctcagaaatgccttatgtggatcgtcagaatcgcatttgtggttttctagacattgaagaaaatgaaaacagtgggaaatttcttcgaaggtacttcatactggataccagagaagatagtttcgtgtggtacatggataatccacagaacctaccttctggatcatcacgtgttggagccattaagcttacctacatttcaaaggttagcgatgctactaagctaaggccaaaggcggagttctgttttgttatgaatgcaggaatgaggaagtacttcctacaagccaatgatcagcaggacctagtggaatgggtaaatgtgttaaacaaagctataaaaattacagtaccaaagcagtcagactcacagcctaattctgataacctaagtcgccatggtgaatgtgggaaaaagcaagtgtcttacagaactgatattgttggtggcgtacccatcattactcccactcagaaagaagaagtaaatgaatgtggtgaaagtattgacagaaataatctgaaacggtcacaaagccatcttccttactttactcctaaaccacctcaagatagtgcggttatcaaagctggatattgtgtaaaacaaggagcagtgatgaaaaactggaagagaagatattttcaattggatgaaaacacaataggctacttcaaatctgaactggaaaaggaacctcttcgtgtaataccacttaaagaggttcataaagtccaggaatgtaagcaaagcgacataatgatgagggacaacctctttgaaattgtaacaacgtctcgaactttctatgtgcaggctgatagccctgaagagatgcacagttggattaaagcagtctctggcgccattgtagcacagcggggtcccggcagatctgcgtcttctatgcggcaggccagaaggctgtcgaacccttgtatacagaggagcatccccccggtccttcagaatccaaacacgctttccgtcctaccaacgcagccaccgccacctcacattccacagcctctcgcagcaactctttggtctcaacctttaccatggagaagcgaggattttacgagtctcttgccaaggtcaagccagggaacttcaaggtccagactgtctctccaagagaaccagcttccaaagtgactgaacaagctctgttaagacctcaaagtaaaaatggccctcaggaaaaagattgtgacctagtagacttggacgatgcgagccttccggtcagtgacgtgtgaggcagaagcgcacggagcctgcctgcctctgccgtcctcagtttcctttcatgaggcttctagccaaagatgataaagggggaaatggtttttagtgcgtatattatactgcctcttaggtgtactctttataagctggtaaaccaagaatctagggagtggccaaactaaatataatttctttaaaaaagaaagaaaaaggaaaaatccaaaatatctcagtatcatctgtctgaagcattgtgtgttctcattcgggtggtaacaatgtatgtgtaatatttttttcttagtgattttgacagtttaaatgtttaacaacttaaagcattaaaaatgcttattaataactttggtcatttaaaaaatgctacaatgacttcctattaaaggttcaatatttacacattcttattggttgatattaccacatgaaatattgccagaccaagatacctaaactcatgatgtctgtggtgctgtaaaatttatactaaaatgtggactattttgaaattataaccatttttgatgccctgaatcttgaggtgacttattttgcatagaggatatggatagaccaacagtaagggttgtgggttataccggcatagagaaaagaagaaaactagaattgaaacaactgtgtcttagacatttgtttgaaaaagcttcatcaggccttggagcagtcactgctttattccgcaaaaattatttggtaggaaatttttgggagatctgattttcttatccaagttttgtaaatagttgttatttctatatttggattggtgaaagacctcaagtttatatgtaaagacataactgcccttagtcatgaaattgttgtgacctctactttttgtcactaatagcctacattcaagtgcctgtgttttttcatcttgtttaggaatgttttgagattaatgtgcttaaaagtcctacgtgactgattttaaacattgtgataaaattaattttcagtagaatagttgaatgtgttaagataggattttatgttagagataccagaatgctggtattctactacttgtgcaatatatatgttttaaaaaacaaatttgagaatacatttaatcatagggatatagatataagcacctctctaaagaatctttagtttccgacgttgaattatagaccagtttgagtaagtactgctttttttttttggagacgggctctcgctctgttgctcaggctggagtgcagtggcgtgatctcagctcactacagcctccacctcgtgggttcaaacagttgtgctgcctcagcttcccgagtagctaggattacaggtgcatgccaccacacctggctaatttttgtattttagtagagatggggtttcaccatgttggccaggctcgtctcgaactcctgacttcaggtgatccacccatctcagcctcccaaagtgctgggattacaggcgtgagccaccatgcccggcccataagtaccgtttttgaggttcagtcttaaacatttgctttaagaaaacagtcttgaatttcacatgctgctatttttatattttgccattttacagtactgttttgttttgaattcatgcatatcattgaaaatttctcgttttcattttcttagatgacttcttgtctgagacagaaaaatttcctactacagcagtgcagtccagaggttaagatgtattagaattatacaatatcagtttaaaaatctgtatgcataaagaatgcaccactcaacttttttattcataagctaatatttttttaaagttacattaagattttttctcttttgcagctacatttgaaagtgatagaataaagagattttaatgagttatcactttttcagctgatatattcattttaatggcttttttgaaagttcctttttcatgaacacacccgagaaatcttaaatagacactttgcaatatttaagaacctaatgctgtttaattttggtacagcttccacattgcatgttcactttagtatttgcaatttgatatatttcatggtggcaaaatattagctctgttttgggacattttaaaatagaactatccttgttcgatagcataggaaaatgttctggtgattgtcagggtctcctaatatttatctcaattcttttataagtctatggaaattatttaattattttaaaacgtacacacttttcttgtaaatatgtcacatctgagttcaaaaaaattactttgaataccttaatatttgctgcatttttttccgtatatataacatgtcttctttcagaatgggaatatatgtgtgcctcccaacatttactgttaaagtgtgttatctttatatgtcaaactggttgaacactgtaatgagaataaactgcacagagtttattctg

SEQ ID NO: 22700 - DNA, 3809 bp, Homo sapiens
  source 1..3809: mol_type = unassigned DNA
gtgcgcagtgcgcgggctggccgtcgcggacgccgctccgggcagccgagcctctgtgggagccggggccgcggcggcgcgggtgctccgggccgaggccgcggtaaagtttagcttgaatgtaatgttcaagctcagaaatgccttatgtggatcgtcagaatcgcatttgtggttttctagacattgaagaaaatgaaaacagtgggaaatttcttcgaaggtacttcatactggataccagagaagatagtttcgtgtggtacatggataatccacagaacctaccttctggatcatcacgtgttggagccattaagcttacctacatttcaaaggttagcgatgctactaagctaaggccaaaggcggagttctgttttgttatgaatgcaggaatgaggaagtacttcctacaagccaatgatcagcaggacctagtggaatgggtaaatgtgttaaacaaagctataaaaattacagtaccaaagcagtcagactcacagcctaattctgataacctaagtcgccatggtgaatgtgggaaaaagcaagtgtcttacagaactgatattgttggtggcgtacccatcattactcccactcagaaagaagaagtaaatgaatgtggtgaaagtattgacagaaataatctgaaacggtcacaaagccatcttccttactttactcctaaaccacctcaagatagtgcggttatcaaagctggatattgtgtaaaacaaggagcagtgatgaaaaactggaagagaagatattttcaattggatgaaaacacaataggctacttcaaatctgaactggaaaaggaacctcttcgtgtaataccacttaaagaggttcataaagtccaggaatgtaagcaaagcgacataatgatgagggacaacctctttgaaattgtaacaacgtctcgaactttctatgtgcaggctgatagccctgaagagatgcacagttggattaaagcagtctctggcgccattgtagcacagcggggtcccggcagatctgcgtcttctatgcggcaggccagaaggctgtcgaacccttgtatacagaggagcatccccccggtccttcagaatccaaacacgctttccgtcctaccaacgcagccaccgccacctcacattccacagcctctcgcagcaactctttggtctcaacctttaccatggagaagcgaggattttacgagtctcttgccaaggtcaagccagggaacttcaaggtccagactgtctctccaagagaaccagcttccaaagtgactgaacaagctctgttaagacctcaaagtaaaaatggccctcaggaaaaagattgtgacctagtagacttggacgatgcgagccttccggtcagtgacgtgtgaggcagaagcgcacggagcctgcctgcctctgccgtcctcagtttcctttcatgaggcttctagccaaagatgataaagggggaaatggtttttagtgcgtatattatactgcctcttaggtgtactctttataagctggtaaaccaagaatctagggagtggccaaactaaatataatttctttaaaaaagaaagaaaaaggaaaaatccaaaatatctcagtatcatctgtctgaagcattgtgtgttctcattcgggtggtaacaatgtatgtgtaatatttttttcttagtgattttgacagtttaaatgtttaacaacttaaagcattaaaaatgcttattaataactttggtcatttaaaaaatgctacaatgacttcctattaaaggttcaatatttacacattcttattggttgatattaccacatgaaatattgccagaccaagatacctaaactcatgatgtctgtggtgctgtaaaatttatactaaaatgtggactattttgaaattataaccatttttgatgccctgaatcttgaggtgacttattttgcatagaggatatggatagaccaacagtaagggttgtgggttataccggcatagagaaaagaagaaaactagaattgaaacaactgtgtcttagacatttgtttgaaaaagcttcatcaggccttggagcagtcactgctttattccgcaaaaattatttggtaggaaatttttgggagatctgattttcttatccaagttttgtaaatagttgttatttctatatttggattggtgaaagacctcaagtttatatgtaaagacataactgcccttagtcatgaaattgttgtgacctctactttttgtcactaatagcctacattcaagtgcctgtgttttttcatcttgtttaggaatgttttgagattaatgtgcttaaaagtcctacgtgactgattttaaacattgtgataaaattaattttcagtagaatagttgaatgtgttaagataggattttatgttagagataccagaatgctggtattctactacttgtgcaatatatatgttttaaaaaacaaatttgagaatacatttaatcatagggatatagatataagcacctctctaaagaatctttagtttccgacgttgaattatagaccagtttgagtaagtactgctttttttttttggagacgggctctcgctctgttgctcaggctggagtgcagtggcgtgatctcagctcactacagcctccacctcgtgggttcaaacagttgtgctgcctcagcttcccgagtagctaggattacaggtgcatgccaccacacctggctaatttttgtattttagtagagatggggtttcaccatgttggccaggctcgtctcgaactcctgacttcaggtgatccacccatctcagcctcccaaagtgctgggattacaggcgtgagccaccatgcccggcccataagtaccgtttttgaggttcagtcttaaacatttgctttaagaaaacagtcttgaatttcacatgctgctatttttatattttgccattttacagtactgttttgttttgaattcatgcatatcattgaaaatttctcgttttcattttcttagatgacttcttgtctgagacagaaaaatttcctactacagcagtgcagtccagaggttaagatgtattagaattatacaatatcagtttaaaaatctgtatgcataaagaatgcaccactcaacttttttattcataagctaatatttttttaaagttacattaagattttttctcttttgcagctacatttgaaagtgatagaataaagagattttaatgagttatcactttttcagctgatatattcattttaatggcttttttgaaagttcctttttcatgaacacacccgagaaatcttaaatagacactttgcaatatttaagaacctaatgctgtttaattttggtacagcttccacattgcatgttcactttagtatttgcaatttgatatatttcatggtggcaaaatattagctctgttttgggacattttaaaatagaactatccttgttcgatagcataggaaaatgttctggtgattgtcagggtctcctaatatttatctcaattcttttataagtctatggaaattatttaattattttaaaacgtacacacttttcttgtaaatatgtcacatctgagttcaaaaaaattactttgaataccttaatatttgctgcatttttttccgtatatataacatgtcttctttcagaatgggaatatatgtgtgcctcccaacatttactgttaaagtgtgttatctttatatgtcaaactggttgaacactgtaatgagaataaactgcacagagtttattctga

SEQ ID NO: 22701 - DNA, 3759 bp, Homo sapiens
  source 1..3759: mol_type = unassigned DNA
ggggacgcgtgcgcagtgcgcgggctggccgtcgcggacgccgctccgggcagccgagcctctgtgggagccggggccgcggcggcgcgggtgctccgggccgaggccgcgtgtaatgttcaagctcagaaatgccttatgtggatcgtcagaatcgcatttgtggttttctagacattgaagaaaatgaaaacagtgggaaatttcttcgaaggtacttcatactggataccagagaagatagtttcgtgtggtacatggataatccacagaacctaccttctggatcatcacgtgttggagccattaagcttacctacatttcaaaggttagcgatgctactaagctaaggccaaaggcggagttctgttttgttatgaatgcaggaatgaggaagtacttcctacaagccaatgatcagcaggacctagtggaatgggtaaatgtgttaaacaaagctataaaaattacagtaccaaagcagtcagactcacagcctaattctgataacctaagtcgccatggtgaatgtgggaaaaagcaagtgtcttacagaactgatattgttggtggcgtacccatcattactcccactcagaaagaagaagtaaatgaatgtggtgaaagtattgacagaaataatctgaaacggtcacaaagccatcttccttactttactcctaaaccacctcaagatagtgcggttatcaaagctggatattgtgtaaaacaaggagcagtgatgaaaaactggaagagaagatattttcaattggatgaaaacacaataggctacttcaaatctgaactggaaaaggaacctcttcgtgtaataccacttaaagaggttcataaagtccaggaatgtaagcaaagcgacataatgatgagggacaacctctttgaaattgtaacaacgtctcgaactttctatgtgcaggctgatagccctgaagagatgcacagttggattaaagcagtctctggcgccattgtagcacagcggggtcccggcagatctgcgtcttctgagcatccccccggtccttcagaatccaaacacgctttccgtcctaccaacgcagccaccgccacctcacattccacagcctctcgcagcaactctttggtctcaacctttaccatggagaagcgaggattttacgagtctcttgccaaggtcaagccagggaacttcaaggtccagactgtctctccaagagaaccagcttccaaagtgactgaacaagctctgttaagacctcaaagtaaaaatggccctcaggaaaaagattgtgacctagtagacttggacgatgcgagccttccggtcagtgacgtgtgaggcagaagcgcacggagcctgcctgcctctgccgtcctcagtttcctttcatgaggcttctagccaaagatgataaagggggaaatggtttttagtgcgtatattatactgcctcttaggtgtactctttataagctggtaaaccaagaatctagggagtggccaaactaaatataatttctttaaaaaagaaagaaaaaggaaaaatccaaaatatctcagtatcatctgtctgaagcattgtgtgttctcattcgggtggtaacaatgtatgtgtaatatttttttcttagtgattttgacagtttaaatgtttaacaacttaaagcattaaaaatgcttattaataactttggtcatttaaaaaatgctacaatgacttcctattaaaggttcaatatttacacattcttattggttgatattaccacatgaaatattgccagaccaagatacctaaactcatgatgtctgtggtgctgtaaaatttatactaaaatgtggactattttgaaattataaccatttttgatgccctgaatcttgaggtgacttattttgcatagaggatatggatagaccaacagtaagggttgtgggttataccggcatagagaaaagaagaaaactagaattgaaacaactgtgtcttagacatttgtttgaaaaagcttcatcaggccttggagcagtcactgctttattccgcaaaaattatttggtaggaaatttttgggagatctgattttcttatccaagttttgtaaatagttgttatttctatatttggattggtgaaagacctcaagtttatatgtaaagacataactgcccttagtcatgaaattgttgtgacctctactttttgtcactaatagcctacattcaagtgcctgtgttttttcatcttgtttaggaatgttttgagattaatgtgcttaaaagtcctacgtgactgattttaaacattgtgataaaattaattttcagtagaatagttgaatgtgttaagataggattttatgttagagataccagaatgctggtattctactacttgtgcaatatatatgttttaaaaaacaaatttgagaatacatttaatcatagggatatagatataagcacctctctaaagaatctttagtttccgacgttgaattatagaccagtttgagtaagtactgctttttttttttggagacgggctctcgctctgttgctcaggctggagtgcagtggcgtgatctcagctcactacagcctccacctcgtgggttcaaacagttgtgctgcctcagcttcccgagtagctaggattacaggtgcatgccaccacacctggctaatttttgtattttagtagagatggggtttcaccatgttggccaggctcgtctcgaactcctgacttcaggtgatccacccatctcagcctcccaaagtgctgggattacaggcgtgagccaccatgcccggcccataagtaccgtttttgaggttcagtcttaaacatttgctttaagaaaacagtcttgaatttcacatgctgctatttttatattttgccattttacagtactgttttgttttgaattcatgcatatcattgaaaatttctcgttttcattttcttagatgacttcttgtctgagacagaaaaatttcctactacagcagtgcagtccagaggttaagatgtattagaattatacaatatcagtttaaaaatctgtatgcataaagaatgcaccactcaacttttttattcataagctaatatttttttaaagttacattaagattttttctcttttgcagctacatttgaaagtgatagaataaagagattttaatgagttatcactttttcagctgatatattcattttaatggcttttttgaaagttcctttttcatgaacacacccgagaaatcttaaatagacactttgcaatatttaagaacctaatgctgtttaattttggtacagcttccacattgcatgttcactttagtatttgcaatttgatatatttcatggtggcaaaatattagctctgttttgggacattttaaaatagaactatccttgttcgatagcataggaaaatgttctggtgattgtcagggtctcctaatatttatctcaattcttttataagtctatggaaattatttaattattttaaaacgtacacacttttcttgtaaatatgtcacatctgagttcaaaaaaattactttgaataccttaatatttgctgcatttttttccgtatatataacatgtcttctttcagaatgggaatatatgtgtgcctcccaacatttactgttaaagtgtgttatctttatatgtcaaactggttgaacactgtaatgagaataaactgcacagagtttattctga

SEQ ID NO: 22702 - DNA, 1737 bp, Homo sapiens
  source 1..1737: mol_type = unassigned DNA
attttacattgagtcagtgatccatttgagttagtttttttcctcatagacagtcgattattccagtcttgtttgttgaaaagactgtcctttctctacaaaattgccttggcaccttggttgaaaattaactgttctctcttcctgtttactagaagaatttttaaaagaccggtgttatttttttccttaagggattggtagaattcacatatgaactatttctaggctttgacttttctttttggggttttagtagtgaattcatttgctttagtagaaataggtacttcagattttcttttttgtcttgtgtcagttttttcaaagttgtgttttttcaaagaatttgtttacttctaaattgtcaaatttgtttgcatgaattcttattacccacttaatgtctatagggtgtgtagtgtgtacttcctaatattggtgatttgctttctctctttcacttggttcacatagctatagatttatcaatttgatcttttcaagaaacagcttttggttttaatttgtattgtttgttttcaattttattagtttcttttctgatatttattattccctttctattttgggtttactttacctttttctagctttttagggtggagtttatgccattcatattagaccttttctaataaaaatatcttaagactataaattttctttcaaaatcacctttagctgcatactacaaattttgacttttaaaatttttcatttagttaagaatgttttctgatttcccttttgatttcttcttttacccatattttatttaaaagtgtattttaattttcaaatagctattcaggtgataatttcatctatagcactaaaaaccaatgaaaattctgacatatatttgtttataaaattccttgaatgctctgtatattgtatttatatggtatatacctgagggcttttctgtagcataaaagaacagttcattatttttcactgttctctgggttgaaggagctcatttgggcagctccatcttgggggtctctctcttgtagttgcagtcagatggcagctggaatgagagtcatctgaaggcttgactgggctggatggtcaagatagcctcttcactcactctgctagaatgactgggacagctgggtgtgggctggtcacctctctccgcacagcttcttcatgggactagttggctttcacacaacggggcagtctgaaggcagtcagatttcctacatgacagctgacttctagagtgagcattctaagacattgagttttttcaagtagataatttatttgctctactctttcaaactaagaagtaagataaatgtatggggccagtcattgtagaaactgcctgtgtaatgttcaagctcagaaatgccttatgtggatcgtcagaatcgcatttgtggttttctagacattgaagaaaatgaaaacagtgggaaatttcttcgaaggtacttcatactggataccagagaagatagtttcgtgtggtacatggataatccacagaacctaccttctggatcatcacgtgttggagccattaagcttacctacatttcaaaggttagcgatgctactaagctaaggccaaaggcggagttctgttttgttatgaatgcaggaatgaggaagtacttcctacaagccaatgatcagcaggacctagtggaatgggtaaatgtgttaaacaaagctataaaaattaca

SEQ ID NO: 22703 - DNA, 1632 bp, Homo sapiens
  source 1..1632: mol_type = unassigned DNA
gtgcgcagtgcgcgggctggccgtcgcggacgccgctccgggcagccgagcctctgtgggagccggggccgcggcggcgcgggtgctccgggccgaggccgcggtaaagtttagcttgaagaacgcggccgcgctggagcaggggtggtggacggggccaggcgcgaggtggcggcggctgcggggctgcgtgtaatgttcaagctcagaaatgccttatgtggatcgtcagaatcgcatttgtggttttctagacattgaagaaaatgaaaacagtgggaaatttcttcgaaggtacttcatactggataccagagaagatagtttcgtgtggtacatggataatccacagaacctaccttctggatcatcacgtgttggagccattaagcttacctacatttcaaaggttagcgatgctactaagctaaggccaaaggcggagttctgttttgttatgaatgcaggaatgaggaagtacttcctacaagccaatgatcagcaggacctagtggaatgggtaaatgtgttaaacaaagctataaaaattacagtaccaaagcagtcagactcacagcctaattctgataacctaagtcgccatggtgaatgtgggaaaaagcaagtgtcttacagaactgatattgttggtggcgtacccatcattactcccactcagaaagaagaagtaaatgaatgtggtgaaagtattgacagaaataatctgaaacggtcacaaagccatcttccttactttactcctaaaccacctcaagatagtgcggttatcaaagctggatattgtgtaaaacaaggagcagtgatgaaaaactggaagagaagatattttcaattggatgaaaacacaataggctacttcaaatctgaactggaaaaggaacctcttcgtgtaataccacttaaagaggttcataaagtccaggaatgtaagcaaagcgacataatgatgagggacaacctctttgaaattgtaacaacgtctcgaactttctatgtgcaggctgatagccctgaagagatgcacagttggattaaagcagtctctggcgccattgtagcacagcggggtcccggcagatctgcgtcttctgagcatccccccggtccttcagaatccaaacacgctttccgtcctaccaacgcagccaccgccacctcacattccacagcctctcgcagcaactctttggtctcaacctttaccatggagaagcgaggattttacgagtctcttgccaaggtcaagccagggaacttcaaggtccagactgtctctccaagagaaccagcttccaaagtgactgaacaagctctgttaagacctcaaagtaaaaatggccctcaggaaaaagattgtgacctagtagacttggacgatgcgagccttccggtcagtgacgtgtgaggcagaagcgcacggagcctgcctgcctctgccgtcctcagtttcctttcatgaggcttctagccaaagatgataaagggggaaatggtttttagtgcgtatattatactgcctcttaggtgtactctttataagctggtaaaccaagaatctagggagtggccaaactaaatataatttctttaaaaaagaaagaaaaaggaaaa

SEQ ID NO: 22704 - DNA, 3649 bp, Homo sapiens
  source 1..3649: mol_type = unassigned DNA
agtgtaatgttcaagctcagaaatgccttatgtggatcgtcagaatcgcatttgtggttttctagacattgaagaaaatgaaaacagtgggaaatttcttcgaaggtacttcatactggataccagagaagatagtttcgtgtggtacatggataatccacagaacctaccttctggatcatcacgtgttggagccattaagcttacctacatttcaaaggttagcgatgctactaagctaaggccaaaggcggagttctgttttgttatgaatgcaggaatgaggaagtacttcctacaagccaatgatcagcaggacctagtggaatgggtaaatgtgttaaacaaagctataaaaattacagtaccaaagcagtcagactcacagcctaattctgataacctaagtcgccatggtgaatgtgggaaaaagcaagtgtcttacagaactgatattgttggtggcgtacccatcattactcccactcagaaagaagaagtaaatgaatgtggtgaaagtattgacagaaataatctgaaacggtcacaaagccatcttccttactttactcctaaaccacctcaagatagtgcggttatcaaagctggatattgtgtaaaacaaggagcagtgatgaaaaactggaagagaagatattttcaattggatgaaaacacaataggctacttcaaatctgaactggaaaaggaacctcttcgtgtaataccacttaaagaggttcataaagtccaggaatgtaagcaaagcgacataatgatgagggacaacctctttgaaattgtaacaacgtctcgaactttctatgtgcaggctgatagccctgaagagatgcacagttggattaaagcagtctctggcgccattgtagcacagcggggtcccggcagatctgcgtcttctgagcatccccccggtccttcagaatccaaacacgctttccgtcctaccaacgcagccaccgccacctcacattccacagcctctcgcagcaactctttggtctcaacctttaccatggagaagcgaggattttacgagtctcttgccaaggtcaagccagggaacttcaaggtccagactgtctctccaagagaaccagcttccaaagtgactgaacaagctctgttaagacctcaaagtaaaaatggccctcaggaaaaagattgtgacctagtagacttggacgatgcgagccttccggtcagtgacgtgtgaggcagaagcgcacggagcctgcctgcctctgccgtcctcagtttcctttcatgaggcttctagccaaagatgataaagggggaaatggtttttagtgcgtatattatactgcctcttaggtgtactctttataagctggtaaaccaagaatctagggagtggccaaactaaatataatttctttaaaaaagaaagaaaaaggaaaaatccaaaatatctcagtatcatctgtctgaagcattgtgtgttctcattcgggtggtaacaatgtatgtgtaatatttttttcttagtgattttgacagtttaaatgtttaacaacttaaagcattaaaaatgcttattaataactttggtcatttaaaaaatgctacaatgacttcctattaaaggttcaatatttacacattcttattggttgatattaccacatgaaatattgccagaccaagatacctaaactcatgatgtctgtggtgctgtaaaatttatactaaaatgtggactattttgaaattataaccatttttgatgccctgaatcttgaggtgacttattttgcatagaggatatggatagaccaacagtaagggttgtgggttataccggcatagagaaaagaagaaaactagaattgaaacaactgtgtcttagacatttgtttgaaaaagcttcatcaggccttggagcagtcactgctttattccgcaaaaattatttggtaggaaatttttgggagatctgattttcttatccaagttttgtaaatagttgttatttctatatttggattggtgaaagacctcaagtttatatgtaaagacataactgcccttagtcatgaaattgttgtgacctctactttttgtcactaatagcctacattcaagtgcctgtgttttttcatcttgtttaggaatgttttgagattaatgtgcttaaaagtcctacgtgactgattttaaacattgtgataaaattaattttcagtagaatagttgaatgtgttaagataggattttatgttagagataccagaatgctggtattctactacttgtgcaatatatatgttttaaaaaacaaatttgagaatacatttaatcatagggatatagatataagcacctctctaaagaatctttagtttccgacgttgaattatagaccagtttgagtaagtactgctttttttttttggagacgggctctcgctctgttgctcaggctggagtgcagtggcgtgatctcagctcactacagcctccacctcgtgggttcaaacagttgtgctgcctcagcttcccgagtagctaggattacaggtgcatgccaccacacctggctaatttttgtattttagtagagatggggtttcaccatgttggccaggctcgtctcgaactcctgacttcaggtgatccacccatctcagcctcccaaagtgctgggattacaggcgtgagccaccatgcccggcccataagtaccgtttttgaggttcagtcttaaacatttgctttaagaaaacagtcttgaatttcacatgctgctatttttatattttgccattttacagtactgttttgttttgaattcatgcatatcattgaaaatttctcgttttcattttcttagatgacttcttgtctgagacagaaaaatttcctactacagcagtgcagtccagaggttaagatgtattagaattatacaatatcagtttaaaaatctgtatgcataaagaatgcaccactcaacttttttattcataagctaatatttttttaaagttacattaagattttttctcttttgcagctacatttgaaagtgatagaataaagagattttaatgagttatcactttttcagctgatatattcattttaatggcttttttgaaagttcctttttcatgaacacacccgagaaatcttaaatagacactttgcaatatttaagaacctaatgctgtttaattttggtacagcttccacattgcatgttcactttagtatttgcaatttgatatatttcatggtggcaaaatattagctctgttttgggacattttaaaatagaactatccttgttcgatagcataggaaaatgttctggtgattgtcagggtctcctaatatttatctcaattcttttataagtctatggaaattatttaattattttaaaacgtacacacttttcttgtaaatatgtcacatctgagttcaaaaaaattactttgaataccttaatatttgctgcatttttttccgtatatataacatgtcttctttcagaatgggaatatatgtgtgcctcccaacatttactgttaaagtgtgttatctttatatgtcaaactggttgaacactgtaatgagaataaactgcacagagtttattctg

SEQ ID NO: 22705 - DNA, 1753 bp, Homo sapiens
  source 1..1753: mol_type = unassigned DNA
aaagttgctatgtcattttgcatttccaccagcaatatatgatagttcgtttatttcacatctttgacagcatttagtgttgtcagggttttttttgtttgttttagacattttagtagtctggctcttgctgattgaattcctttggtgcagtttagcatgttcctctgtgttctgcatctcctgtagtgtaatgttcaagctcagaaatgccttatgtggatcgtcagaatcgcatttgtggttttctagacattgaagaaaatgaaaacagtgggaaatttcttcgaaggtacttcatactggataccagagaagatagtttcgtgtggtacatggataatccacagaacctaccttctggatcatcacgtgttggagccattaagcttacctacatttcaaaggttagcgatgctactaagctaaggccaaaggcggagttctgttttgttatgaatgcaggaatgaggaagtacttcctacaagccaatgatcagcaggacctagtggaatgggtaaatgtgttaaacaaagctataaaaattacagtaccaaagcagtcagactcacagcctaattctgataacctaagtcgccatggtgaatgtgggaaaaagcaagtgtcttacagaactgatattgttggtggcgtacccatcattactcccactcagaaagaagaagtaaatgaatgtggtgaaagtattgacagaaataatctgaaacggtcacaaagccatcttccttactttactcctaaaccacctcaagatagtgcggttatcaaagctggatattgtgtaaaacaaggagcagtgatgaaaaactggaagagaagatattttcaattggatgaaaacacaataggctacttcaaatctgaactggaaaaggaacctcttcgtgtaataccacttaaagaggttcataaagtccaggaatgtaagcaaagcgacataatgatgagggacaacctctttgaaattgtaacaacgtctcgaactttctatgtgcaggctgatagccctgaagagatgcacagttggattaaagcagtctctggcgccattgtagcacagcggggtcccggcagatctgcgtcttctatgcggcaggccagaaggctgtcgaacccttgtatacagaggtatacatcaagagctggtgaatgcagcacgtatgtgggctctcacgcaaacgtgccttcttagtggagggcccagacttactacttacaactgatcatagaaagagcatccccccggtccttcagaatccaaacacgctttccgtcctaccaacgcagccaccgccacctcacattccacagcctctcgcagcaactctttggtctcaacctttaccatggagaagcgaggattttacgagtctcttgccaaggtcaagccagggaacttcaaggtccagactgtctctccaagagaaccagcttccaaagtgactgaacaagctctgttaagacctcaaagtaaaaatggccctcaggaaaaagattgtgacctagtagacttggacgatgcgagccttccggtcagtgacgtgtgaggcagaagcgcacggagcctgcctgcctctgccgtcctcagtttcctttcatgaggcttctagccaaagatgataaagggggaaatggtttttagtgcgtatattatactgcctcttaggtgtactctttataagctggtaaaccaagaatctagggagtggccaaactaaatataatttcttt

SEQ ID NO: 22706 - DNA, 5638 bp, Homo sapiens
  source 1..5638: mol_type = unassigned DNA
aatgcgaaacgtaattaacccggaaaaaagagccgagggacgggagagaaggagggggcactgggggagaccagagcgaggggagcgagaggcgcggagagtttggcaggcagacccagaaatccctggagcgcggcggacccggcggccggaggggcgaccccgcccgatgtaacgcgccccgcccgagccccggcccctgcacggggggggtgatgtgagcagagcccaggaatgccttatgtggatcggcagaaccgaatctgtgggtttctggacatcgaggagcatgagaacagcggcaagtttctgcggaggtacttcattctggacacccaggctaactgcctcctctggtatatggacaacccccagaatctggcaatgggggcaggagctgttggagctttgcagctgacctacatctcgaaggtgagcatagctaccccaaaacagaaaccaaaaactccattttgctttgttatcaatgccctgtctcagagatatttccttcaagccaatgatcagaaagatatgaaggactgggttgaagccctgaaccaagccagcaagatcaccgttcccaaaggtgggggcctacccatgaccactgaagttctcaagagcttagcagctcctccagccctggagaagaagccacaggtggcctacaagacggagatcattggaggggtggtggtccacacacccatcagccagaacggtggggatgggcaggaagggagtgagcccgggtcccacaccatccttcgaaggtctcagagttacatccccacgtcaggctgccgtgcttccactgggcctcccctcattaagagtggttactgcgtgaagcaagggaatgtgcggaagagctggaaacgtcgcttctttgcacttgatgactttaccatctgctacttcaagtgtgagcaggaccgagaaccactgcgcaccatatttcttaaggatgttctgaagacccatgaatgtctggtcaagtctggtgatctcttaatgagggacaacctgtttgaaataataacaagctccaggaccttctacgtacaggcagacagtccagaagacatgcacagctggattaaggagattggcgcagctgtccaggccctcaagtgccaccccagagaaacgtccttttctagatccatttctttgacccgacctggaagctccagcctttcaagtgggcccaactctatcctgtgcagggggcggccacctttggaggaaaagaaagccctctgcaaagccccctctgtggcctcctcctggcagccctggacacctgtcccccaggctggggagaagctgcttccacctggagacacttcagaggactccttgttcacgcctcgtcctggggagggcagcgcccctggggtgctgcccagctcccggataaggcacagatcggagccccagcaccccaaggagaagccgtttatgttcaaccttgatgatgaaaacatacggacctctgatgtgtgatggagcacagtgccatgggagggagggagggagggaggacttgagagaaggaggctgtgactcagtttctctaccttgttggagggtagtcagaggcctttatgtcactcatattcctgtggatgctctttgggagggaggggcccatccagctgggctgtgtgtgtgtgtgtgtgtgtgtgtgtgtgtgtgtgtaatatcaacgcagtgtatttaatttggggaagtcactaggttagaactgtaggcatactcagtggagaggaagctacctattctattctaactattctgaggtcttcctggagagggattgttttagcagctcctctccagagggggctggaagtccagtttcaccaatgaccaagttttatttccttgtccttgttttagttttttcattttgttttcagtccaggtgcctcgcagctcttttggaatgggccagcattagtctaattttaagcgctatgtgttttgtacccttgcaaacttgctttctctttcttcttgctgttgccctttgaatgaagccttgtgtgcttgcatgatcagaccctgtaataggatgaatttccatgcacttaacatgaagagatacaaaaagaatctagagagagatatatatttttaatgaaatagaagcttggcatagaaacattgatttagatgttatgagttgctggccagagattcctcagataaaagagcctagaaaattgagttttgagcgggcatggtggctcacgcctgtaatgccagtagtttgggaggctgaggcgggtggatcacctgaggtcaggagttcgagatcagcctggccaacatggtgaaaccccgcctctactaaaaaatatgcaaaattagccgggcgtggtggtgcaggcctgtaatcccagctactcagaggctgaggcaggagattcacttgaacccaggaggtggaggttgcagtgagccaagatcgcgccattgcactccagtcagggcaacaagagtgaaactccgtctcaaaatataaaagaaaattgagtgtcccacccaaattttagggcgtacctccttccatttgataagaagatgctatttccagtgtccctgggagaattcttccatccagtttatatggtgaattgccaccagcgttccctaaaggaagagagaacttagcttatttctgtctgtgacttttatcagctagatcagttaattgtatttttaaattaaaaattagtaactagaggaagagactaagagaactatttttacctgagtaaatgctctcctcttcttgtgtccaaatctaatgcagaggtgaaaacacttgatgagaaaatcctttgtggcttgaggggaatcatgtttctttcaggacgtgttgtttccctgaagtctatgtcacactgagaactttttctgactgcactgctttggagctattcatttaaattgagtttggcctagttttcctggtataaaacaggaaatctacattgttccctctttctctcccttccatcccttcccctgcctttcctatacacgctggtgtgcttttgccctcagaaattcttggtttgggagttatgtatttttgagtgatcgaggttatgacatacttggagcggcatgatttcaagaagccattccaaattcttatagctccttagctctggttttactctcgtattttccccaagaaaattttttggctattcaaagaaagcacaaaatatgtgatgtggaactcatgaaaatagggacttttgatatctctttaaatattccctgactcacggaaaagatgtcctcttttggtgtatacattgtgaaaatctacccatttatctctctctctctcttttcttttaaataaattatctgataaggccggcaaggtggctcacgcctgtaatcccagcactttgggaggccgaggcgagcggatcacgaggtcaggagatcgagaccgcggtgaaaccccgtctctactaaaaatacgaaaaaaaaattagccgggcgcagtggcaggcgcctgtagtcccagctacttgggaggctgcggcaggagaatggtgtgaacctgggaggcggagcttgcagtgagccaagatcgcgccactgcactccagcctgggcgacagagcaagactccatctcaaaaaaaaaattatctgataggttactattgctaaattaattggccattataataagctgatttgtttcttattcagcaagatctcttttgagaatgtgacaaattaaacatacatagaatccatatggtattatcctgataaagggaaacgaggacactaagactgtcaaatggaaatcttcttgtcaattggcaaacacttgggaattccacattagagcattgcttgtttttaattttttttttttaatttttaaaagacagggtctcactctcttacccaggctagagtgcagtggtgtgatcatagttcatcataactttgaatctctgggcttaagcaatcctcccatgttagcttcccaagtagctaggactacagggttgtgctaccacgcctggctaatttttaatttttttttatctacagagcctggctatgttgcccaggctctctcaaactcctggcccaagtgatcctcctgccttggcctcctaaagtgttgggattacaggtgtgagccactgcacctagccagaacatcgttaatgtagttcaatatgagataaattattatcttcaatgaaacaagctctaaaagcattccattcctaaattgtatttcaaacttcctattttgttgatatttcttaacttctggccagttttggaccataatcttttaatgtgaaccaaagatggtacgtatttgaccaaagcagttagttttaaatgtataaaattgaaccaaatggaaaaaataggttggggatgcagtatagattagtgactaagtgcataggctctggagtaaatctgagtttttttttttttaaaggaactaaaaaatgtactgcattttctttgtggaataaaagccttgcctgagttgtgctattttcataaggcttttgaagtggtcttgacccactgtgtgtaacagtatttcaggtggtcctccccatggctgaataatgccatccattattctttaatttttatttttagaaacagtgtttcactctgtcacccaggctggagtgcagtggcctgatcatggctcactgcagcctggacctcctgggctcaagtgatcttcctgcctcacagcctcccaaagtactcagattataggtgtgagccaccacgcctggccaccatctattacttttgaaatcttcaaaagacttgcttactcaatgtcagctgatggttggtaaaaataatttggcctttagtgttaagtgagacatcataagggtattgaggtatacattatggagattgatgtcaggtcagaatattggagttatacatctatttctgagttgaatactcagctcccacgagaaagaaagtagttttaaggtccagcttcttagtctacttgaagcaaattttttttcttttatatttctgaatataaatatactcttatatgggctaaaaagaccccatgaataaatagcaggttcagtagttgaggagtggagtttagtaggtttgttttcagtataaattagataacatgtggaggtcacagcattttggaaattgagtgtccccaagtgagctttgtttataaactttcaaaatgtcggaagtggacaggtttgttaaatcttgtctgccagcacccttttcttcctttgttccttttcctctctgtgttattgcctgcggcagccagtccttcatactagatagagttcagataaagcaaacgtttggcaaaaacatactgtttgacctcctccccctctgcttatgaaggggtagcatgattctgtgttttaaagcagtgatgtttcagctgtgaaatgcactcgctgtaagctctaggctgagtgcatggaaactgttacgcttctcattttatgtgatctcctaattggtatgtagcaaaaattttctaaaactgttttgtggcttgttttgtaataaaaccatgtgaaatactg

SEQ ID NO: 22707 - DNA, 565 bp, Homo sapiens
  source 1..565: mol_type = unassigned DNA
gcagacccagaaatccctggagcgcggcggacccggcggccggaggggcgaccccgcccgatgtaacgcgccccgcccgagccccggcccctgcacggggggcagcgaaacttctctgcgggttctggcgctggggcaccgaccccgcaacgactgcccgggctgcgggaggggaggagagcagagaacgtccccagggtgatgtgagcagagcccaggaatgccttatgtggatcggcagaaccgaatctgtgggtttctggacatcgaggagcatgagaacagcggcaagtttctgcggaggtacttcattctggacacccaggctaactgcctcctctggtatatggacaacccccagaatctggcaatgggggcaggagctgttggagctttgcagctgacctacatctcgaaggtgagcatagctaccccaaaacagaaaccaaaaactccattttgctttgttatcaatgccctgtctcagagatatttccttcaagccaatgatcagaaagatatgaaggactgggttgaagccctgaaccaagccagcaagatcacc

SEQ ID NO: 22708 - DNA, 1749 bp, Homo sapiens
  source 1..1749: mol_type = unassigned DNA
agagaaggagggggcactgggggagaccagagcgaggggagcgagaggcgcggagagtttggcaggcagacccagaaatccctggagcgcggcggacccggcggccggaggggcgaccccgcccgatgtaacgcgccccgcccgagccccggcccctgcacgggggggaatctggcaatgggggcaggagctgttggagctttgcagctgacctacatctcgaaggtgagcatagctaccccaaaacagaaaccaaaaactccattttgctttgttatcaatgccctgtctcagagatatttccttcaagccaatgatcagaaagatatgaaggactgggttgaagccctgaaccaagccagcaagatcaccgttcccaaaggtgggggcctacccatgaccactgaagttctcaagagcttagcagctcctccagccctggagaagaagccacaggtggcctacaagacggagatcattggaggggtggtggtccacacacccatcagccagaacggtggggatgggcaggaagggagtgagcccgggtcccacaccatccttcgaaggtctcagagttacatccccacgtcaggctgccgtgcttccactgggcctcccctcattaagagtggttactgcgtgaagcaagggaatgtgcggaagagctggaaacgtcgcttctttgcacttgatgactttaccatctgctacttcaagtgtgagcaggaccgagaaccactgcgcaccatatttcttaaggatgttctgaagacccatgaatgtctggtcaagtctggtgatctcttaatgagggacaacctgtttgaaataataacaagctccaggaccttctacgtacaggcagacagtccagaagacatgcacagctggattaaggagattggcgcagctgtccaggccctcaagtgccaccccagagaaacgtccttttctagatccatttctttgacccgacctggaagctccagcctttcaagtgggcccaactctatcctgtgcagggggcggccacctttggaggaaaagaaagccctctgcaaagccccctctgtggcctcctcctggcagccctggacacctgtcccccaggctggggagaagctgcttccacctggagacacttcagaggactccttgttcacgcctcgtcctggggagggcagcgcccctggggtgctgcccagctcccggataaggcacagatcggagccccagcaccccaaggagaagccgtttatgttcaaccttgatgatgaaaacatacggacctctgatgtgtgatggagcacagtgccatgggagggagggagggagggaggacttgagagaaggaggctgtgactcagtttctctaccttgttggagggtagtcagaggcctttatgtcactcatattcctgtggatgctctttgggagggaggggcccatccagctgggctgtgtgtgtgtgtgtgtgtgtgtgtgtgtgtgtgtgtaatatcaacgcagtgtatttaatttggggaagtcactaggttagaactgtaggcatactcagtggagaggaagctacctattctattctaactattctgaggtcttcctggagagggattgttttagcagctcctctccagagggggctggaagtccagtttcaccaatgaccaagttttatttccttgtccttgttttagttttttcattttgttttcagtccaggtgcctcgcagctcttttggaat

SEQ ID NO: 22709 - DNA, 2784 bp, Homo sapiens
  source 1..2784: mol_type = unassigned DNA
gaaatcgacgtcggggtcaatgaaaacaaacggggagcccagggggaaggaaggcaggcgaggaagaggcagcgccggggcgccggagggagcagccgggctgcggaagcgcgagcaggaggccggtcgcgggcgcatttttgccgttgtcgcggccgccgccgccgaggcttacccgggaatgtctgggcccgcgcctcgcggcccccaagctccacgctgcgcccgctgtcccggcctctaaaggccgccacgtccctgcggcgcgcgcaggcagaaagcggcttcgtgccggcggagggggcccgggcgggccgggaggggctgccccaggccctgcgcctaccccatcaccgcggccggcgccgggccgggaggatgcgcggtgtggggctctgaagcatggagggggtgttgtacaagtggaccaactatctcacaggctggcagcctcgttggtttgttttagataatggaatcttatcctactatgattcacaagatgatgtttgcaaagggagcaaaggaagcataaagatggcagtttgtgaaattaaagttcattcagcagacaacacaagaatggaattaatcattcctggagagcagcatttctacatgaaggcagtgaatgcagctgaaagacagaggtggctggtcgctctggggagctccaaagcatgtttgactgatacaaggactaaaaaagaaaaagaaataagtgaaaccagtgaatcgctgaaaaccaaaatgtctgaacttcgcctctactgtgacctcttaatgcagcaagttcatacaatacaggaatttgttcaccatgatgagaatcattcatctcctagtgcagagaacatgaatgaagcctcttctctgcttagtgccacgtgtaacacattcatcacaacgcttgaggaatgtgtgaagatagccaatgccaagtttaaacctgagatgtttcaactgcaccatccggatcccttagtttctcctgtgtcaccttctcctgttcaaatgatgaagcgttctgtcagccaccctggttcttgcagttcagagaggagtagccactctataaaagaaccagtatctacacttcaccgactctcccagcgacgccgaagaacctactcagatacagattcttgtagtgatattcctcttgaagacccagatagacctgttcactgttcaaaaaatacacttaatggagatttggcatcagcaaccattcctgaagaaagcagacttatggccaaaaaacaatctgaatcagaagatactcttccatccttctcttcctgaagaaactgaagtgtccaacttcctctaagtattgctatgcaaaagctgctgtaattaaactattgttatagggagtagttttttcccttaggactctgcactttatagaatgttgtaaaacagacaaacaagaaaacaaaccacatacttttgaagtgtattttatctttatatagtttgtttgcaagagtattttcctaataacttcacagtatgaatgtgcatcttttttttttgaacaaatgatggtgtaacattttgacatccataaggacaaatgtagatatttttcttaaaaactctgaggggactgacagcatggtcagggtgtattgtagcttataaacatgaaatcttataaggtttcagtttgacagaagtgtgatatatgtaacttgtgccatggaccaaatggtcactttaccacagctaaaaatgagttacgatagcagcttgatggtgattgtattgtattcctttaatcaaaaaggaaacacaatattctaagtatctttagcccaaataccatgacatattgagcatctttaaataaccagactgtattgtccttcatatgtgaagttgacactactgatttgtcaataccaaattttgggttaaagtgtttaatttttatgtatttattttcttgttgcctcaaaagatgattgcattctaacttttgtgacctaccaaatttaagatgtgtatacgttgttctttacgttgttctagaaaagagattttaatgctgtagtgactttgctcacttacactagagaaataaacaactttcaatggaagagaattttagtgctttttttttcctaaaatagatattaagctgctgttgtaaagtattgtttgcagctctttccaatatctagagacatttttatttatgaatatttatacaaaaaggaattctgtcaagatgactgctctatatcacttgagaatggcattatttaattaaagaacaaatagcattttttggtagtgcctgtccatacctattgtcattgtttgccttgtaatctgtttttttgaattcattttgggctgatagttttgtttaaggttttggataaggagcactttaaaacaaactggtgtgttgtttttaagttaatcatatgtttaataaatgcgtggtttttgcattcaaacacatcatataatacattgtattttttacattcattgatattctgtctaatctttattaggcactaatataattctaatggatttgagtttgtttgtatatttaggcctgctggtgaagacacaaatgaagcataatttttgttgcctgtgagcttagaatggtgtgacctatttcattttatttcaatttatcttgtaagtttatgtgggatattttaaaataattaatatttggtatttgtttaaaaaactgtaattataggccttccatcttaagtttaagatggacataaacagtctatacattaa

SEQ ID NO: 22710 - DNA, 3082 bp, Homo sapiens
  source 1..3082: mol_type = unassigned DNA
gggaaagaccagcagagaggaaagagaaactgggagagggaggaagggagaaagtgagaagggaaatcggaaagagaaaagggaggaaacggcagagccagagagaaagaggaagagactgagtgtgaaggagagaggacacaggggatgactgagagacagagagagagagagagagagaatgagacagagacttaaggaagagaccctgtgagtctgacaataaaagatttggacagaaacagaaagattggagagagagagagagggagagaatgagtgagagagagactggaagagacagagatcagagggagacacagaaagtgagagtggggagagaggtagtgtaaaaggaagagagagagagagagaccgtaagagacaggagacaaagagacaaaaagtgtgagtgagcaggtgaggagagagattgagaactatgagagacagcagctaagagacaaaggaggcgggagactgcctaggtgccgcagcacccacaccgtcctcttgcccccccgtcactgggaccccagagctggcccttgatggaggggagccgacctcgcagcagcctgagcctggccagcagcgcctccaccatctcctcgctcagcagcctgagccccaagaagcccacccgggcagtaaacaagatccacgcctttgggaagagaggcaatgcgctcaggagggatcccaaccttcccgtgcacatccgaggctggcttcataagcaggacagctcggggctccgtctctggaaacgccgctggttcgtcctctccggccattgcctcttttattacaaggacagccgcgaggagagtgtcctaggcagcgtcctgctccccagctacaatattagaccagatgggccgggagccccccgagggcggcgcttcaccttcaccgcagagcacccgggcatgaggacctacgttttggccgctgacaccttagaagacctgcggggctggctacgggcgctgggccgggcctcccgtgcggagggggacgactatgggcaacccaggtcacctgcacgaccccagcccggggagggccccggcggccccggtggtcccccggaggtgagcagaggggaagaggggcgcatctcagaatcaccggaagtgactcgactctccagaggtcgtggtagacccaggctgctcactcccagccccacaaccgacctccactctggactccagatgcggagggcgaggagccccgacctgttcacccccctctctcgccctccctcgcctctgagcctcccccgtccccgttctgcccctgcgcggcgaccccctgccccctcaggagacacagcaccccctgcccgacctcacaccccgttgagtcgcattgatgtccgacctcctctggattggggcccccaacgccagaccctctcccgaccccctactccccgccgaggacctccctctgaggctgggggaggaaagccccccaggagtccccagcactggagtcaggagcccagaacacaggcacactctggctcccccacttatctccagctccccccgcggccccctgggacccgggcctccatggttttattgccgggtcctcccctggagtcaactttccaccaaagcttggagacagatacgctgctgaccaagttgtgcgggcaggaccggcttctgcggaggctgcaggaggagatagaccagaagcaggaggagaaggagcaactagaagcagctctggagttgacccggcaacagctgggccaagccaccagggaggctggggctcccgggagggcctggggtcgccagcgcctcttgcaggaccggctggtcagtgtgagggccaccctctgtcacttgactcaggagcgagagagggtttgggacacgtacagtggcctggagcaggagctgggcaccttaagagagacgctggagtacctgctgcaccttggttctccccaggacagagtgtctgctcagcagcagctgtggatggtggaagacacgctggcaggtctgggtggcccccagaaaccgcccccacacactgagcctgactccccatctcccgtgctccagggcgaggagtcctcagagagggagagcctgccagagtccttggaactgagctcccctaggtcccccgagactgactgggggcggcctcctggaggcgacaaagacctcgccagccctcacttaggtcttgggtctccgagggtctcccgggcttccagccctgagggtcgccacctcccttccccacagctaggaaccaaggccccggtggcccggccccggatgagtgcccaggagcagctggagcggatgcgcagaaaccaggaatgtggacggcccttccctcgcccgacctccccccggcttctcaccctgggaaggacactgtccccagccagacgccagcctgacgtggagcaaaggcctgtcgtaggacactcgggagcccagaaatggctcagaagctctgggtcctggagtagtccaaggaacaccaccccttacttgccgacttccgaaggtcaccgggagcgggttctcagcctctcccaagccctggctactgaggcgtcgcagtggcacagaatgatgacaggtggaaatttggactcccagggagaccctcttcccggtgtgccgctgcctccttcggaccccacgcgccaggagacccctccccccagatctcccccggtggctaattcgggttccacggggttctctcgccgagggagtgggcgtggaggaggtcccaccccctgggggcccgcgtgggatgccgggatcgcccctccggtcctgccacaagacgagggggcatggcctctgcgagtcactctgctacaatccagcttctaatccgcccaaaagcggcagccaatcggagcgcgaggacgtggtctggaggtaccgccggagatctgggaccactcagggcatcagggggcgtggtctggtccccattgcgggcccgggaggggaatggtttctatggccaaagtttggttttctcaacactgtctaaatttggattaaaactttgaactttt

SEQ ID NO: 22711 - DNA, 2786 bp, Homo sapiens
  source 1..2786: mol_type = unassigned DNA
gggaaagaccagcagagaggaaagagaaactgggagagggaggaagggagaaagtgagaagggaaatcggaaagagaaaagggaggaaacggcagagccagagagaaagaggaagagactgagtgtgaaggagagaggacacaggggatgactgagagacagagagagagagagagagagaatgagacagagacttaaggaagagaccctgtgagtctgacaataaaagatttggacagaaacagaaagattggagagagagagagagggagagaatgagtgagagagagactggaagagacagagatcagagggagacacagaaagtgagagtggggagagaggtagtgtaaaaggaagagagagagagagagaccgtaagagacaggagacaaagagacaaaaagtgtgagtgagcaggtgaggagagagattgagaactatgagagacagcagctaagagacaaaggaggcgggagactgcctaggtgccgcagcacccacaccgtcctcttgcccccccgtcactgggaccccagagctggcccttgatggaggggagccgacctcgcagcagcctgagcctggccagcagcgcctccaccatctcctcgctcagcagcctgagccccaagaagcccacccgggcagtaaacaagatccacgcctttgggaagagaggcaatgcgctcaggagggatcccaaccttcccgtgcacatccgaggctggcttcataagcaggacagctcggggctccgtctctggaaacgccgctggttcgtcctctccggccattgcctcttttattacaaggacagccgcgaggagagtgtcctaggcagcgtcctgctccccagctacaatattagaccagatgggccgggagccccccgagggcggcgcttcaccttcaccgcagagcacccgggcatgaggacctacgttttggccgctgacaccttagaagacctgcggggctggctacgggcgctgggccgggcctcccgtgcggagggggacgactatgggcaacccaggtcacctgcacgaccccagcccggggagggccccggcggccccggtggtcccccggaggtgagcagaggggaagaggggcgcatctcagaatcaccggaagtgactcgactctccagaggtcgtggtagacccaggctgctcactcccagccccacaaccgacctccactctggactccagatgcggagggcgaggagccccgacctgttcacccccctctctcgccctccctcgcctctgagcctcccccgtccccgttctgcccctgcgcggcgaccccctgccccctcaggagacacagcaccccctgcccgacctcacaccccgttgagtcgcattgatgtccgacctcctctggattggggcccccaacgccagaccctctcccgaccccctactccccgccgaggacctccctctgaggctgggggaggaaagccccccaggagtccccagcactggagtcaggagcccagaacacagccgggtcctcccctggagtcaactttccaccaaagcttggagacagatacgctgctgaccaagttgtgcgggcaggaccggcttctgcggaggctgcaggaggagatagaccagaagcaggaggagaaggagcaactagaagcagctctggagttgacccggcaacagctgggccaagccaccagggaggctggggctcccgggagggcctggggtcgccagcgcctcttgcaggaccggctggtcagtgtgagggccaccctctgtcacttgactcaggagcgagagagggtttgggacacgtacagtggcctggagcaggagctgggcaccttaagagagacgctggagtacctgctgcaccttggttctccccaggacagagtgtctgctcagcagcagctgtggatggtggaagacacgctggcaggtctgggtggcccccagaaaccgcccccacacactgagcctgactccccatctcccgtgctccagggcgaggagtcctcagagagggagagcctgccagagtccttggaactgagctcccctaggtcccccgagactgactgggggcggcctcctggaggcgacaaagacctcgccagccctcacttaggtcttgggtctccgagggtctcccgggcttccagccctgagggtcgccacctcccttccccacagctaggaaccaagtccaaggaacaccaccccttacttgccgacttccgaaggtcaccgggagcgggttctcagcctctcccaagccctggctactgaggcgtcgcagtggcacagaatgatgacaggtggaaatttggactcccagggagaccctcttcccggtgtgccgctgcctccttcggaccccacgcgccaggagacccctccccccagatctcccccggtggctaattcgggttccacggggttctctcgccgagggagtgggcgtggaggaggtcccaccccctgggggcccgcgtgggatgccgggatcgcccctccggtcctgccacaagacgagggggcatggcctctgcgagtcactctgctacaatccagcttctaatccgcccaaaagcggcagccaatcggagcgcgaggacgtggtctggaggtaccgccggagatctgggaccactcagggcatcagggggcgtggtctggtccccattgcgggcccgggaggggaatggtttctatggccaaagtttggttttctcaacactgtctaaatttggattaaaactttgaactttt

SEQ ID NO: 22712 - DNA, 4804 bp, Homo sapiens
  source 1..4804: mol_type = unassigned DNA
gctcggcgaacatggcggcggcgacggtcgggcgggacactttacctgagcattggtcctacggggtgtgccgggatggccgcgtcttcttcatcaatgaccagctccgctgcacgacctggctgcatccgcgcaccggggagcccgtcaactcgggccacatgatccgctcagacctgccccgcggctgggaggagggcttcacggaggagggcgccagctacttcatcgaccataaccagcagaccacagcattcaggcatcctgtgacgggacagttttctccagaaaatagtgaattcattcttcaagaagagccgaatccacatatgtcgaagcaagacagaaaccaaagaccgtccagcatggtcagtgaaacatccacggctgggaccgcctccaccctggaggccaagcctggacccaagatcataaagtccagcagtaaagtccacagctttgggaagagagaccaggccattcggaggaaccccaatgttcccgtggtggtgaggggctggctgcacaagcaggacagttctgggatgaggctgtggaaaaggaggtggtttgtgcttgctgattactgcttattttactataaagacagccgagaagaagcggtcctcgggagcatccccttgcccagctacgtgatctctcctgtggcccctgaggatcgcataagccgcaaatattcctttaaggctgtgcacacggggatgcgagcgctcatctataacagctccacagcgggctctcaggccgagcagtcaggcatgaggacctactacttcagtgccgacacccaggaggacatgaacgcttgggtcagggccatgaaccaggctgcacaggtgctgtctcgatcgtcactgaagagggatatggagaaggtggagcggcaggctgtcccccaggccaaccacacagagtcctgtcacgaatgtggccgggtgggacccggacatacgagagattgtcctcatcgtggccatgatgacattgtcaacttcgagaggcaggagcaggagggagagcagtaccgttcccagagggacccactggagggcaagcgggaccggagcaaggccaggtctccgtactcgccagccgaggaggatgccttgtttatggatttacccactggcccaagaggccagcaggcacagccccaacgggcagagaagaatggaatgctgcctgcctcatatggcccaggagaacagaatgggactggtgggtaccagcgggcctttcctcccaggaccaaccctgaaaaacacagccaaaggaagagcaatctggcccaggtggagcactgggcaagggcccagaaaggggatagcaggagtcttcccttggaccagacgcttcctcgccagggtcctggccaatccctgtccttcccagaaaactaccagactcttcccaagagcacccgacacccctcggggggctcctcgccacctccccgaaacctgccaagtgactacaagtatgcgcaggaccgagccagccacctgaagatgtcgagtgaagagcgccgggcgcaccgggatggcaccgtgtggcagctctacgagtggcagcagcgccagcagttccggcacggcagccccacagcgcccatctgccttggctccccagagttcaccgaccagggccggagcaggagcatgctagaggtgccccgctccatctctgtgcctccatctccctcggacatccctcccccaggacccccaagggtcttcccaccccggcggccacacacaccagcagagcgagtcacagtgaagccaccggaccagaggaggagtgtggacatctcgctgggggattctccaaggagggcacggggccacgctgtcaagaactcatctcatgtggaccgacgctccatgccctccatgggttacatgacccacaccgtcagcgctcccagtttacatggaaaatcggctgatgatacctacctccagctgaagaaagacctggagtacctggatctaaagatgacaggccgggaccttctcaaggatcgaagtctgaagcctgtgaagatcgctgagagcgacactgacgtcaaactgagcatcttctgtgaacaagacagggtcctccaggacttggaagacaagatacgagcccttaaagagaacaaagaccagctagaatctgtgctggaggtgttgcacagacagatggagcagtaccgagaccagccccagcacttggagaagattgcctaccagcagaagttgctgcaggaggaccttgtccatatccgagctgagctctccagagagtccactgagatggaaaatgcttggaacgaatacctgaagttggagaatgatgtggaacagctgaagcagaccctgcaggagcaacacagaagagccttttttttccaggagaaatcgcagatacagaaagatctatggagaattgaagatgtcactgcaggcctgagtgcaaataaagagaacttcagaattctagtggagtcagtaaaaaatccggagagaaaaacggtgcctttgtttcctcacccgcctgtgccttcactctcaacttctgagagcaagccgcccccacagcccagtcctcccaccagccctgtgcggacccctctggaggttcgactcttcccccagctgcaaacctacgtgccgtaccgacctcacccaccccagctgaggaaagtgacatccccccttcagtcaccaactaaggcgaagcccaaagttgaagatgaagcacctcccaggcccccactccccgaactctacagcccagaggaccagcccccggctgtgccgcctctgccaagagaggccaccatcatccggcacacatctgtgcggggcctcaagcggcagtcagacgagaggaagcgagaccgggagctggggcagtgtgtgaatggggattccagggtggagctgcggtcgtatgtcagtgagcctgagctggcgaccctcagcggggacatggcccagccctccctaggacttgtgggccctgagagcaggtaccagacgctgccaggcagagggctctcagggtccacgtcaaggctccagcagtcgtccaccattgctccctacgtcacactccggaggggtctcaatgccgaaagcagcaaggcgaccttccctagacctaagagtgccttggagcgcctgtactcaggggatcaccagcgaggcaagatgagtgcagaggagcagctggagcgcatgaagcgacaccagaaggccctggtccgagagcgcaagaggacactgggccaaggggagaggacgggcctgccctcatctcgctacctcagccggccgctccctggagatcttggctcagtatgttaggaggggccaggcagcggggcagggacagggagccgagtgcccctcagagtcccccaaacacaagcacatcacacctcccagtgagagagctgtccattgacctacatggttcagagaacaccccacggggctgtttgtccacgacccaggctggacgaatgcctggtcagagggtgacctgaaccagagctggagtgaggatcaaacaggcccaggagcctgaggaaatacccagtcagtcctcccagccgcgatggagaggggcctttgcaggcgttcggaatctcggctgaattcaggacctgggaatacagggttcagagaggagaggaggaagatggtgacatgatttggttagaagcacaagcaaactgatcagcctcccagacctgccagcagatgctgtgtgagggtgatggagcacggggtcacacccctgccccaagggccactggtctccctgggcttgcagtgcagaggcctcagggtgtctgggattgctggggaggcctgtgctgccccctggtggcgcttcctggcgctgcgccctgtccacagtcaccttaggtccctttggaaacattccatttgacttttccctgttgtttgaaatcccatgtttccctaaacctctagcctgattgttctttccctaattcattgcacaagctcctttgcttttagtgttaccgctcattgcctctctaatcctgcctgattgtgtttacagaagcttctgatttgcattgaacatgctctaactggcctgtgctacttattaccgggcttgtaatagcggttcttgtctccatagcctgttgagtgttcccagatgtgactcacctttctgctgccctcttcatgcaggcctactgactcataattcacttgtcccaaaagccaccccacaagcctgagccaacctgctgcctgacgccacagtcattggcagaggtctgggcattattaatttataaaaatccatgctttacacctggacagtagacagggacttcagagattgcacgtttgaatacattctcccaagactgaggttgttcggttttaattcctgtagtccaatcacacaatttcttatggaaaaccttttgtgtttctggtatttaataacttgaagggatagcaaaatatactgtgtattcagagggcctctctgcagctgctagctcagacaccaaaggggtaaggcccaggacattcatatctttaaaagctgcaaacctggtaacctttaaacttttaaaacaaatgtcatatggggtaacactgaccttttataatttgatgtctcaaatgtagagattatctaaaaatcgtaacttgaataccttgtaatttttctcttaaaaaagaagacttgtgtaagtctctgcatcaacgccaataaacatgttgcttaataataa

SEQ ID NO: 22713 - DNA, 4803 bp, Homo sapiens
  source 1..4803: mol_type = unassigned DNA
ccgcgctcggcgaacatggcggcggcgacggtcgggcgggacactttacctgagcattggtcctacggggtgtgccgggatggccgcgtcttcttcatcaatgaccagctccgctgcacgacctggctgcatccgcgcaccggggagcccgtcaactcgggccacatgatccgctcagacctgccccgcggctgggaggagggcttcacggaggagggcgccagctacttcatcgaccataaccagcagaccacagcattcaggcatcctgtgacgggacagttttctccagaaaatagtgaattcattcttcaagaagagccgaatccacatatgtcgaagcaagacagaaaccaaagaccgtccagcatggtcagtgaaacatccacggctgggaccgcctccaccctggaggccaagcctggacccaagatcataaagtccagcagtaaagtccacagctttgggaagagagaccaggccattcggaggaaccccaatgttcccgtggtggtgaggggctggctgcacaagcaggacagttctgggatgaggctgtggaaaaggaggtggtttgtgcttgctgattactgcttattttactataaagacagccgagaagaagcggtcctcgggagcatccccttgcccagctacgtgatctctcctgtggcccctgaggatcgcataagccgcaaatattcctttaaggctgtgcacacggggatgcgagcgctcatctataacagctccacagcgggctctcaggccgagcagtcaggcatgaggacctactacttcagtgccgacacccaggaggacatgaacgcttgggtcagggccatgaaccaggctgcacaggtgctgtctcgatcgtcactgaagagggatatggagaaggtggagcggcaggctgtcccccaggccaaccacacagagtcctgtcacgaatgtggccgggtgggacccggacatacgagagattgtcctcatcgtggccatgatgacattgtcaacttcgagaggcaggagcaggagggagagcagtaccgttcccagagggacccactggagggcaagcgggaccggagcaaggccaggtctccgtactcgccagccgaggaggatgccttgtttatggatttacccactggcccaagaggccagcaggcacagccccaacgggcagagaagaatggaatgctgcctgcctcatatggcccaggagaacagaatgggactggtgggtaccagcgggcctttcctcccaggaccaaccctgaaaaacacagccaaaggaagagcaatctggcccaggtggagcactgggcaagggcccagaaaggggatagcaggagtcttcccttggaccagacgcttcctcgccagggtcctggccaatccctgtccttcccagaaaactaccagactcttcccaagagcacccgacacccctcggggggctcctcgccacctccccgaaacctgccaagtgactacaagtatgcgcaggaccgagccagccacctgaagatgtcgagtgaagagcgccgggcgcaccgggatggcaccgtgtggcagctctacgagtggcagcagcgccagcagttccggcacggcagccccacagcgcccatctgccttggctccccagagttcaccgaccagggccggagcaggagcatgctagaggtgccccgctccatctctgtgcctccatctccctcggacatccctcccccaggacccccaagggtcttcccaccccggcggccacacacaccagcagagcgagtcacagtgaagccaccggaccagaggaggagtgtggacatctcgctgggggattctccaaggagggcacggggccacgctgtcaagaactcatctcatgtggaccgacgctccatgccctccatgggttacatgacccacaccgtcagcgctcccagtttacatggaaaatcggctgatgatacctacctccagctgaagaaagacctggagtacctggatctaaagatgacaggccgggaccttctcaaggatcgaagtctgaagcctgtgaagatcgctgagagcgacactgacgtcaaactgagcatcttctgtgaacaagacagggtcctccaggacttggaagacaagatacgagcccttaaagagaacaaagaccagctagaatctgtgctggaggtgttgcacagacagatggagcagtaccgagaccagccccagcacttggagaagattgcctaccagcagaagttgctgcaggaggaccttgtccatatccgagctgagctctccagagagtccactgagatggaaaatgcttggaacgaatacctgaagttggagaatgatgtggaacagctgaagcagaccctgcaggagcaacacagaagagccttttttttccaggagaaatcgcagatacagaaagatctatggagaattgaagatgtcactgcaggcctgagtgcaaataaagagaacttcagaattctagtggagtcagtaaaaaatccggagagaaaaacggtgcctttgtttcctcacccgcctgtgccttcactctcaacttctgagagcaagccgcccccacagcccagtcctcccaccagccctgtgcggacccctctggaggttcgactcttcccccagctgcaaacctacgtgccgtaccgacctcacccaccccagctgaggaaagtgacatccccccttcagtcaccaactaaggcgaagcccaaagttcaggaagatgaagcacctcccaggcccccactccccgaactctacagcccagaggaccagcccccggctgtgccgcctctgccaagagaggccaccatcatccggcacacatctgtgcggggcctcaagcggcagtcagacgagaggaagcgagaccgggagctggggcagtgtgtgaatggggattccagggtggagctgcggtcgtatgtcagtgagcctgagctggcgaccctcagcggggacatggcccagccctccctaggacttgtgggccctgagagcaggtaccagacgctgccaggcagagggctctcagggtccacgtcaaggctccagcagtcgtccaccattgctccctacgtcacactccggaggggtctcaatgccgaaagcagcaaggcgaccttccctagacctaagagtgccttggagcgcctgtactcaggggatcaccagcgaggcaagatgagtgcagaggagcagctggagcgcatgaagcgacaccagaaggccctggtccgagagcgcaagaggacactgggccaaggggagaggacgggcctgccctcatctcgctacctcagccggccgctccctggagatcttggctcagtatgttaggaggggccaggcagcggggcagggacagggagccgagtgcccctcagagtcccccaaacacaagcacatcacacctcccagtgagagagctgtccattgacctacatggttcagagaacaccccacggggctgtttgtccacgacccaggctggacgaatgcctggtcagagggtgacctgaaccagagctggagtgaggatcaaacaggcccaggagcctgaggaaatacccagtcagtcctcccagccgcgatggagaggggcctttgcaggcgttcggaatctcggctgaattcaggacctgggaatacagggttcagagaggagaggaggaagatggtgacatgatttggttagaagcacaagcaaactgatcagcctcccagacctgccagcagatgctgtgtgagggtgatggagcacggggtcacacccctgccccaagggccactggtctccctgggcttgcagtgcagaggcctcagggtgtctgggattgctggggaggcctgtgctgccccctggtggcgcttcctggcgctgcgccctgtccacagtcaccttaggtccctttggaaacattccatttgacttttccctgttgtttgaaatcccatgtttccctaaacctctagcctgattgttctttccctaattcattgcacaagctcctttgcttttagtgttaccgctcattgcctctctaatcctgcctgattgtgtttacagaagcttctgatttgcattgaacatgctctaactggcctgtgctacttattaccgggcttgtaatagcggttcttgtctccatagcctgttgagtgttcccagatgtgactcacctttctgctgccctcttcatgcaggcctactgactcataattcacttgtcccaaaagccaccccacaagcctgagccaacctgctgcctgacgccacagtcattggcagaggtctgggcattattaatttataaaaatccatgctttacacctggacagtagacagggacttcagagattgcacgtttgaatacattctcccaagactgaggttgttcggttttaattcctgtagtccaatcacacaatttcttatggaaaaccttttgtgtttctggtatttaataacttgaagggatagcaaaatatactgtgtattcagagggcctctctgcagctgctagctcagacaccaaaggggtaaggcccaggacattcatatctttaaaagctgcaaacctggtaacctttaaacttttaaaacaaatgtcatatggggtaacactgaccttttataatttgatgtctcaaatgtagagattatctaaaaatcgtaacttgaataccttgtaatttttctcttaaaaaagaagacttgtgtaagtctctgcatcaacgccaataaacatgttgctt

SEQ ID NO: 22714 - DNA, 3688 bp, Homo sapiens
  source 1..3688: mol_type = unassigned DNA
aggatgccttgtttatggatttacccactggcccaagaggccagcaggcacagccccaacgggcagagaagaatggaatgctgcctgcctcatatggcccaggagaacagaatgggactggtgggtaccagcgggcctttcctcccaggaccaaccctgaaaaacacagccaaaggaagagcaatctggcccaggtggagcactgggcaagggcccagaaaggggatagcaggagtcttcccttggaccagacgcttcctcgccagggtcctggccaatccctgtccttcccagaaaactaccagactcttcccaagagcacccgacacccctcggggggctcctcgccacctccccgaaacctgccaagtgactacaagtatgcgcaggaccgagccagccacctgaagatgtcgagtgaagagcgccgggcgcaccgggatggcaccgtgtggcagctctacgagtggcagcagcgccagcagttccggcacggcagccccacagcgcccatctgccttggctccccagagttcaccgaccagggccggagcaggagcatgctagaggtgccccgctccatctctgtgcctccatctccctcggacatccctcccccaggacccccaagggtcttcccaccccggcggccacacacaccagcagagcgagtcacagtgaagccaccggaccagaggaggagtgtggacatctcgctgggggattctccaaggagggcacggggccacgctgtcaagaactcatctcatgtggaccgacgctccatgccctccatgggttacatgacccacaccgtcagcgctcccagtttacatggaaaatcggctgatgatacctacctccagctgaagaaagacctggagtacctggatctaaagatgacaggccgggaccttctcaaggatcgaagtctgaagcctgtgaagatcgctgagagcgacactgacgtcaaactgagcatcttctgtgaacaagacagggtcctccaggacttggaagacaagatacgagcccttaaagagaacaaagaccagctagaatctgtgctggaggtgttgcacagacagatggagcagtaccgagaccagccccagcacttggagaagattgcctaccagcagaagttgctgcaggaggaccttgtccatatccgagctgagctctccagagagtccactgagatggaaaatgcttggaacgaatacctgaagttggagaatgatgtggaacagctgaagcagaccctgcaggagcaacacagaagagccttttttttccaggagaaatcgcagatacagaaagatctatggagaattgaagatgtcactgcaggcctgagtgcaaataaagagaacttcagaattctagtggagtcagtaaaaaatccggagagaaaaacggtgcctttgtttcctcacccgcctgtgccttcactctcaacttctgagagcaagccgcccccacagcccagtcctcccaccagccctgtgcggacccctctggaggttcgactcttcccccagctgcaaacctacgtgccgtaccgacctcacccaccccagctgaggaaagtgacatccccccttcagtcaccaactaaggcgaagcccaaagttcaggaagatgaagcacctcccaggcccccactccccgaactctacagcccagaggaccagcccccggctgtgccgcctctgccaagagaggccaccatcatccggcacacatctgtgcggggcctcaagcggcagtcagacgagaggaagcgagaccgggagctggggcagtgtgtgaatggggattccagggtggagctgcggtcgtatgtcagtgagcctgagctggcgaccctcagcggggacatggcccagccctccctaggacttgtgggccctgagagcaggtaccagacgctgccaggcagagggctctcagggtccacgtcaaggctccagcagtcgtccaccattgctccctacgtcacactccggaggggtctcaatgccgaaagcagcaaggcgaccttccctagacctaagagtgccttggagcgcctgtactcaggggatcaccagcgaggcaagatgagtgcagaggagcagctggagcgcatgaagcgacaccagaaggccctggtccgagagcgcaagaggacactgggccaaggggagaggacgggcctgccctcatctcgctacctcagccggccgctccctggagatcttggctcagtatgttaggaggggccaggcagcggggcagggacagggagccgagtgcccctcagagtcccccaaacacaagcacatcacacctcccagtgagagagctgtccattgacctacatggttcagagaacaccccacggggctgtttgtccacgacccaggctggacgaatgcctggtcagagggtgacctgaaccagagctggagtgaggatcaaacaggcccaggagcctgaggaaatacccagtcagtcctcccagccgcgatggagaggggcctttgcaggcgttcggaatctcggctgaattcaggacctgggaatacagggttcagagaggagaggaggaagatggtgacatgatttggttagaagcacaagcaaactgatcagcctcccagacctgccagcagatgctgtgtgagggtgatggagcacggggtcacacccctgccccaagggccactggtctccctgggcttgcagtgcagaggcctcagggtgtctgggattgctggggaggcctgtgctgccccctggtggcgcttcctggcgctgcgccctgtccacagtcaccttaggtccctttggaaacattccatttgacttttccctgttgtttgaaatcccatgtttccctaaacctctagcctgattgttctttccctaattcattgcacaagctcctttgcttttagtgttaccgctcattgcctctctaatcctgcctgattgtgtttacagaagcttctgatttgcattgaacatgctctaactggcctgtgctacttattaccgggcttgtaatagcggttcttgtctccatagcctgttgagtgttcccagatgtgactcacctttctgctgccctcttcatgcaggcctactgactcataattcacttgtcccaaaagccaccccacaagcctgagccaacctgctgcctgacgccacagtcattggcagaggtctgggcattattaatttataaaaatccatgctttacacctggacagtagacagggacttcagagattgcacgtttgaatacattctcccaagactgaggttgttcggttttaattcctgtagtccaatcacacaatttcttatggaaaaccttttgtgtttctggtatttaataacttgaagggatagcaaaatatactgtgtattcagagggcctctctgcagctgctagctcagacaccaaaggggtaaggcccaggacattcatatctttaaaagctgcaaacctggtaacctttaaacttttaaaacaaatgtcatatggggtaacactgaccttttataatttgatgtctcaaatgtagagattatctaaaaatcgtaacttgaataccttgtaatttttctcttaaaaaagaagacttgtgtaagtctctgcatcaacgccaataaacatgttgcttaataataa

SEQ ID NO: 22715 - DNA, 2016 bp, Homo sapiens
  source 1..2016: mol_type = unassigned DNA
actccccctccctggggtgggcaggtccggagggcggggcccgggggcagctgggctctcaggcgctgcgggaggagagaaatgccccaggctctccggggcacacaaagcgcaggcgcagcgggttgggtggcagcagcatcgagtagcggccgcttaggcagcaacatccgcaacaagtgtagacaaggtcccgcctgactccgctctggaaagtccttttgaagaaatggccctggtgaggggcggctggctgtggagacagagctccatcctccgccgctggaagcggaactggtttgccctgtggctggacgggaccctgggatactaccacgatgagacagcgcaggacgaggaggaccgtgtgctcatccacttcaatgtccgtgacataaagatcggcccagagtgccatgatgtgcagcccccagagggccggagccgagatggcctgctgactgtgaacctacgggaaggcggccgcctgcacctctgtgcggagaccaaggatgatgccctagcatggaagacagcactgctggaggcaaactccaccccggtgcgcgtctacagcccgtaccaagactactacgaggtggtgccccccaatgcacacgaggccacgtatgtccgcagctactacggaccgccctacgcaggccctggcgtgacgcacgtgatagtgcgggaggatccctgctacagcgccggcgcccctctggccatgggcatgcttgcgggagccgccactggggcggcgctgggctcgctcatgtggtcgccctgctggttctgagccctgggactcggagcactgacccctgcgcttggattgctagactcctcttcctcctggaccccatcctctaccatccaagccctgtcccactttggccctatcctctccattagctccttccgggtttggaccattccccccactccctacccttaatccccacatgggaagaagctatcatcacaggtacaaacatcgcttgaagtcttcacatctaccactagacacccccaaaatctgttatagacatttatggatacatttcctctaaacacaacagggcacagcaaatacgacttcatttggcttcgagttccccaggcgctgtagacacaacatgaatcgggctctctgctctctccttagggagctcgagtcctggtggggagaacaggagtaaacaaggacttgacaaagctgaagagttatcagtcctttgacaaggacaggtggggcagggagcaagacaggtaggctggaagaacagttattggcaagtatgcagagccgtgaacgtcatggcatgtccaaggaattaaatgggagttcatttgggctggggtggaggctgggatcagaccgtggtgggccttcaagctaaggagcttcctaggtgaaaggggagatgtgagccttctctggagggaagtttcatgattgcatctataatgaatatattgcctgttttgtgaatactgacacatgtccatacctaaaacactcctgagtcaagtcccatccttcccacaaacagcttcctggctggtacccatgataacaattgagctgaacctggggacccctggttggggaacaggtgagttctatttgagacttccagccctagaaagctgcctccgtccagaaatgcctctcacaccaggagctcggccctctctttgtagctgtgactgtcaccctctcaggctttgtctcatccttcattctgaataagatggcagtgttctcctctggggcctgatccacctctacaccagcccaggaagccccatctgtgcctgccctcaggtggtccaccagtctccccctttggttcccttccagtctcttccccctttctatcccaatcaccaatagaaatgctaacatccctgcctggtagccagactagcccactaaagctcccctgtaaatgggggctccattagttctgctgccgagactaataaagatttggttggctctagcagtaa

SEQ ID NO: 22716 - DNA, 2380 bp, Homo sapiens
  source 1..2380: mol_type = unassigned DNA
aagagaggaaggcttaaagagccagactgcgcagccaggactggggtgatgggcgctgtcctgccaggccaaagaatgaagatgtagccccgcccccaacctagggaggaggaccagcccggttcctgtcctgcccccgcaacctcgccccgattccactccgggaacctcggcgatgctgagccaagaccacttctgaatcagggatgacttgtctagtgaacctagggtcagagccatcagttggaaaggctgggaggagcctggagaaagagggcgaccttccttgggatctgtgcgctccctccttgcctccccctccagcctcccacttggtagcaccttcctgatccccttatctctaaggcgctcagggaaatgccccgctgcgggagccttctgggaaatgctgccctggccacccaggaaccatgagccctgcagccccggtcccgcctgactccgctctggaaagtccttttgaagaaatggccctggtgaggggcggctggctgtggagacagagctccatcctccgccgctggaagcggaactggtttgccctgtggctggacgggaccctgggatactaccacgatgagacagcgcaggacgaggaggaccgtgtgctcatccacttcaatgtccgtgacataaagatcggcccagagtgccatgatgtgcagcccccagagggccggagccgagatggcctgctgactgtgaacctacgggaaggcggccgcctgcacctctgtgcggagaccaaggatgatgccctagcatggaagacagcactgctggaggcaaactccaccccggccccagctggagccaccgtccctcccaggagccgccgggtttgctccaaggtcaggtgtgtgacccgctcgtggagcccctgtaaggttgagaggcggatctgggtgcgcgtctacagcccgtaccaagactactacgaggtggtgccccccaatgcacacgaggccacgtatgtccgcagctactacggaccgccctacgcaggccctggcgtgacgcacgtgatagtgcgggaggatccctgctacagcgccggcgcccctctggccatgggcatgcttgcgggagccgccactggggcggcgctgggctcgctcatgtggtcgccctgctggttctgagccctgggactcggagcactgacccctgcgcttggattgctagactcctcttcctcctggaccccatcctctaccatccaagccctgtcccactttggccctatcctctccattagctccttccgggtttggaccattccccccactccctacccttaatccccacatgggaagaagctatcatcacaggtacaaacatcgcttgaagtcttcacatctaccactagacacccccaaaatctgttatagacatttatggatacatttcctctaaacacaacagggcacagcaaatacgacttcatttggcttcgagttccccaggcgctgtagacacaacatgaatcgggctctctgctctctccttagggagctcgagtcctggtggggagaacaggagtaaacaaggacttgacaaagctgaagagttatcagtcctttgacaaggacaggtggggcagggagcaagacaggtaggctggaagaacagttattggcaagtatgcagagccgtgaacgtcatggcatgtccaaggaattaaatgggagttcatttgggctggggtggaggctgggatcagaccgtggtgggccttcaagctaaggagcttcctaggtgaaaggggagatgtgagccttctctggagggaagtttcatgattgcatctataatgaatatattgcctgttttgtgaatactgacacatgtccatacctaaaacactcctgagtcaagtcccatccttcccacaaacagcttcctggctggtacccatgataacaattgagctgaacctggggacccctggttggggaacaggtgagttctatttgagacttccagccctagaaagctgcctccgtccagaaatgcctctcacaccaggagctcggccctctctttgtagctgtgactgtcaccctctcaggctttgtctcatccttcattctgaataagatggcagtgttctcctctggggcctgatccacctctacaccagcccaggaagccccatctgtgcctgccctcaggtggtccaccagtctccccctttggttcccttccagtctcttccccctttctatcccaatcaccaatagaaatgctaacatccctgcctggtagccagactagcccactaaagctcccctgtaaatgggggctccattagttctgctgccgagactaataaagatttggttggctctagcagtaa

SEQ ID NO: 22717 - DNA, 2275 bp, Homo sapiens
  source 1..2275: mol_type = unassigned DNA
aagagaggaaggcttaaagagccagactgcgcagccaggactggggtgatgggcgctgtcctgccaggccaaagaatgaagatgtagccccgcccccaacctagggaggaggaccagcccggttcctgtcctgcccccgcaacctcgccccgattccactccgggaacctcggcgatgctgagccaagaccacttctgaatcagggatgacttgtctagtgaacctagggtcagagccatcagttggaaaggctgggaggagcctggagaaagagggcgaccttccttgggatctgtgcgctccctccttgcctccccctccagcctcccacttggtagcaccttcctgatccccttatctctaaggcgctcagggaaatgccccgctgcgggagccttctgggaaatgctgccctggccacccaggaaccatgagccctgcagccccggtcccgcctgactccgctctggaaagtccttttgaagaaatggccctggtgaggggcggctggctgtggagacagagctccatcctccgccgctggaagcggaactggtttgccctgtggctggacgggaccctgggatactaccacgatgagacagcgcaggacgaggaggaccgtgtgctcatccacttcaatgtccgtgacataaagatcggcccagagtgccatgatgtgcagcccccagagggccggagccgagatggcctgctgactgtgaacctacgggaaggcggccgcctgcacctctgtgcggagaccaaggatgatgccctagcatggaagacagcactgctggaggcaaactccaccccggtgcgcgtctacagcccgtaccaagactactacgaggtggtgccccccaatgcacacgaggccacgtatgtccgcagctactacggaccgccctacgcaggccctggcgtgacgcacgtgatagtgcgggaggatccctgctacagcgccggcgcccctctggccatgggcatgcttgcgggagccgccactggggcggcgctgggctcgctcatgtggtcgccctgctggttctgagccctgggactcggagcactgacccctgcgcttggattgctagactcctcttcctcctggaccccatcctctaccatccaagccctgtcccactttggccctatcctctccattagctccttccgggtttggaccattccccccactccctacccttaatccccacatgggaagaagctatcatcacaggtacaaacatcgcttgaagtcttcacatctaccactagacacccccaaaatctgttatagacatttatggatacatttcctctaaacacaacagggcacagcaaatacgacttcatttggcttcgagttccccaggcgctgtagacacaacatgaatcgggctctctgctctctccttagggagctcgagtcctggtggggagaacaggagtaaacaaggacttgacaaagctgaagagttatcagtcctttgacaaggacaggtggggcagggagcaagacaggtaggctggaagaacagttattggcaagtatgcagagccgtgaacgtcatggcatgtccaaggaattaaatgggagttcatttgggctggggtggaggctgggatcagaccgtggtgggccttcaagctaaggagcttcctaggtgaaaggggagatgtgagccttctctggagggaagtttcatgattgcatctataatgaatatattgcctgttttgtgaatactgacacatgtccatacctaaaacactcctgagtcaagtcccatccttcccacaaacagcttcctggctggtacccatgataacaattgagctgaacctggggacccctggttggggaacaggtgagttctatttgagacttccagccctagaaagctgcctccgtccagaaatgcctctcacaccaggagctcggccctctctttgtagctgtgactgtcaccctctcaggctttgtctcatccttcattctgaataagatggcagtgttctcctctggggcctgatccacctctacaccagcccaggaagccccatctgtgcctgccctcaggtggtccaccagtctccccctttggttcccttccagtctcttccccctttctatcccaatcaccaatagaaatgctaacatccctgcctggtagccagactagcccactaaagctcccctgtaaatgggggctccattagttctgctgccgagactaataaagatttggttggctctagcagtaa

SEQ ID NO: 22718 - DNA, 2061 bp, Homo sapiens
  source 1..2061: mol_type = unassigned DNA
aggcgctgcgggaggagagaaatgccccaggctctccggggcacacaaagcgcaggcgcagcgggttgggtggcagcagcatcgagtagcggccgcttaggcagcaacatccgcaacaagtgtagacaaggtcccgcctgactccgctctggaaagtccttttgaagaaatggccctggtgaggggcggctggctgtggagacagagctccatcctccgccgctggaagcggaactggtttgccctgtggctggacgggaccctgggatactaccacgatgagacagcgcaggacgaggaggaccgtgtgctcatccacttcaatgtccgtgacataaagatcggcccagagtgccatgatgtgcagcccccagagggccggagccgagatggcctgctgactgtgaacctacgggaaggcggccgcctgcacctctgtgcggagaccaaggatgatgccctagcatggaagacagcactgctggaggcaaactccaccccggccccagctggagccaccgtccctcccaggagccgccgggtttgctccaaggtcaggtgtgtgacccgctcgtggagcccctgtaaggttgagaggcggatctgggtgcgcgtctacagcccgtaccaagactactacgaggtggtgccccccaatgcacacgaggccacgtatgtccgcagctactacggaccgccctacgcaggccctggcgtgacgcacgtgatagtgcgggaggatccctgctacagcgccggcgcccctctggccatgggcatgcttgcgggagccgccactggggcggcgctgggctcgctcatgtggtcgccctgctggttctgagccctgggactcggagcactgacccctgcgcttggattgctagactcctcttcctcctggaccccatcctctaccatccaagccctgtcccactttggccctatcctctccattagctccttccgggtttggaccattccccccactccctacccttaatccccacatgggaagaagctatcatcacaggtacaaacatcgcttgaagtcttcacatctaccactagacacccccaaaatctgttatagacatttatggatacatttcctctaaacacaacagggcacagcaaatacgacttcatttggcttcgagttccccaggcgctgtagacacaacatgaatcgggctctctgctctctccttagggagctcgagtcctggtggggagaacaggagtaaacaaggacttgacaaagctgaagagttatcagtcctttgacaaggacaggtggggcagggagcaagacaggtaggctggaagaacagttattggcaagtatgcagagccgtgaacgtcatggcatgtccaaggaattaaatgggagttcatttgggctggggtggaggctgggatcagaccgtggtgggccttcaagctaaggagcttcctaggtgaaaggggagatgtgagccttctctggagggaagtttcatgattgcatctataatgaatatattgcctgttttgtgaatactgacacatgtccatacctaaaacactcctgagtcaagtcccatccttcccacaaacagcttcctggctggtacccatgataacaattgagctgaacctggggacccctggttggggaacaggtgagttctatttgagacttccagccctagaaagctgcctccgtccagaaatgcctctcacaccaggagctcggccctctctttgtagctgtgactgtcaccctctcaggctttgtctcatccttcattctgaataagatggcagtgttctcctctggggcctgatccacctctacaccagcccaggaagccccatctgtgcctgccctcaggtggtccaccagtctccccctttggttcccttccagtctcttccccctttctatcccaatcaccaatagaaatgctaacatccctgcctggtagccagactagcccactaaagctcccctgtaaatgggggctccattagttctgctgccgagactaataaagatttggttggctctagcagtaa

SEQ ID NO: 22719 - DNA, 1049 bp, Homo sapiens
  source 1..1049: mol_type = unassigned DNA
acttctacagatctagaaactgagaccaggacagagggccagggaggagggatatggccaaagttaccaagctgaggctggaatccaggctcctggtccccacccccaccccacaccaatggctgccctgctgaccccacagtgacagtgctcccattctcttcctgagcagagaatggggaggaggccgaggccgcctggcccttgtttactaaccctccctcaaacgtttcctgggtggctccccagggacggcagggctgggggcttctctccagggagctgctgctgaggcctgtgtctcccgtggctcctctgacaggtcccgcctgactccgctctggaaagtccttttgaagaaatggccctggtgaggggcggctggctgtggagacagagctccatcctccgccgctggaagcggaactggtttgccctgtggctggacgggaccctgggatactaccacgatgagacagcgcaggacgaggaggaccgtgtgctcatccacttcaatgtccgtgacataaagatcggcccagagtgccatgatgtgcagcccccagagggccggagccgagatggcctgctgactgtgaacctacgggaaggcggccgcctgcacctctgtgcggagaccaaggatgatgccctagcatggaagacagcactgctggaggcaaactccaccccggtgcgcgtctacagcccgtaccaagactactacgaggtggtgccccccaatgcacacgaggccacgtatgtccgcagctactacggaccgccctacgcaggccctggcgtgacgcacgtgatagtgcgggaggatccctgctacagcgccggcgcccctctggccatgggcatgcttgcgggagccgccactggggcggcgctgggctcgctcatgtggtcgccctgctggttctgagccctgggactcggagcactgacccctgcgcttggattgctagactcctcttcctcctggaccccatcctctaccatccaagccctgtcccactttggccctatcctctccattagct

SEQ ID NO: 22720 - DNA, 567 bp, Homo sapiens
  source 1..567: mol_type = unassigned DNA
aaagcgcaggcgcagcgggttgggtggcagcagcatcgagtagcggccgcttaggcagcaacatccgcaacaagtgtagacaagacattctgatttaattgttacggagtgtggcctggtatcggaagttctcaaagctcctgccggcataacggtttgaagccaggactgctgggtgtcccgcctgactccgctctggaaagtccttttgaagaaatggccctggtgaggggcggctggctgtggagacagagctccatcctccgccgctggaagcggaactggtttgccctgtggctggacgggaccctgggatactaccacgatgagacagcgcaggacgaggaggaccgtgtgctcatccacttcaatgtccgtgacataaagatcggcccagagtgccatgatgtgcagcccccagagggccggagccgagatggcctgctgactgtgaacctacgggaaggcggccgcctgcacctctgtgcggagaccaaggatgatgccctagcatggaagacagcactgctggaggcaaactccaccccggtgcgcgtctacagcccg

SEQ ID NO: 22721 - DNA, 685 bp, Homo sapiens
  source 1..685: mol_type = unassigned DNA
ggcaagtgagtcgccctcaggaacagagggcacctacctggattccagtgcaagctacatcatgtacatggatgagtcatttgctaaccctcagtttgtccatctgtaaaacaggagtaaggattcccttcctaacagggttagagtggggacaaggtcccgcctgactccgctctggaaagtccttttgaagaaatggccctggtgaggggcggctggctgtggagacagagctccatcctccgccgctggaagcggaactggtttgccctgtggctggacgggaccctgggatactaccacgatgagacagcgcaggacgaggaggaccgtgtgctcatccacttcaatgtccgtgacataaagatcggcccagagtgccatgatgtgcagcccccagagggccggagccgagatggcctgctgactgtgaacctacgggaaggcggccgcctgcacctctgtgcggagaccaaggatgatgccctagcatggaagacagcactgctggaggcaaactccaccccggtgcgcgtctacagcccgtaccaagactactacgaggtggtgccccccaatgcacacgaggccacgtatgtccgcagctactacggaccgccctacgcaggccctggcgtgacgcacgtgatagtgcgggaggatccctgctacagcgccggcgccc

SEQ ID NO: 22722 - DNA, 1164 bp, Homo sapiens
  source 1..1164: mol_type = unassigned DNA
aaagcgcaggcgcagcgggttgggtggcagcagcatcgagtagcggccgcttaggcagcaacatccgcaacaagtgtagacaaggtcccgcctgactccgctctggaaagtccttttgaagaaatggccctggtgaggggcggctggctgtggagacagagctccatcctccgccgctggaagcggaactggtttgccctgtggctggacgggaccctgggatactaccacgatgagacagcgcaggacgaggaggaccgtgtgctcatccacttcaatgtccgtgacataaagatcggcccagagtgccatgatgtgcagcccccagagggccggagccgagatggcctgctgactgtgaacctacgggaaggcggccgcctgcacctctgtgcggagaccaaggatgatgccctagcatggaagacagcactgctggaggcaaactccaccccgatgataagactgaagctcattcatccgcacaacaaatatttactgagctgctacagcgccggcgcccctctggccatgggcatgcttgcgggagccgccactggggcggcgctgggctcgctcatgtggtcgccctgctggttctgagccctgggactcggagcactgacccctgcgcttggattgctagactcctcttcctcctggaccccatcctctaccatccaagccctgtcccactttggccctatcctctccattagctccttccgggtttggaccattccccccactccctacccttaatccccacatgggaagaagctatcatcacaggtacaaacatcgcttgaagtcttcacatctaccactagacacccccaaaatctgttatagacatttatggatacatttcctctaaacacaacagggcacagcaaatacgacttcatttggcttcgagttccccaggcgctgtagacacaacatgaatcgggctctctgctctctccttagggagctcgagtcctggtggggagaacaggagtaaacaaggacttgacaaagctgaagagttatcagtcctttgacaaggacaggtggggcagggagcaagacaggtaggctggaagaacagttattggcaagtatgcagagccgtgaacgtcatggcatgtccaaggaattaaatgggagttcatttgggct

SEQ ID NO: 22723 - DNA, 618 bp, Homo sapiens
  source 1..618: mol_type = unassigned DNA
aaacgtttcctgggtggctccccagggacggcagggctgggggcttctctccagggagctgctgctgaggcctgtgtctcccgtggctcctctgacaggtcccgcctgactccgctctggaaagtccttttgaagaaatggccctggtgaggggcggctggctgtggagacagagctccatcctccgccgctggaagcggaactggtttgccctgtggctggacgggaccctgggatactaccacgatgagacagcgcaggacgaggaggaccgtgtgctcatccacttcaatgtccgtgacataaagatcggcccagagtgccatgatgtgcagcccccagagggccggagccgagatggcctgctgactgtgaacctacgggaaggcggccgcctgcacctctgtgcggagaccaaggatgatgccctagcatggaagacagcactgctggaggcaaactccaccccggccccagctggagccaccgtccctcccaggagccgccgggtttgctccaaggtcaggtgtgtgacccgctcgtggagcccctgtaaggttgagaggcggatctgggtgcgcgtctacagcccgtaccaagactactacgaggtggtgc

SEQ ID NO: 22724 - DNA, 656 bp, Homo sapiens
  source 1..656: mol_type = unassigned DNA
aacatccgcaacaagtgtagacaaggtgggtgcatcaaggggaggggctggaaaaggagtctgcacctgaccctcttgtctgatctgtgtcaagaccgtggagaggggagggagcggcaagaggaacagacaaggctgggccttccagcccaggtcccgcctgactccgctctggaaagtccttttgaagaaatggccctggtgaggggcggctggctgtggagacagagctccatcctccgccgctggaagcggaactggtttgccctgtggctggacgggaccctgggatactaccacgatgagacagcgcaggacgaggaggaccgtgtgctcatccacttcaatgtccgtgacataaagatcggcccagagtgccatgatgtgcagcccccagagggccggagccgagatggcctgctgactgtgaacctacgggaaggcggccgcctgcacctctgtgcggagaccaaggatgatgccctagcatggaagacagcactgctggaggcaaactccaccccggtgcgcgtctacagcccgtaccaagactactacgaggtggtgccccccaatgcacacgaggccacgtatgtccgcagctactacggaccgccctacgcaggccctggcgtgacgcacgtgatagtgcggga

SEQ ID NO: 22725 - DNA, 534 bp, Homo sapiens
  source 1..534: mol_type = unassigned DNA
aaagcgcaggcgcagcgggttgggtggcagcagcatcgagtagcggccgcttaggcagcaacatccgcaacaagtgtagacaaggtgggtgcatcaaggggaggggctggaaaaggagtctgcacctgaccctcttgtctgatctgtgtcaagaccgtggagaggggagggagcggcaagaggaacagacaaggctgggccttccagcccaggtgtgccagcccttgttacgcagcaacaggtcccgcctgactccgctctggaaagtccttttgaagaaatggccctggtgaggggcggctggctgtggagacagagctccatcctccgccgctggaagcggaactggtttgccctgtggctggacgggaccctgggatactaccacgatgagacagcgcaggacgaggaggaccgtgtgctcatccacttcaatgtccgtgacataaagatcggcccagagtgccatgatgtgcagcccccagagggccggagccgagatggcctgctgactgtgaacctacgggaaggcgg

SEQ ID NO: 22726 - DNA, 6802 bp, Homo sapiens
  source 1..6802: mol_type = unassigned DNA
tggtcagccacccctggctggctccaggcccagctccccaatattccccactaggcctcagtgtgtcctcatttctatctgtacctttgccatcctgggccatgcaacctgtagctctcggcctcttctgtctcctttcaggctgagtctctgaatctgtctccatttgtgactctggtttccatgggatacatagatgtggagcctcaggagggcaggggtagtgtgatcagtgtcaggcgccccaaagcatttattctgtgccaggccctgtgctggatgctgaaagtacggaagtggataacatacagtctctgtttccatgaagcctacaatgcacattctctgtggagtggagaaaccagggcccagccctgcctctatctcagtatggctgtacctcccctgaatctgcctgctgtgcccagggtgccaggtcagctatagcctgtggcttgaggctcttctttgcctctggcattcacaggggtatgtgtgcccgccagcaggtcccccccggctcttagggctcctgggggacttggctggtgggtgctggtgggcagcagaaggggagggagggagcagaaggcagtgactcagtgggggtggccctgggacagaactggggaggaagccaaggttggatgatgcttcctgaagccaggagggtgggaagagaggtctggctgggagttagggatggagcaggacaactccaaggctcccctctggcagccagacctgctcatgaagaaggctcctcggtagctgcctgaaagtctggactctgggggctgggctgggctgggtggggagattgctgttggtcccactgtgcctgttgtaatccccaggttcatgaaagaggtgcctgccttagagccagggaagccgttgcacccggtgccccctctccccagggaccatgggcctgggcacactgtggggctcagggtcttctcctggtcgcagagctgaccttcccacaatcttcccacaaattctggggagtgtcgggccaggcccacatgccctaaagggacctcaaatcgcacagctacccacttgggtagctttcatcagttcaggattccctgactgcgggtgaaatgagggggcagggcaccaacacagcccgagtgctggcagcgggtgaacgtataacacagggagtcttccccagtcctcacggcaaccccaggagaaaaatgactttccatttttacaggtgaggagggtgaggctcaaagagcagagttcctggagcgcccccagcaggtaagtggagaagccaggcctgggctgggggctctggctccagaaccccacctcagcaccagcctcctgcaccggactttgtggagaagggggtaagggggtgccagggatggcaaaggggtagaggatctggtggactctggcaggcctgggtcagctccacccattggtctcactcccacccggatggcagccccatcccacgtgggatcatgcgacctgtctctgggtgcccgcggcgaggcagcaccccgcttccctacacagaaggccttcccctcccgtcggctcattcagccgcggaagcccctgggagaccccgccccgccccgtcccgcggtgccccccgcgcactcaccctcgctcacccacgcggccttcctggcgggagagcgcttccggcgtcctcgccaggcccggggagtgggcacggtggagctgccgaccgttggtcgctgccccaacccacgcactgcgacgccgcgggtgaggcgcgcggtctgcggggcccgggggtgcggcggggcggggctggcgggctgtccgggcccacggagaggacggcggcgggcgggggttgctgcagggcccgcaccttgtcttccgcgccggcagggctgtgccccgtcgagacctgctcgggctgtggctccgtcctccggcctccagggggcggcgcggcgctgcgcggcgccccggcggcactgccctcccttcccagcggccaggaggcggtgtcccgtgacgccgcgcggccgcgctgtagtggccgtcgaggccgccgtctgttcgaaggctgtccgacttcacggttccccgcggctcggcccgggggcgtgagtgtcgccagcgggcgacgggggggcgcgcggtaggccctgcaacaaggccagggcctgggggggccggcaggagagcgaacccgaggcatcgtggtgccatggcggggccgcccccacgggcatgggcctgcagagcgtggccgtgaggacgctgagggtgggcgcgcacggagcagaggcccacgggcgtccgacgggggacctggacagagggacacccttaacgttattccctcttcccaggcctgaattgcagttcctgtgccctggcactaagactggcacctcctgcggcccatgcccttcgcctgcattgcccactgagtcccactcgactgtcttcagcgcggttcacactgagacccagccctctcccgctggccccgagcaggcccacctttaggagggcgtgatggaaaggcccctggagaatggggatgagtccccagactctcagggccatgccaccgactggagatttgctgtgtgcagtttcagggatgcctgggaagaggaggaacctgcttcccagatgcacgttaaggacccaggtcctccaagaccaccagccggggccacccaggatgaggagctacagggcagccccttgtccaggaaattccagttacccccagctgcagatgagtcgggggatgcccagaggggcacagtagaaagctcctcagtcctgtcagaagggccaggcccctctggagtggagagtctcctatgccccatgtcctcccacctcagcttggcacagggtgagagtgacaccccaggggtagggttggtaggggacccaggtccaagcagggcgatgccatctggcttgagccctggggcattggacagcgaccctgtgggccttggagaccctttatcagaaatatcaaagctgctggaggcagcccccagtggatccggcctccctaagcctgctgactgcctcctggcccaagacctctgttgggagctgctggccagtggtatggccaccttgccagggactcgggatgtccaaggccgggcagtgctgcttctgtgtgcccacagcccagcctggcttcagtctgagtgcagcagccaggaactcatccgcctcctgctgtacctgcgaagcatccccaggcccgaagtacaggcactgggactgacagtgctagttgatgcccgaatttgtgctccaagttcttccctcttctctgggctcagccaactacaagaagcagccccaggggccgtgtaccaggtgctgctagtgggaagcacgctgctgaaggaagtgccttccgggctgcagctggagcagttgccttctcagagcctgctgacccacatcccaacggcggggctgcccacttcgctaggaggaggcctgccttactgccaccaggcctggctggatttccgaaggcggctggaagctctactacagaactgccaggcagcttgtgccctgctccagggggccatcgaaagtgtgaaggctgtgccccagcccatggagcctggggaggtcggtcagctgctacagcagacagaggtcctgatgcagcaggtgctagactcgccatggctggcatggctacaatgccaggggggccgggagctgacatggctgaagcaagaggtcccagaggtgaccctgagcccagactacaggacggcaatggacaaggctgacgagctatatgaccgggtggatggattgctgcaccaactgaccctgcagagcaaccagcgaatacaggccctagagttggtccaaacactggaggcccgggaaagcggactgcaccagattgaagtgtggctgcagcaggtgggctggccagcactggaggaggctggggagccctcgctggacatgctgctccaggcccaaggctcttttcaggagctgtaccaggttgcccaggagcaggtcaggcaaggggagaagtttctgcagccgctgactggctgggaggcggctgaactggacccccctggggcacgctttctggccctgcgagcccagctgactgaattctctagggctttggcccagcggtgccagcggctggcggatgctgagaggctgtttcagctcttcagggaggccttgacgtgggctgaggaggggcagcgagtgttggcagagctggagcaggaacgcccgggggttgtgttgcagcagctgcagctgcactggaccaggcaccctgacttgcctcctgcccacttccgaaagatgtgggctctggccacggggctgggctcagaggccatccgccaggagtgccgctgggcctgggcgcggtgccaggacacctggctggccctggaccaaaagcttgaggcttcactgaagctaccaccggtgggcagcacagctagcctgtgtgtcagccaggtccccgctgcacctgcccaccctcccctgaggaaggcctacagcttcgatcggaatctggggcagagtctcagtgaacctgcctgccactgccaccatgcggccactattgctgcctgccgcagaccagaggctggaggaggtgccctgccccaggcatcccctactgtgcctccaccaggcagctctgaccccaggagcctcaacaggctacagctggtgctggcagagatggtggccacggagcgggagtatgtccgggctctagagtacactatggagaactatttccccgagctggatcgccccgatgtgccccagggcctccgcggtcagcgtgcccacctctttggcaacctggagaagctgcgggacttccactgccacttcttcctgcgtgagctggaggcttgcacccggcacccaccacgagtggcctatgccttcctgcgccatagggtgcagtttgggatgtacgcgctctacagcaagaataagcctcgctccgatgccctgatgtcaagctatgggcacaccttcttcaaggacaagcagcaagcactgggggaccacctggacctggcctcctacctgctaaagcccatccagcgcatgggcaagtacgcactgctgctgcaggagctggcacgggcctgcgggggccccacgcaggagctcagtgcgctgcgggaggcccagagccttgtgcacttccagctgcggcacggaaacgacctgctggccatggacgccatccagggctgtgatgttaacctcaaggaacaggggcagctggtgcgacaggatgagtttgtggtgcgcactgggcgccacaagtccgtgcgccgcatcttcctttttgaggagctgctgctcttcagcaagcctcgccatgggcccacaggggttgacacatttgcctacaagcgctccttcaagatggcagaccttggtctcactgagtgctgtgggaacagcaacctgcgcttcgagatctggttccgccgccgcaaggccagggacacctttgtgctgcaggcctccagcctggctatcaagcaggcctggacagctgacatctcccacctgctttggaggcaggccgtccacaacaaggaggtgcgcatggctgagatggtgtccatgggtgtggggaacaaggccttccgagacattgctcccagcgaggaagccatcaacgaccgcaccgtcaactatgtcctgaagtgccgagaagttcgctctcgggcgtccattgccgtagccccgtttgaccatgacagcctctacctgggggcctcgaactcccttcctggagaccctgcctcttgctctgttctggggtccctcaacctgcacctgtacagagacccagctcttctgggtctccgctgtcccctgtatcccagcttcccagaggaagcagcactggaggctgaggcagagctgggcggccagccctctttgactgctgaggactcagagatctcgtcccaatgcccatcagccagtggctccagtggctctgacagcagctgtgtgtcagggcaggccctgggtaggggcctggaggacttaccctgtgtctgagcccgggactggacgagcagtagatccagcagcctgcagctccaaggaacattgcctctctggatctgctgtgaccagggtgtggctgacacctgggctacctccaacctacatgtgcaacgctgttgactaccctttctgatgtgtgtggccattggactaactggcacggggcctctctagggaagtctggttgtagagcctgaataggctcctggccccatgaccccttctcctgtccccagctcccatcccagttgtgggttaagaataggctagagcagacattgggtgtttccatgctgtaggctggtgggggaccatgtgcctctaggcagtgactagggtgcccccacccctcaggaagaacacaggtgggctcctagcagctgatccccaatgcctggccttaaagccgagctcagttaccatagggacaggtccacctctactgggccctcatgcttgcctttcctggcccccaggcccagcccctttttactggggcagtttcgttattttgacttgatgccttttgaataactttcaatagaattgtctaaaattatcttactggttgttaggcctttggtgtctcagagaaggagtctaggtctttgatgtgtgatttaatcttttatttgtttataataaaaaatagactgatatgtaccctctgatgggcacatgc

SEQ ID NO: 22727 - DNA, 4477 bp, Homo sapiens
  source 1..4477: mol_type = unassigned DNA
gctgtccgacttcacggttccccgcggctcggcccgggggcgcctgaattgcagttcctgtgccctggcactaagactggcacctcctgcggcccatgcccttcgcctgcattgcccactgagtcccactcgactgtcttcagcgcggttcacactgagacccagccctctcccgctggccccgagcaggcccacctttaggagggcgtgatggaaaggcccctggagaatggggatgagtccccagactctcagggccatgccaccgactggagatttgctgtgtgcagtttcagggatgcctgggaagaggaggaacctgcttcccagatgcacgttaaggacccaggtcctccaagaccaccagccggggccacccaggatgaggagctacagggcagccccttgtccaggaaattccagttacccccagctgcagatgagtcgggggatgcccagaggggcacagtagaaagctcctcagtcctgtcagaagggccaggcccctctggagtggagagtctcctatgccccatgtcctcccacctcagcttggcacagggtgagagtgacaccccaggggtagggttggtaggggacccaggtccaagcagggcgatgccatctggcttgagccctggggcattggacagcgaccctgtgggccttggagaccctttatcagaaatatcaaagctgctggaggcagcccccagtggatccggcctccctaagcctgctgactgcctcctggcccaagacctctgttgggagctgctggccagtggtatggccaccttgccagggactcgggatgtccaaggccgggcagtgctgcttctgtgtgcccacagcccagcctggcttcagtctgagtgcagcagccaggaactcatccgcctcctgctgtacctgcgaagcatccccaggcccgaagtacaggcactgggactgacagtgctagttgatgcccgaatttgtgctccaagttcttccctcttctctgggctcagccaactacaagaagcagccccaggggccgtgtaccaggtgctgctagtgggaagcacgctgctgaaggaagtgccttccgggctgcagctggagcagttgccttctcagagcctgctgacccacatcccaacggcggggctgcccacttcgctaggaggaggcctgccttactgccaccaggcctggctggatttccgaaggcggctggaagctctactacagaactgccaggcagcttgtgccctgctccagggggccatcgaaagtgtgaaggctgtgccccagcccatggagcctggggaggtcggtcagctgctacagcagacagaggtcctgatgcagcaggtgctagactcgccatggctggcatggctacaatgccaggggggccgggagctgacatggctgaagcaagaggtcccagaggtgaccctgagcccagactacaggacggcaatggacaaggctgacgagctatatgaccgggtggatggattgctgcaccaactgaccctgcagagcaaccagcgaatacaggccctagagttggtccaaacactggaggcccgggaaagcggactgcaccagattgaagtgtggctgcagcaggtgggctggccagcactggaggaggctggggagccctcgctggacatgctgctccaggcccaaggctcttttcaggagctgtaccaggttgcccaggagcaggtcaggcaaggggagaagtttctgcagccgctgactggctgggaggcggctgaactggacccccctggggcacgctttctggccctgcgagcccagctgactgaattctctagggctttggcccagcggtgccagcggctggcggatgctgagaggctgtttcagctcttcagggaggccttgacgtgggctgaggaggggcagcgagtgttggcagagctggagcaggaacgcccgggggttgtgttgcagcagctgcagctgcactggaccaggcaccctgacttgcctcctgcccacttccgaaagatgtgggctctggccacggggctgggctcagaggccatccgccaggagtgccgctgggcctgggcgcggtgccaggacacctggctggccctggaccaaaagcttgaggcttcactgaagctaccaccggtgggcagcacagctagcctgtgtgtcagccaggtccccgctgcacctgcccaccctcccctgaggaaggcctacagcttcgatcggaatctggggcagagtctcagtgaacctgcctgccactgccaccatgcggccactattgctgcctgccgcagaccagaggctggaggaggtgccctgccccaggcatcccctactgtgcctccaccaggcagctctgaccccaggagcctcaacaggctacagctggtgctggcagagatggtggccacggagcgggagtatgtccgggctctagagtacactatggagaactatttccccgagctggatcgccccgatgtgccccagggcctccgcggtcagcgtgcccacctctttggcaacctggagaagctgcgggacttccactgccacttcttcctgcgtgagctggaggcttgcacccggcacccaccacgagtggcctatgccttcctgcgccatagggtgcagtttgggatgtacgcgctctacagcaagaataagcctcgctccgatgccctgatgtcaagctatgggcacaccttcttcaaggacaagcagcaagcactgggggaccacctggacctggcctcctacctgctaaagcccatccagcgcatgggcaagtacgcactgctgctgcaggagctggcacgggcctgcgggggccccacgcaggagctcagtgcgctgcgggaggcccagagccttgtgcacttccagctgcggcacggaaacgacctgctggccatggacgccatccagggctgtgatgttaacctcaaggaacaggggcagctggtgcgacaggatgagtttgtggtgcgcactgggcgccacaagtccgtgcgccgcatcttcctttttgaggagctgctgctcttcagcaagcctcgccatgggcccacaggggttgacacatttgcctacaagcgctccttcaagatggcagaccttggtctcactgagtgctgtgggaacagcaacctgcgcttcgagatctggttccgccgccgcaaggccagggacacctttgtgctgcaggcctccagcctggctatcaagcaggcctggacagctgacatctcccacctgctttggaggcaggccgtccacaacaaggaggtgcgcatggctgagatggtgtccatgggtgtggggaacaaggccttccgagacattgctcccagcgaggaagccatcaacgaccgcaccgtcaactatgtcctgaagtgccgagaagttcgctctcgggcgtccattgccgtagccccgtttgaccatgacagcctctacctgggggcctcgaactcccttcctggagaccctgcctcttgctctgttctggggtccctcaacctgcacctgtacagagacccagctcttctgggtctccgctgtcccctgtatcccagcttcccagaggaagcagcactggaggctgaggcagagctgggcggccagccctctttgactgctgaggactcagagatctcgtcccaatgcccatcagccagtggctccagtggctctgacagcagctgtgtgtcagggcaggccctgggtaggggcctggaggacttaccctgtgtctgagcccgggactggacgagcagtagatccagcagcctgcagctccaaggaacattgcctctctggatctgctgtgaccagggtgtggctgacacctgggctacctccaacctacatgtgcaacgctgttgactaccctttctgatgtgtgtggccattggactaactggcacggggcctctctagggaagtctggttgtagagcctgaataggctcctggccccatgaccccttctcctgtccccagctcccatcccagttgtgggttaagaataggctagagcagacattgggtgtttccatgctgtaggctggtgggggaccatgtgcctctaggcagtgactagggtgcccccacccctcaggaagaacacaggtgggctcctagcagctgatccccaatgcctggccttaaagccgagctcagttaccatagggacaggtccacctctactgggccctcatgcttgcctttcctggcccccaggcccagcccctttttactggggcagtttcgttattttgacttgatgccttttgaataactttcaatagaattgtctaaaattatcttactggttgttaggcctttggtgtctcagagaaggagtctaggtctttgatgtgtgatttaatcttttatttgtttataataaaaaatagactgatatgtaccctctgatgggcacatgc

SEQ ID NO: 22728 - DNA, 2182 bp, Homo sapiens
  source 1..2182: mol_type = unassigned DNA
gccctggcactaagactggcacctcctgcggcccatgcccttcgcctgcattgcccactgagtcccactcgactgtcttcagcgcggttcacactgagacccagccctctcccgctggccccgagcaggcccacctttaggagggcgtgatggaaaggcccctggagaatggggatgagtccccagactctcagggccatgccaccgactggagatttgctgtgtgcagtttcagggatgcctgggaagaggaggaacctgcttcccagatgcacgttaaggacccaggtcctccaagaccaccagccggggccacccaggatgaggagctacagggcagccccttgtccaggaaattccagttacccccagctgcagatgagtcgggggatgcccagaggggcacagtagaaagctcctcagtcctgtcagaagggccaggcccctctggagtggagagtctcctatgccccatgtcctcccacctcagcttggcacagggtgagagtgacaccccaggggtagggttggtaggggacccaggtccaagcagggcgatgccatctggcttgagccctggggcattggacagcgaccctgtgggccttggagaccctttatcagaaatatcaaagctgctggaggcaggtaaggaaggctgggctagggaagtctgggaagggaatggggatgcctggagagatgagtgtcaagactttggaggtctctgaccctactcaggctgaagcccgggtccaagtaggggtctctggataggtggtccaaggcagacccaagtcatttcccttcccaagcccccagtggatccggcctccctaagcctgctgactgcctcctggcccaagacctctgttgggagctgctggccagtggtatggccaccttgccagggactcgggatgtccaaggccgggcagtgctgcttctgtgtgcccacagcccagcctggcttcagtctgagtgcagcagccaggaactcatccgcctcctgctgtacctgcgaagcatccccaggcccgaagtacaggcactgggactgacagtgctagttgatgcccgaatttgtgctccaagttcttccctcttctctgggctcagccaactacaagaagcagccccaggggccgtgtaccaggtgctgctagtgggaagcacgctgctgaaggaagtgccttccgggctgcagctggagcagttgccttctcagagcctgctgacccacatcccaacggcggggctgcccacttcgctaggaggaggcctgccttactgccaccaggcctggctggatttccgaaggcttattgccctcaatcacaggaggtcggtcagctgctacagcagacagaggtcctgatgcagcaggtgctagactcgccatggctggcatggctacaatgccaggggggccgggagctgacatggctgaagcaagaggtcccagaggtgaccctgagcccagactacaggacggcaatggacaaggctgacgagctatatgaccgggtggatggattgctgcaccaactgaccctgcagagcaaccagcgaatacaggccctagagttggtccaaacactggaggcccgggaaagcggactgcaccagattgaagtgtggctgcagcaggtgggctggccagcactggaggaggctggggagccctcgctggacatgctgctccaggcccaaggctcttttcaggagctgtaccaggttgcccaggagcaggtcaggcaaggggagaagtttctgcagccgctgactggctgggaggcggctgaactggacccccctggggcacgctttctggccctgcgagcccagctgactgaattctctagggctttggcccagcggtgccagcggctggcggatgctgagaggctgtttcagctcttcagggaggtctgagcccgggactggacgagcagtagatccagcagcctgcagctccaaggaacattgcctctctggatctgctgtgaccagggtgtggctgacacctgggctacctccaacctacatgtgcaacgctgttgactaccctttctgatgtgtgtggccattggactaactggcacggggcctctctagggaagtctggttgtagagcctgaataggctcctggccccatgaccccttctcctgtccccagct

SEQ ID NO: 22729 - DNA, 4566 bp, Homo sapiens
  source 1..4566: mol_type = unassigned DNA
accctcgctcacccacgcggccttcctggcgggagagcgcttccggcgtcctcgccaggcccggggagtgggcacggtggagctgccgaccgttggtcgctgccccaacccacgcactgcgacgccgcgggcctgaattgcagttcctgtgccctggcactaagactggcacctcctgcggcccatgcccttcgcctgcattgcccactgagtcccactcgactgtcttcagcgcggttcacactgagacccagccctctcccgctggccccgagcaggcccacctttaggagggcgtgatggaaaggcccctggagaatggggatgagtccccagactctcagggccatgccaccgactggagatttgctgtgtgcagtttcagggatgcctgggaagaggaggaacctgcttcccagatgcacgttaaggacccaggtcctccaagaccaccagccggggccacccaggatgaggagctacagggcagccccttgtccaggaaattccagttacccccagctgcagatgagtcgggggatgcccagaggggcacagtagaaagctcctcagtcctgtcagaagggccaggcccctctggagtggagagtctcctatgccccatgtcctcccacctcagcttggcacagggtgagagtgacaccccaggggtagggttggtaggggacccaggtccaagcagggcgatgccatctggcttgagccctggggcattggacagcgaccctgtgggccttggagaccctttatcagaaatatcaaagctgctggaggcagcccccagtggatccggcctccctaagcctgctgactgcctcctggcccaagacctctgttgggagctgctggccagtggtatggccaccttgccagggactcgggatgtccaaggccgggcagtgctgcttctgtgtgcccacagcccagcctggcttcagtctgagtgcagcagccaggaactcatccgcctcctgctgtacctgcgaagcatccccaggcccgaagtacaggcactgggactgacagtgctagttgatgcccgaatttgtgctccaagttcttccctcttctctgggctcagccaactacaagaagcagccccaggggccgtgtaccaggtgctgctagtgggaagcacgctgctgaaggaagtgccttccgggctgcagctggagcagttgccttctcagagcctgctgacccacatcccaacggcggggctgcccacttcgctaggaggaggcctgccttactgccaccaggcctggctggatttccgaaggcggctggaagctctactacagaactgccaggcagcttgtgccctgctccagggggccatcgaaagtgtgaaggctgtgccccagcccatggagcctggggaggtcggtcagctgctacagcagacagaggtcctgatgcagcaggtgctagactcgccatggctggcatggctacaatgccaggggggccgggagctgacatggctgaagcaagaggtcccagaggtgaccctgagcccagactacaggacggcaatggacaaggctgacgagctatatgaccgggtggatggattgctgcaccaactgaccctgcagagcaaccagcgaatacaggccctagagttggtccaaacactggaggcccgggaaagcggactgcaccagattgaagtgtggctgcagcaggtgggctggccagcactggaggaggctggggagccctcgctggacatgctgctccaggcccaaggctcttttcaggagctgtaccaggttgcccaggagcaggtcaggcaaggggagaagtttctgcagccgctgactggctgggaggcggctgaactggacccccctggggcacgctttctggccctgcgagcccagctgactgaattctctagggctttggcccagcggtgccagcggctggcggatgctgagaggctgtttcagctcttcagggaggccttgacgtgggctgaggaggggcagcgagtgttggcagagctggagcaggaacgcccgggggttgtgttgcagcagctgcagctgcactggaccaggcaccctgacttgcctcctgcccacttccgaaagatgtgggctctggccacggggctgggctcagaggccatccgccaggagtgccgctgggcctgggcgcggtgccaggacacctggctggccctggaccaaaagcttgaggcttcactgaagctaccaccggtgggcagcacagctagcctgtgtgtcagccaggtccccgctgcacctgcccaccctcccctgaggaaggcctacagcttcgatcggaatctggggcagagtctcagtgaacctgcctgccactgccaccatgcggccactattgctgcctgccgcagaccagaggctggaggaggtgccctgccccaggcatcccctactgtgcctccaccaggcagctctgaccccaggagcctcaacaggctacagctggtgctggcagagatggtggccacggagcgggagtatgtccgggctctagagtacactatggagaactatttccccgagctggatcgccccgatgtgccccagggcctccgcggtcagcgtgcccacctctttggcaacctggagaagctgcgggacttccactgccacttcttcctgcgtgagctggaggcttgcacccggcacccaccacgagtggcctatgccttcctgcgccatagggtgcagtttgggatgtacgcgctctacagcaagaataagcctcgctccgatgccctgatgtcaagctatgggcacaccttcttcaaggacaagcagcaagcactgggggaccacctggacctggcctcctacctgctaaagcccatccagcgcatgggcaagtacgcactgctgctgcaggagctggcacgggcctgcgggggccccacgcaggagctcagtgcgctgcgggaggcccagagccttgtgcacttccagctgcggcacggaaacgacctgctggccatggacgccatccagggctgtgatgttaacctcaaggaacaggggcagctggtgcgacaggatgagtttgtggtgcgcactgggcgccacaagtccgtgcgccgcatcttcctttttgaggagctgctgctcttcagcaagcctcgccatgggcccacaggggttgacacatttgcctacaagcgctccttcaagatggcagaccttggtctcactgagtgctgtgggaacagcaacctgcgcttcgagatctggttccgccgccgcaaggccagggacacctttgtgctgcaggcctccagcctggctatcaagcaggcctggacagctgacatctcccacctgctttggaggcaggccgtccacaacaaggaggtgcgcatggctgagatggtgtccatgggtgtggggaacaaggccttccgagacattgctcccagcgaggaagccatcaacgaccgcaccgtcaactatgtcctgaagtgccgagaagttcgctctcgggcgtccattgccgtagccccgtttgaccatgacagcctctacctgggggcctcgaactcccttcctggagaccctgcctcttgctctgttctggggtccctcaacctgcacctgtacagagacccagctcttctgggtctccgctgtcccctgtatcccagcttcccagaggaagcagcactggaggctgaggcagagctgggcggccagccctctttgactgctgaggactcagagatctcgtcccaatgcccatcagccagtggctccagtggctctgacagcagctgtgtgtcagggcaggccctgggtaggggcctggaggacttaccctgtgtctgagcccgggactggacgagcagtagatccagcagcctgcagctccaaggaacattgcctctctggatctgctgtgaccagggtgtggctgacacctgggctacctccaacctacatgtgcaacgctgttgactaccctttctgatgtgtgtggccattggactaactggcacggggcctctctagggaagtctggttgtagagcctgaataggctcctggccccatgaccccttctcctgtccccagctcccatcccagttgtgggttaagaataggctagagcagacattgggtgtttccatgctgtaggctggtgggggaccatgtgcctctaggcagtgactagggtgcccccacccctcaggaagaacacaggtgggctcctagcagctgatccccaatgcctggccttaaagccgagctcagttaccatagggacaggtccacctctactgggccctcatgcttgcctttcctggcccccaggcccagcccctttttactggggcagtttcgttattttgacttgatgccttttgaataactttcaatagaattgtctaaaattatcttactggttgttaggcctttggtgtctcagagaaggagtctaggtctttgatgtgtgatttaatcttttatttgtttataataaaaaatagactgatatgtaccctctgatgggcacatgc

SEQ ID NO: 22730 - DNA, 4480 bp, Homo sapiens
  source 1..4480: mol_type = unassigned DNA
gtccgacttcacggttccccgcggctcggcccgggggcgtgagtgtcgccagcgggcgacgggggggcgcgcggtaggccctgcaacaaggccagggcctgggggggccggcaggagagcgaacccgaggcatcgtggtgccatggcggggccgcccccacgggcatgggcctgcagagcgtggccgtgaggacgctgagggtgggcgcgcacggagcagaggcccacgggcgtccgacgggggacctggacagagggacacccttaacgttattccctcttcccaggcctgaattgcagttcctgtgccctggcactaagactggcacctcctgcggcccatgcccttcgcctgcattgcccactgagtcccactcgactgtcttcagcgcggttcacactgagacccagccctctcccgctggccccgagcaggcccacctttaggagggcgtgatggaaaggcccctggagaatggggatgagtccccagactctcagggccatgccaccgactggagatttgctgtgtgcagtttcagggatgcctgggaagaggaggaacctgcttcccagatgcacgttaaggacccaggtcctccaagaccaccagccggggccacccaggatgaggagctacagggcagccccttgtccaggaaattccagttacccccagctgcagatgagtcgggggatgcccagaggggcacagtagaaagctcctcagtcctgtcagaagggccaggcccctctggagtggagagtctcctatgccccatgtcctcccacctcagcttggcacaggggactcgggatgtccaaggccgggcagtgctgcttctgtgtgcccacagcccagcctggcttcagtctgagtgcagcagccaggaactcatccgcctcctgctgtacctgcgaagcatccccaggcccgaagtacaggcactgggactgacagtgctagttgatgcccgaatttgtgctccaagttcttccctcttctctgggctcagccaactacaagaagcagccccaggggccgtgtaccaggtgctgctagtgggaagcacgctgctgaaggaagtgccttccgggctgcagctggagcagttgccttctcagagcctgctgacccacatcccaacggcggggctgcccacttcgctaggaggaggcctgccttactgccaccaggcctggctggatttccgaaggcggctggaagctctactacagaactgccaggcagcttgtgccctgctccagggggccatcgaaagtgtgaaggctgtgccccagcccatggagcctggggaggtcggtcagctgctacagcagacagaggtcctgatgcagcaggtgctagactcgccatggctggcatggctacaatgccaggggggccgggagctgacatggctgaagcaagaggtcccagaggtgaccctgagcccagactacaggacggcaatggacaaggctgacgagctatatgaccgggtggatggattgctgcaccaactgaccctgcagagcaaccagcgaatacaggccctagagttggtccaaacactggaggcccgggaaagcggactgcaccagattgaagtgtggctgcagcaggtgggctggccagcactggaggaggctggggagccctcgctggacatgctgctccaggcccaaggctcttttcaggagctgtaccaggttgcccaggagcaggtcaggcaaggggagaagtttctgcagccgctgactggctgggaggcggctgaactggacccccctggggcacgctttctggccctgcgagcccagctgactgaattctctagggctttggcccagcggtgccagcggctggcggatgctgagaggctgtttcagctcttcagggaggccttgacgtgggctgaggaggggcagcgagtgttggcagagctggagcaggaacgcccgggggttgtgttgcagcagctgcagctgcactggaccaggcaccctgacttgcctcctgcccacttccgaaagatgtgggctctggccacggggctgggctcagaggccatccgccaggagtgccgctgggcctgggcgcggtgccaggacacctggctggccctggaccaaaagcttgaggcttcactgaagctaccaccggtgggcagcacagctagcctgtgtgtcagccaggtccccgctgcacctgcccaccctcccctgaggaaggcctacagcttcgatcggaatctggggcagagtctcagtgaacctgcctgccactgccaccatgcggccactattgctgcctgccgcagaccagaggctggaggaggtgccctgccccaggcatcccctactgtgcctccaccaggcagctctgaccccaggagcctcaacaggctacagctggtgctggcagagatggtggccacggagcgggagtatgtccgggctctagagtacactatggagaactatttccccgagctggatcgccccgatgtgccccagggcctccgcggtcagcgtgcccacctctttggcaacctggagaagctgcgggacttccactgccacttcttcctgcgtgagctggaggcttgcacccggcacccaccacgagtggcctatgccttcctgcgccatagggtgcagtttgggatgtacgcgctctacagcaagaataagcctcgctccgatgccctgatgtcaagctatgggcacaccttcttcaaggacaagcagcaagcactgggggaccacctggacctggcctcctacctgctaaagcccatccagcgcatgggcaagtacgcactgctgctgcaggagctggcacgggcctgcgggggccccacgcaggagctcagtgcgctgcgggaggcccagagccttgtgcacttccagctgcggcacggaaacgacctgctggccatggacgccatccagggctgtgatgttaacctcaaggaacaggggcagctggtgcgacaggatgagtttgtggtgcgcactgggcgccacaagtccgtgcgccgcatcttcctttttgaggagctgctgctcttcagcaagcctcgccatgggcccacaggggttgacacatttgcctacaagcgctccttcaagatggcagaccttggtctcactgagtgctgtgggaacagcaacctgcgcttcgagatctggttccgccgccgcaaggccagggacacctttgtgctgcaggcctccagcctggctatcaagcaggcctggacagctgacatctcccacctgctttggaggcaggccgtccacaacaaggaggtgcgcatggctgagatggtgtccatgggtgtggggaacaaggccttccgagacattgctcccagcgaggaagccatcaacgaccgcaccgtcaactatgtcctgaagtgccgagaagttcgctctcgggcgtccattgccgtagccccgtttgaccatgacagcctctacctgggggcctcgaactcccttcctggagaccctgcctcttgctctgttctggggtccctcaacctgcacctgtacagagacccagctcttctgggtctccgctgtcccctgtatcccagcttcccagaggaagcagcactggaggctgaggcagagctgggcggccagccctctttgactgctgaggactcagagatctcgtcccaatgcccatcagccagtggctccagtggctctgacagcagctgtgtgtcagggcaggccctgggtaggggcctggaggacttaccctgtgtctgagcccgggactggacgagcagtagatccagcagcctgcagctccaaggaacattgcctctctggatctgctgtgaccagggtgtggctgacacctgggctacctccaacctacatgtgcaacgctgttgactaccctttctgatgtgtgtggccattggactaactggcacggggcctctctagggaagtctggttgtagagcctgaataggctcctggccccatgaccccttctcctgtccccagctcccatcccagttgtgggttaagaataggctagagcagacattgggtgtttccatgctgtaggctggtgggggaccatgtgcctctaggcagtgactagggtgcccccacccctcaggaagaacacaggtgggctcctagcagctgatccccaatgcctggccttaaagccgagctcagttaccatagggacaggtccacctctactgggccctcatgcttgcctttcctggcccccaggcccagcccctttttactggggcagtttcgttattttgacttgatgccttttgaataactttcaatagaattgtctaaaattatcttactggttgttaggcctttggtgtctcagagaaggagtctaggtctttgatgtgtgatttaatcttttatttgtttataataaaaaatagactgatatgtaccctctgatgggcacatgc

SEQ ID NO: 22731 - DNA, 4715 bp, Homo sapiens
  source 1..4715: mol_type = unassigned DNA
agtttgcgctgagtcgactgagcccgtcccgcggctcccgtccccctctccccgcgcgccccatgaggctttggcagtctcggcccgagccttagagccttagacaccggggaggagaccctggtcctgttcctaggtatgtcaccacgccgactgccagcagctgcaccgccgggggcccctcaacctctgcgaggcctgtgacagcaagttccacagcaccatgcattatgatgggcatgtccgcttcgaccttcccccacaaggctctgtgctggcccggaacgtgtccacccggtcatgcccgccgcgcaccagccccgcagtggacttggaggaggaggaggaggagagctctgtggatggcaaaggggaccggaagagcacaggcctgaaactctccaagaagaaagcaaggaggagacacacggatgacccaagcaaggaatgcttcactctgaaatttgacctgaatgtggacattgagacagagatcgtcccagccatgaagaagaagtcactgggggaggtgctgctgcctgtatttgaaaggaagggcattgcgctgggcaaagtggacatctacctggaccagtccaacacacccctgtccctcaccttcgaggcctacaggttcgggggacactaccttcgtgtcaaagccccagccaagcctggagatgagggcaaggtggagcagggcatgaaggactccaagtccctgagtttgccgattctgcggccagctgggaccgggccccccgccctggagcgtgtggacgcccagagccgccgggagagcctggacatcttggcccctggccgccgccgcaagaacatgtcggagttcctgggggaggcgagcatccccgggcaggagccccccacgccctccagctgctctctgcccagcggcagcagtggcagcaccaacactggcgacagctggaagaaccgggcggccagtcgcttcagcggctttttcagctccggccccagcaccagcgcctttggccgggaggtagacaagatggagcagctggagggcaagctgcacacctacagcctcttcgggctgcccaggctgccccgggggctgcgcttcgaccatgactcctgggaggaggagtacgatgaagacgaggatgaggacaatgcctgcctgaggctggaggacagctggcgggagctcattgatgggcatgagaagctgacccggcggcagtgccaccagcaggaggcggtgtgggagctgctgcacacggaggcctcctacatcaggaaactgcgggtgatcatcaacctgttcctgtgctgcctcctgaacctgcaagagtcagggctgctgtgtgaggtggaggcggagcgcctgttcagcaacatcccggagatcgcgcagctgcaccgcaggctgtgggctagcgtgatggcgccggtgctggagaaggcgcggcgcacgcgagcgctgctacagcccggggacttcctcaaaggcttcaagatgttcggctcgctcttcaagccctacatccgctactgcatggaggaggagggctgcatggagtacatgcgcggcctgctgcgcgacaacgacctcttccgggcctacatcacgtgggcggagaagcacccacagtgccagaggctgaagctgagcgacatgctggccaaaccccaccagcggctcaccaagtacccgctgctgctcaagtcggtgctgaggaagaccgaggagccgcgcgccaaggaggccgtcgtcgccatgatcggctccgtggagcgcttcatccaccacgtgaacgcgtgcatgcggcagcggcaggagcggcagcggctggcggccgtggtgagccgcatcgacgcctacgaggtggtggaaagcagcagcgacgaagtggacaagctcctgaaggaatttctgcacctggacttgacagcgcccatccctggcgcctccccggaggagacgcggcagctgctgctggaggggagcctgaggatgaaggaggggaaggacagcaagatggatgtgtactgcttcctcttcacggatctgctgttggtgaccaaagcagtgaagaaggcagagaggaccagggtcatcaggccacccctgctcgtggacaagattgtgtgccgggagctacgggaccctgggtccttcctccttatctacctgaatgagtttcacagtgctgtaggggcctacacgttccaggccagtggccaggccttgtgccgtggctgggtggacaccatttacaatgcccagaaccagctgcaacagctgcgtgcacaggagcccccaggcagtcagcagcccctgcagagcctggaagaggaggaggatgagcaggaggaggaagaggaggaggaggaggaggaggaggaaggcgaggacagtggcacttcagctgccagctcccctaccatcatgcggaaaagcagcggcagccccgactctcagcactgtgcctcagatggctccacggagaccctggccatggttgtggtagagcctggggacacgctgtcctcccccgagttcgacagcggtcctttcagctcccagtctgatgagacctctctcagcaccactgcctcatctgccacgcccaccagtgagctgctgcccctgggtccggtggacggccgctcctgctccatggactctgcctacggcaccctctccccaacctccttacaagactttgtggccccaggcccaatggcagagctagtgcctcgggccccagagtccccacgagttccttcccctccaccctcgccccgtctccgccgccgcacccctgtccagctgttgagctgcccgccccacctgctcaagtctaagtccgaggccagcctcctccagctgctggcaggggctggcacccatgggacaccctctgcccccagccgcagcctgtcagagctctgcctggctgttccagccccaggtattaggactcagggctcccctcaggaagctgggcccagctgggattgccgaggggcccctagccctggcagcggtcctgggctagtcggctgcctggccggggaacctgcaggctcccacaggaagaggtgtggagacctgccctcgggggcctctcccagggtccagcctgagcccccaccaggggtctctgcccagcacaggaagctgaccctggcccagctctaccgaatcaggaccaccctgctgcttaactccacgctcactgcctcggaggtctgagcagagggaggcccccaagagtgccattgaccaagagacagcagacagcctgcctcctggggcgtgccggcacctgcttcagctactgcctcctgtatgcatgagccggatgctgggcaggatccctgcctacgcccgggcccgatttgcgctttgccggactggatggagtggaggaggcccaggccacagtaccaccccacctgcccaggcagcccctcgtcacctactccccgaagttaccagctcagctcgagtcttcagggctgggctcctaggctgcccatcctacttctaccctcactggcctccagtgggattcactcctgccctgcccccaccttcccagtcccacaggccacccctggcttgggctgggttctgtgaagttacgtatttattgagcttttggttcttttataaagacttgtctagactccactgggaagagtcctttgctttggggcccagtgactcggggcacttgagttcagggcggcctccttgtgttcctgtgctcctccacttgccacggatgggccacggatggagcttgccatgggaagcactgggaagtaatggggtgtggggtgccaccagaccaacacccccagacttccccaccttcagccaccatcagagcctctccccaggtgccccccggggattcagggctgaatctgcccagttcccacactcaggccagccctcttgggaaggtgggtcctccatgggggtcccttcaggaactttttttttttttttaatacagagtctcactctgtcacctaggttggagtgcagtggtgtgatgtcggctcactgcaacctctgcctcccgggttcaaacgattctcctgccccagccactctagtagctggaactgcaggtgtgcaccaccacgccgggctagtttttgtattttaagtagagacggcatttcaccatattggtcaggctggtctcgaactcctgaccccaagtgttccgcccgcctctgcctcccatagtgctagaattacaggcctgagctactgcgcttggccccttgcggtacttttggcccaacctcctccatggctggggacgcggaggccgagagagaagtcacttgccctggctctaccttgaagtggttctcagggttggggcgagagtcggggtggggaccgagatgcagctctatcctgtgcccctggtcgcagcaggcagcccagcgcttcgcgtgttctacttggcctgtccgctgccgcctaatgagctcaggtctaggccgagcagagggggcacctggtcggactcggttgggctcgggcggccccgcctccccccgcccgccaggcgggcccttctcgacggcgcggggcgggccctgcgggcgcggggctgaaggcggaaccacgacgggcagagagcacggagccgggaagcccctgggcgcccgtcggagggctatggagcagcggccgc

SEQ ID NO: 22732 - DNA, 3475 bp, Homo sapiens
  source 1..3475: mol_type = unassigned DNA
gagtcgactgagcccgtcccgcggctcccgtccccctctccccgcgcgccccatgaggctttggcagtctcggcccgagccttagagccttagacaccggggaggagaccctggtcctgttcctaggtatgtcaccacgccgactgccagcagctgcaccgccgggggcccctcaacctctgcgaggcctgtgacagcaagttccacagcaccatgcattatgatgggcatgtccgcttcgaccttcccccacaaggctctgtgctggcccggaacgtgtccacccggtcatgcccgccgcgcaccagccccgcagtggacttggaggaggaggaggaggagagctctgtggatggcaaaggggaccggaagagcacaggcctgaaactctccaagaagaaagcaaggaggagacacacggatgacccaagcaaggaatgcttcactctgaaatttgacctgaatgtggacattgagacagagatcgtcccagccatgaagaagaagtcactgggggaggtgctgctgcctgtatttgaaaggaagggcattgcgctgggcaaagtggacatctacctggaccagtccaacacacccctgtccctcaccttcgaggcctacaggttcgggggacactaccttcgtgtcaaagccccagccaagcctggagatgagggcaaggtggagcagggcatgaaggactccaagtccctgagtttgccgattctgcggccagctgggaccgggccccccgccctggagcgtgtggacgcccagagccgccgggagagcctggacatcttggcccctggccgccgccgcaagaacatgtcggagttcctgggggaggcgagcatccccgggcaggagccccccacgccctccagctgctctctgcccagcggcagcagtggcagcaccaacactggcgacagctggaagaaccgggcggccagtcgcttcagcggctttttcagctccggccccagcaccagcgcctttggccgggaggtagacaagatggagcagctggagggcaagctgcacacctacagcctcttcgggctgcccaggctgccccgggggctgcgcttcgaccatgactcctgggaggaggagtacgatgaagacgaggatgaggacaatgcctgcctgaggctggaggacagctggcgggagctcattgatgggcatgagaagctgacccggcggcagtgccaccagcaggaggcggtgtgggagctgctgcacacggaggcctcctacatcaggaaactgcgggtgatcatcaacctgttcctgtgctgcctcctgaacctgcaagagtcagggctgctgtgtgaggtggaggcggagcgcctgttcagcaacatcccggagatcgcgcagctgcaccgcaggctgtgggctagcgtgatggcgccggtgctggagaaggcgcggcgcacgcgagcgctgctacagcccggggacttcctcaaaggcttcaagatgttcggctcgctcttcaagccctacatccgctactgcatggaggaggagggctgcatggagtacatgcgcggcctgctgcgcgacaacgacctcttccgggcctacatcacgtgggcggagaagcacccacagtgccagaggctgaagctgagcgacatgctggccaaaccccaccagcggctcaccaagtacccgctgctgctcaagtcggtgctgaggaagaccgaggagccgcgcgccaaggaggccgtcgtcgccatgatcggctccgtggagcgcttcatccaccacgtgaacgcgtgcatgcggcagcggcaggagcggcagcggctggcggccgtggtgagccgcatcgacgcctacgaggtggtggaaagcagcagcgacgaagtggacaagctcctgaaggaatttctgcacctggacttgacagcgcccatccctggcgcctccccggaggagacgcggcagctgctgctggaggggagcctgaggatgaaggaggggaaggacagcaagatggatgtgtactgcttcctcttcacggatctgctgttggtgaccaaagcagtgaagaaggcagagaggaccagggtcatcaggccacccctgctcgtggacaagattgtgtgccgggagctacgggaccctgggtccttcctccttatctacctgaatgagtttcacagtgctgtaggggcctacacgttccaggccagtggccaggccttgtgccgtggctgggtggacaccatttacaatgcccagaaccagctgcaacagctgcgtgcacaggagcccccaggcagtcagcagcccctgcagagcctggaagaggaggaggatgagcaggaggaggaagaggaggaggaggaggaggaggaggaaggcgaggacagtggcacttcagctgccagctcccctaccatcatgcggaaaagcagcggcagccccgactctcagcactgtgcctcagatggctccacggagaccctggccatggttgtggtagagcctggggacacgctgtcctcccccgagttcgacagcggtcctttcagctcccagtctgatgagacctctctcagcaccactgcctcatctgccacgcccaccagtgagctgctgcccctgggtccggtggacggccgctcctgctccatggactctgcctacggcaccctctccccaacctccttacaagactttgtggccccaggcccaatggcagagctagtgcctcgggccccagagtccccacgagttccttcccctccaccctcgccccgtctccgccgccgcacccctgtccagctgttgagctgcccgccccacctgctcaagtctaagtccgaggccagcctcctccagctgctggcaggggctggcacccatgggacaccctctgcccccagccgcagcctgtcagagctctgcctggctgttccagccccagcacaggaagctgaccctggcccagctctaccgaatcaggaccaccctgctgcttaactccacgctcactgcctcggaggtctgagcagagggaggcccccaagagtgccattgaccaagagacagcagacagcctgcctcctggggcgtgccggcacctgcttcagctactgcctcctgtatgcatgagccggatgctgggcaggatccctgcctacgcccgggcccgatttgcgctttgccggactggatggagtggaggaggcccaggccacagtaccaccccacctgcccaggcagcccctcgtcacctactccccgaagttaccagctcagctcgagtcttcagggctgggctcctaggctgcccatcctacttctaccctcactggcctccagtgggattcactcctgccctgcccccaccttcccagtcccacaggccacccctggcttgggctgggttctgtgaagttacgtatttattgagcttttggttcttttataaagacttgtctagactcca

SEQ ID NO: 22733 - DNA, 3613 bp, Homo sapiens
  source 1..3613: mol_type = unassigned DNA
agatgaagaccagggagaggaaagggtggacctgaggcccccatggagaagggacgggcaggatgtatgtcaccacgccgactgccagcagctgcaccgccgggggcccctcaacctctgcgaggcctgtgacagcaagttccacagcaccatgcattatgatgggcatgtccgcttcgaccttcccccacaaggctctgtgctggcccggaacgtgtccacccggtcatgcccgccgcgcaccagccccgcagtggacttggaggaggaggaggaggagagctctgtggatggcaaaggggaccggaagagcacaggcctgaaactctccaagaagaaagcaaggaggagacacacggatgacccaagcaaggaatgcttcactctgaaatttgacctgaatgtggacattgagacagagatcgtcccagccatgaagaagaagtcactgggggaggtgctgctgcctgtatttgaaaggaagggcattgcgctgggcaaagtggacatctacctggaccagtccaacacacccctgtccctcaccttcgaggcctacaggttcgggggacactaccttcgtgtcaaagccccagccaagcctggagatgagggcaaggtggagcagggcatgaaggactccaagtccctgagtttgccgattctgcggccagctgggaccgggccccccgccctggagcgtgtggacgcccagagccgccgggagagcctggacatcttggcccctggccgccgccgcaagaacatgtcggagttcctgggggaggcgagcatccccgggcaggagccccccacgccctccagctgctctctgcccagcggcagcagtggcagcaccaacactggcgacagctggaagaaccgggcggccagtcgcttcagcggctttttcagctccggccccagcaccagcgcctttggccgggaggtagacaagatggagcagctggagggcaagctgcacacctacagcctcttcgggctgcccaggctgccccgggggctgcgcttcgaccatgactcctgggaggaggagtacgatgaagacgaggatgaggacaatgcctgcctgaggctggaggacagctggcgggagctcattgatgggcatgagaagctgacccggcggcagtgccaccagcaggaggcggtgtgggagctgctgcacacggaggcctcctacatcaggaaactgcgggtgatcatcaacctgttcctgtgctgcctcctgaacctgcaagagtcagggctgctgtgtgaggtggaggcggagcgcctgttcagcaacatcccggagatcgcgcagctgcaccgcaggctgtgggctagcgtgatggcgccggtgctggagaaggcgcggcgcacgcgagcgctgctacagcccggggacttcctcaaaggcttcaagatgttcggctcgctcttcaagccctacatccgctactgcatggaggaggagggctgcatggagtacatgcgcggcctgctgcgcgacaacgacctcttccgggcctacatcacgtgggcggagaagcacccacagtgccagaggctgaagctgagcgacatgctggccaaaccccaccagcggctcaccaagtacccgctgctgctcaagtcggtgctgaggaagaccgaggagccgcgcgccaaggaggccgtcgtcgccatgatcggctccgtggagcgcttcatccaccacgtgaacgcgtgcatgcggcagcggcaggagcggcagcggctggcggccgtggtgagccgcatcgacgcctacgaggtggtggaaagcagcagcgacgaagtggacaagctcctgaaggaatttctgcacctggacttgacagcgcccatccctggcgcctccccggaggagacgcggcagctgctgctggaggggagcctgaggatgaaggaggggaaggacagcaagatggatgtgtactgcttcctcttcacggatctgctgttggtgaccaaagcagtgaagaaggcagagaggaccagggtcatcaggccacccctgctcgtggacaagattgtgtgccgggagctacgggaccctgggtccttcctccttatctacctgaatgagtttcacagtgctgtaggggcctacacgttccaggccagtggccaggccttgtgccgtggctgggtggacaccatttacaatgcccagaaccagctgcaacagctgcgtgcacaggagcccccaggcagtcagcagcccctgcagagcctggaagaggaggaggatgagcaggaggaggaagaggaggaggaggaggaggaggaggaaggcgaggacagtggcacttcagctgccagctcccctaccatcatgcggaaaagcagcggcagccccgactctcagcactgtgcctcagatggctccacggagaccctggccatggttgtggtagagcctggggacacgctgtcctcccccgagttcgacagcggtcctttcagctcccagtctgatgagacctctctcagcaccactgcctcatctgccacgcccaccagtgagctgctgcccctgggtccggtggacggccgctcctgctccatggactctgcctacggcaccctctccccaacctccttacaagactttgtggccccaggcccaatggcagagctagtgcctcgggccccagagtccccacgagttccttcccctccaccctcgccccgtctccgccgccgcacccctgtccagctgttgagctgcccgccccacctgctcaagtctaagtccgaggccagcctcctccagctgctggcaggggctggcacccatgggacaccctctgcccccagccgcagcctgtcagagctctgcctggctgttccagccccaggtattaggactcagggctcccctcaggaagctgggcccagctgggattgccgaggggcccctagccctggcagcggtcctgggctagtcggctgcctggccggggaacctgcaggctcccacaggaagaggtgtggagacctgccctcgggggcctctcccagggtccagcctgagcccccaccaggggtctctgcccagcacaggaagctgaccctggcccagctctaccgaatcaggaccaccctgctgcttaactccacgctcactgcctcggaggtctgagcagagggaggcccccaagagtgccattgaccaagagacagcagacagcctgcctcctggggcgtgccggcacctgcttcagctactgcctcctgtatgcatgagccggatgctgggcaggatccctgcctacgcccgggcccgatttgcgctttgccggactggatggagtggaggaggcccaggccacagtaccaccccacctgcccaggcagcccctcgtcacctactccccgaagttaccagctcagctcgagtcttcagggctgggctcctaggctgcccatcctacttctaccctcactggcctccagtgggattcactcctgccctgcccccaccttcccagtcccacaggccacccctggcttgggctgggttctgtgaagttacgtatttattgagcttttggttcttttataaagacttgtctagactcca

SEQ ID NO: 22734 - DNA, 3753 bp, Homo sapiens
  source 1..3753: mol_type = unassigned DNA
ggacgctgacctcttttgaagggaggactgaggagatcaccccacccctcctccggttgggaggccagtggggcccaggggagcctgggtgccccgctgactgatgccctctgctcctcccctgcagacgaccagagccccgctgaaaagaagggactgcgctgtcagaaccccgcctgcatggacaaggggcgggcggccaaggtatgtcaccacgccgactgccagcagctgcaccgccgggggcccctcaacctctgcgaggcctgtgacagcaagttccacagcaccatgcattatgatgggcatgtccgcttcgaccttcccccacaaggctctgtgctggcccggaacgtgtccacccggtcatgcccgccgcgcaccagccccgcagtggacttggaggaggaggaggaggagagctctgtggatggcaaaggggaccggaagagcacaggcctgaaactctccaagaagaaagcaaggaggagacacacggatgacccaagcaaggaatgcttcactctgaaatttgacctgaatgtggacattgagacagagatcgtcccagccatgaagaagaagtcactgggggaggtgctgctgcctgtatttgaaaggaagggcattgcgctgggcaaagtggacatctacctggaccagtccaacacacccctgtccctcaccttcgaggcctacaggttcgggggacactaccttcgtgtcaaagccccagccaagcctggagatgagggcaaggtggagcagggcatgaaggactccaagtccctgagtttgccgattctgcggccagctgggaccgggccccccgccctggagcgtgtggacgcccagagccgccgggagagcctggacatcttggcccctggccgccgccgcaagaacatgtcggagttcctgggggaggcgagcatccccgggcaggagccccccacgccctccagctgctctctgcccagcggcagcagtggcagcaccaacactggcgacagctggaagaaccgggcggccagtcgcttcagcggctttttcagctccggccccagcaccagcgcctttggccgggaggtagacaagatggagcagctggagggcaagctgcacacctacagcctcttcgggctgcccaggctgccccgggggctgcgcttcgaccatgactcctgggaggaggagtacgatgaagacgaggatgaggacaatgcctgcctgaggctggaggacagctggcgggagctcattgatgggcatgagaagctgacccggcggcagtgccaccagcaggaggcggtgtgggagctgctgcacacggaggcctcctacatcaggaaactgcgggtgatcatcaacctgttcctgtgctgcctcctgaacctgcaagagtcagggctgctgtgtgaggtggaggcggagcgcctgttcagcaacatcccggagatcgcgcagctgcaccgcaggctgtgggctagcgtgatggcgccggtgctggagaaggcgcggcgcacgcgagcgctgctacagcccggggacttcctcaaaggcttcaagatgttcggctcgctcttcaagccctacatccgctactgcatggaggaggagggctgcatggagtacatgcgcggcctgctgcgcgacaacgacctcttccgggcctacatcacgtgggcggagaagcacccacagtgccagaggctgaagctgagcgacatgctggccaaaccccaccagcggctcaccaagtacccgctgctgctcaagtcggtgctgaggaagaccgaggagccgcgcgccaaggaggccgtcgtcgccatgatcggctccgtggagcgcttcatccaccacgtgaacgcgtgcatgcggcagcggcaggagcggcagcggctggcggccgtggtgagccgcatcgacgcctacgaggtggtggaaagcagcagcgacgaagtggacaagctcctgaaggaatttctgcacctggacttgacagcgcccatccctggcgcctccccggaggagacgcggcagctgctgctggaggggagcctgaggatgaaggaggggaaggacagcaagatggatgtgtactgcttcctcttcacggatctgctgttggtgaccaaagcagtgaagaaggcagagaggaccagggtcatcaggccacccctgctcgtggacaagattgtgtgccgggagctacgggaccctgggtccttcctccttatctacctgaatgagtttcacagtgctgtaggggcctacacgttccaggccagtggccaggccttgtgccgtggctgggtggacaccatttacaatgcccagaaccagctgcaacagctgcgtgcacaggagcccccaggcagtcagcagcccctgcagagcctggaagaggaggaggatgagcaggaggaggaagaggaggaggaggaggaggaggaggaaggcgaggacagtggcacttcagctgccagctcccctaccatcatgcggaaaagcagcggcagccccgactctcagcactgtgcctcagatggctccacggagaccctggccatggttgtggtagagcctggggacacgctgtcctcccccgagttcgacagcggtcctttcagctcccagtctgatgagacctctctcagcaccactgcctcatctgccacgcccaccagtgagctgctgcccctgggtccggtggacggccgctcctgctccatggactctgcctacggcaccctctccccaacctccttacaagactttgtggccccaggcccaatggcagagctagtgcctcgggccccagagtccccacgagttccttcccctccaccctcgccccgtctccgccgccgcacccctgtccagctgttgagctgcccgccccacctgctcaagtctaagtccgaggccagcctcctccagctgctggcaggggctggcacccatgggacaccctctgcccccagccgcagcctgtcagagctctgcctggctgttccagccccaggtattaggactcagggctcccctcaggaagctgggcccagctgggattgccgaggggcccctagccctggcagcggtcctgggctagtcggctgcctggccggggaacctgcaggctcccacaggaagaggtgtggagacctgccctcgggggcctctcccagggtccagcctgagcccccaccaggggtctctgcccagcacaggaagctgaccctggcccagctctaccgaatcaggaccaccctgctgcttaactccacgctcactgcctcggaggtctgagcagagggaggcccccaagagtgccattgaccaagagacagcagacagcctgcctcctggggcgtgccggcacctgcttcagctactgcctcctgtatgcatgagccggatgctgggcaggatccctgcctacgcccgggcccgatttgcgctttgccggactggatggagtggaggaggcccaggccacagtaccaccccacctgcccaggcagcccctcgtcacctactccccgaagttaccagctcagctcgagtcttcagggctgggctcctaggctgcccatcctacttctaccctcactggcctccagtgggattcactcctgccctgcccccaccttcccagtcccacaggccacccctggcttgggctgggttctgtgaagttacgtatttattgagcttttggttcttttataaagacttgtctagactcca

SEQ ID NO: 22735 - DNA, 4190 bp, Homo sapiens
  source 1..4190: mol_type = unassigned DNA
aaactaaggccttcctggtagccaaggagcccagcagaggggctgctgctggctgctgggattgcagaggccggggtctctgtggtgttgctttcctggaaaggagggacggcacctccagggcagccagcagtgtgggagcccattccagggcgcaaatgggcactcaggaatggaaaatccaagaaggaaccaaccaccaacaaggaaatgcagtgtgagcggcggctgcgaagtctgtgccttcaaatatacagcgcccaggggacctgtgttggacggggagcaaattggcagggctgagagcgccttggttttctgtgcagacaggtccagctgcagaaattaagactggggctgagtcggggagaagccttccatgttgagatggcaactgggcaaagcaggacggagacctgtgtgtctgattagagaggcctgtggcattggcatgtggctggaggtccaggcagggtgccaccaccgcagaggtcaagcatgaattcagtcctgacaaaacatgggtctccacctcgaagctggctcagcctttgttcaggaaccgacgaccagagccccgctgaaaagaagggactgcgctgtcagaaccccgcctgcatggacaaggggcgggcggccaaggtatgtcaccacgccgactgccagcagctgcaccgccgggggcccctcaacctctgcgaggcctgtgacagcaagttccacagcaccatgcattatgatgggcatgtccgcttcgaccttcccccacaaggctctgtgctggcccggaacgtgtccacccggtcatgcccgccgcgcaccagccccgcagtggacttggaggaggaggaggaggagagctctgtggatggcaaaggggaccggaagagcacaggcctgaaactctccaagaagaaagcaaggaggagacacacggatgacccaagcaaggaatgcttcactctgaaatttgacctgaatgtggacattgagacagagatcgtcccagccatgaagaagaagtcactgggggaggtgctgctgcctgtatttgaaaggaagggcattgcgctgggcaaagtggacatctacctggaccagtccaacacacccctgtccctcaccttcgaggcctacaggttcgggggacactaccttcgtgtcaaagccccagccaagcctggagatgagggcaaggtggagcagggcatgaaggactccaagtccctgagtttgccgattctgcggccagctgggaccgggccccccgccctggagcgtgtggacgcccagagccgccgggagagcctggacatcttggcccctggccgccgccgcaagaacatgtcggagttcctgggggaggcgagcatccccgggcaggagccccccacgccctccagctgctctctgcccagcggcagcagtggcagcaccaacactggcgacagctggaagaaccgggcggccagtcgcttcagcggctttttcagctccggccccagcaccagcgcctttggccgggaggtagacaagatggagcagctggagggcaagctgcacacctacagcctcttcgggctgcccaggctgccccgggggctgcgcttcgaccatgactcctgggaggaggagtacgatgaagacgaggatgaggacaatgcctgcctgaggctggaggacagctggcgggagctcattgatgggcatgagaagctgacccggcggcagtgccaccagcaggaggcggtgtgggagctgctgcacacggaggcctcctacatcaggaaactgcgggtgatcatcaacctgttcctgtgctgcctcctgaacctgcaagagtcagggctgctgtgtgaggtggaggcggagcgcctgttcagcaacatcccggagatcgcgcagctgcaccgcaggctgtgggctagcgtgatggcgccggtgctggagaaggcgcggcgcacgcgagcgctgctacagcccggggacttcctcaaaggcttcaagatgttcggctcgctcttcaagccctacatccgctactgcatggaggaggagggctgcatggagtacatgcgcggcctgctgcgcgacaacgacctcttccgggcctacatcacgtgggcggagaagcacccacagtgccagaggctgaagctgagcgacatgctggccaaaccccaccagcggctcaccaagtacccgctgctgctcaagtcggtgctgaggaagaccgaggagccgcgcgccaaggaggccgtcgtcgccatgatcggctccgtggagcgcttcatccaccacgtgaacgcgtgcatgcggcagcggcaggagcggcagcggctggcggccgtggtgagccgcatcgacgcctacgaggtggtggaaagcagcagcgacgaagtggacaagctcctgaaggaatttctgcacctggacttgacagcgcccatccctggcgcctccccggaggagacgcggcagctgctgctggaggggagcctgaggatgaaggaggggaaggacagcaagatggatgtgtactgcttcctcttcacggatctgctgttggtgaccaaagcagtgaagaaggcagagaggaccagggtcatcaggccacccctgctcgtggacaagattgtgtgccgggagctacgggaccctgggtccttcctccttatctacctgaatgagtttcacagtgctgtaggggcctacacgttccaggccagtggccaggccttgtgccgtggctgggtggacaccatttacaatgcccagaaccagctgcaacagctgcgtgcacaggagcccccaggcagtcagcagcccctgcagagcctggaagaggaggaggatgagcaggaggaggaagaggaggaggaggaggaggaggaggaaggcgaggacagtggcacttcagctgccagctcccctaccatcatgcggaaaagcagcggcagccccgactctcagcactgtgcctcagatggctccacggagaccctggccatggttgtggtagagcctggggacacgctgtcctcccccgagttcgacagcggtcctttcagctcccagtctgatgagacctctctcagcaccactgcctcatctgccacgcccaccagtgagctgctgcccctgggtccggtggacggccgctcctgctccatggactctgcctacggcaccctctccccaacctccttacaagactttgtggccccaggcccaatggcagagctagtgcctcgggccccagagtccccacgagttccttcccctccaccctcgccccgtctccgccgccgcacccctgtccagctgttgagctgcccgccccacctgctcaagtctaagtccgaggccagcctcctccagctgctggcaggggctggcacccatgggacaccctctgcccccagccgcagcctgtcagagctctgcctggctgttccagccccaggtattaggactcagggctcccctcaggaagctgggcccagctgggattgccgaggggcccctagccctggcagcggtcctgggctagtcggctgcctggccggggaacctgcaggctcccacaggaagaggtgtggagacctgccctcgggggcctctcccagggtccagcctgagcccccaccaggggtctctgcccagcacaggaagctgaccctggcccagctctaccgaatcaggaccaccctgctgcttaactccacgctcactgcctcggaggtctgagcagagggaggcccccaagagtgccattgaccaagagacagcagacagcctgcctcctggggcgtgccggcacctgcttcagctactgcctcctgtatgcatgagccggatgctgggcaggatccctgcctacgcccgggcccgatttgcgctttgccggactggatggagtggaggaggcccaggccacagtaccaccccacctgcccaggcagcccctcgtcacctactccccgaagttaccagctcagctcgagtcttcagggctgggctcctaggctgcccatcctacttctaccctcactggcctccagtgggattcactcctgccctgcccccaccttcccagtcccacaggccacccctggcttgggctgggttctgtgaagttacgtatttattgagcttttggttcttttataaagacttgtctagactcc

SEQ ID NO: 22736 - DNA, 3550 bp, Homo sapiens
  source 1..3550: mol_type = unassigned DNA
cttgatctcccgctgtgaccagcccctctctgcctggcaggggaaagccaccaaactaaggccttcctggtagccaaggagcccagcagaggggctgctgctggctgctgggattgcagaggccggggtctctgtggtgttgctttcctggaaaggagggacggcacctccagggcagccagcagtgtgggagcccattccagggcgcaaatgggcactcaggaatggaaaatccaagaaggaaccaaccaccaacaaggaaatgcagtgtgagcggcggctgcgaagtctgtgccttcaaatatacagcgcccaggggacctgtgttggacggggagcaaattggcagggctgagagcgccttggttttctgtgcagacaggtccagctgcagaaattaagactggggctgagtcggggagaagccttccatgttgagatggcaactgggcaaagcaggacggagacctgtgtgtctgattagagaggcctgtggcattggcatgtggctggaggtccaggcagggtgccaccaccgcagaggtcaagcatgaattcagtcctgacaaaacatgggtctccacctcgaagctggctcagcctttgttcaggaaccgacgaccagagccccgctgaaaagaagggactgcgctgtcagaaccccgcctgcatggacaaggggcgggcggccaaggtatgtcaccacgccgactgccagcagctgcaccgccgggggcccctcaacctctgcgaggcctgtgacagcaagttccacagcaccatgcattatgatgggcatgtccgcttcgaccttcccccacaaggctctgtgctggcccggaacgtgtccacccggtcatgcccgccgcgcaccagccccgcagtggacttggaggaggaggaggaggagagctctgtggatggcaaaggggaccggaagagcacaggcctgaaactctccaagaagaaagcaaggaggagacacacggatgacccaagcaaggaatgcttcactctgaaatttgacctgaatgtggacattgagacagagatcgtcccagccatgaagaagaagtcactgggggaggtgctgctgcctgtatttgaaaggaagggcattgcgctgggcaaagtggacatctacctggaccagtccaacacacccctgtccctcaccttcgaggcctacaggttcgggggacactaccttcgtgtcaaagccccagccaagcctggagatgagggcaaggtggagcagggcatgaaggactccaagtccctgagtttgccgattctgcggccagctgggaccgggccccccgccctggagcgtgtggacgcccagagccgccgggagagcctggacatcttggcccctggccgccgccgcaagaacatgtcggagttcctgggggaggcgagcatccccgggcaggagccccccacgccctccagctgctctctgcccagcggcagcagtggcagcaccaacactggcgacagctggaagaaccgggcggccagtcgcttcagcggctttttcagctccggccccagcaccagcgcctttggccgggaggtagacaagatggagcagctggagggcaagctgcacacctacagcctcttcgggctgcccaggctgccccgggggctgcgcttcgaccatgactcctgggaggaggagtacgatgaagacgaggatgaggacaatgcctgcctgaggctggaggacagctggcgggagctcattgatgggcatgagaagctgacccggcggcagtgccaccagcaggaggcggtgtgggagctgctgcacacggaggcctcctacatcaggaaactgcgggtgatcatcaacctgttcctgtgctgcctcctgaacctgcaagagtcagggctgctgtgtgaggtggaggcggagcgcctgttcagcaacatcccggagatcgcgcagctgcaccgcaggctgtgggctagcgtgatggcgccggtgctggagaaggcgcggcgcacgcgagcgctgctacagcccggggacttcctcaaaggcttcaagatgttcggctcgctcttcaagccctacatccgctactgcatggaggaggagggctgcatggagtacatgcgcggcctgctgcgcgacaacgacctcttccgggcctacatcacgtgggcggagaagcacccacagtgccagaggctgaagctgagcgacatgctggccaaaccccaccagcggctcaccaagtacccgctgctgctcaagtcggtgctgaggaagaccgaggagccgcgcgccaaggaggccgtcgtcgccatgatcggctccgtggagcgcttcatccaccacgtgaacgcgtgcatgcggcagcggcaggagcggcagcggctggcggccgtggtgagccgcatcgacgcctacgaggtggtggaaagcagcagcgacgaagtggacaagctcctgaaggaatttctgcacctggacttgacagcgcccatccctggcgcctccccggaggagacgcggcagctgctgctggaggggagcctgaggatgaaggaggggaaggacagcaagatggatgtgtactgcttcctcttcacggatctgctgttggtgaccaaagcagtgaagaaggcagagaggaccagggtcatcaggccacccctgctcgtggacaagattgtgtgccgggagctacgggaccctgggtccttcctccttatctacctgaatgagtttcacagtgctgtaggggcctacacgttccaggccagtggccaggccttgtgccgtggctgggtggacaccatttacaatgcccagaaccagctgcaacagctgcgtgcacaggagcccccaggcagtcagcagcccctgcagagcctggaagaggaggaggatgagcaggaggaggaagaggaggaggaggaggaggaggaggaaggcgaggacagtggcacttcagctgccagctcccctaccatcatgcggaaaagcagcggcagccccgactctcagcactggaagctgaccctggcccagctctaccgaatcaggaccaccctgctgcttaactccacgctcactgcctcggaggtctgagcagagggaggcccccaagagtgccattgaccaagagacagcagacagcctgcctcctggggcgtgccggcacctgcttcagctactgcctcctgtatgcatgagccggatgctgggcaggatccctgcctacgcccgggcccgatttgcgctttgccggactggatggagtggaggaggcccaggccacagtaccaccccacctgcccaggcagcccctcgtcacctactccccgaagttaccagctcagctcgagtcttcagggctgggctcctaggctgcccatcctacttctaccctcactggcctccagtgggattcactcctgccctgcccccaccttcccagtcccacaggccacccctggcttgggctgggttctgtgaagttacgtatttattgagcttttggttcttttataaagacttgtctagactcca

SEQ ID NO: 22737 - DNA, 5221 bp, Homo sapiens
  source 1..5221: mol_type = unassigned DNA
aaactaaggccttcctggtagccaaggagcccagcagaggggctgctgctggctgctgggattgcagaggccggggtctctgtggtgttgctttcctggaaaggagggacggcacctccagggcagccagcagtgtgggagcccattccagggcgcaaatgggcactcaggaatggaaaatccaagaaggaaccaaccaccaacaaggaaatgcagtgtgagcggcggctgcgaagtctgtgccttcaaatatacagcgcccaggggacctgtgttggacggggagcaaattggcagggctgagagcgccttggttttctgtgcagacaggtccagctgcagaaattaagactggggctgagtcggggagaagccttccatgttgagatggcaactgggcaaagcaggacggagacctgtgtgtctgattagagaggcctgtggcattggcatgtggctggaggtccaggcagggtgccaccaccgcagaggtcaagcatgaattcagtcctgacaaaacatgggtctccacctcgaagctggctcagcctttgttcaggaaccgacgaccagagccccgctgaaaagaagggactgcgctgtcagaaccccgcctgcatggacaaggggcgggcggccaaggtatgtcaccacgccgactgccagcagctgcaccgccgggggcccctcaacctctgcgaggcctgtgacagcaagttccacagcaccatgcattatgatgggcatgtccgcttcgaccttcccccacaaggctctgtgctggcccggaacgtgtccacccggtcatgcccgccgcgcaccagccccgcagtggacttggaggaggaggaggaggagagctctgtggatggcaaaggggaccggaagagcacaggcctgaaactctccaagaagaaagcaaggaggagacacacggatgacccaagcaaggaatgcttcactctgaaatttgacctgaatgtggacattgagacagagatcgtcccagccatgaagaagaagtcactgggggaggtgctgctgcctgtatttgaaaggaagggcattgcgctgggcaaagtggacatctacctggaccagtccaacacacccctgtccctcaccttcgaggcctacaggttcgggggacactaccttcgtgtcaaagccccagccaagcctggagatgagggcaaggtggagcagggcatgaaggactccaagtccctgagtttgccgattctgcggccagctgggaccgggccccccgccctggagcgtgtggacgcccagagccgccgggagagcctggacatcttggcccctggccgccgccgcaagaacatgtcggagttcctgggggaggcgagcatccccgggcaggagccccccacgccctccagctgctctctgcccagcggcagcagtggcagcaccaacactggcgacagctggaagaaccgggcggccagtcgcttcagcggctttttcagctccggccccagcaccagcgcctttggccgggaggtagacaagatggagcagctggagggcaagctgcacacctacagcctcttcgggctgcccaggctgccccgggggctgcgcttcgaccatgactcctgggaggaggagtacgatgaagacgaggatgaggacaatgcctgcctgaggctggaggacagctggcgggagctcattgatgggcatgagaagctgacccggcggcagtgccaccagcaggaggcggtgtgggagctgctgcacacggaggcctcctacatcaggaaactgcgggtgatcatcaacctgttcctgtgctgcctcctgaacctgcaagagtcagggctgctgtgtgaggtggaggcggagcgcctgttcagcaacatcccggagatcgcgcagctgcaccgcaggctgtgggctagcgtgatggcgccggtgctggagaaggcgcggcgcacgcgagcgctgctacagcccggggacttcctcaaaggcttcaagatgttcggctcgctcttcaagccctacatccgctactgcatggaggaggagggctgcatggagtacatgcgcggcctgctgcgcgacaacgacctcttccgggcctacatcacgtgggcggagaagcacccacagtgccagaggctgaagctgagcgacatgctggccaaaccccaccagcggctcaccaagtacccgctgctgctcaagtcggtgctgaggaagaccgaggagccgcgcgccaaggaggccgtcgtcgccatgatcggctccgtggagcgcttcatccaccacgtgaacgcgtgcatgcggcagcggcaggagcggcagcggctggcggccgtggtgagccgcatcgacgcctacgaggtggtggaaagcagcagcgacgaagtggacaagctcctgaaggaatttctgcacctggacttgacagcgcccatccctggcgcctccccggaggagacgcggcagctgctgctggaggggagcctgaggatgaaggaggggaaggacagcaagatggatgtgtactgcttcctcttcacggatctgctgttggtgaccaaagcagtgaagaaggcagagaggaccagggtcatcaggccacccctgctcgtggacaagattgtgtgccgggagctacgggaccctgggtccttcctccttatctacctgaatgagtttcacagtgctgtaggggcctacacgttccaggccagtggccaggccttgtgccgtggctgggtggacaccatttacaatgcccagaaccagctgcaacagctgcgtgcacaggagcccccaggcagtcagcagcccctgcagagcctggaagaggaggaggatgagcaggaggaggaagaggaggaggaggaggaggaggaggaaggcgaggacagtggcacttcagctgccagctcccctaccatcatgcggaaaagcagcggcagccccgactctcagcactgtgcctcagatggctccacggagaccctggccatggttgtggtagagcctggggacacgctgtcctcccccgagttcgacagcggtcctttcagctcccagtctgatgagacctctctcagcaccactgcctcatctgccacgcccaccagtgagctgctgcccctgggtccggtggacggccgctcctgctccatggactctgcctacggcaccctctccccaacctccttacaagactttgtggccccaggcccaatggcagagctagtgcctcgggccccagagtccccacgagttccttcccctccaccctcgccccgtctccgccgccgcacccctgtccagctgttgagctgcccgccccacctgctcaagtctaagtccgaggccagcctcctccagctgctggcaggggctggcacccatgggacaccctctgcccccagccgcagcctgtcagagctctgcctggctgttccagccccaggtattaggactcagggctcccctcaggaagctgggcccagctgggattgccgaggggcccctagccctggcagcggtcctgggctagtcggctgcctggccggggaacctgcaggctcccacaggaagaggtgtggagacctgccctcgggggcctctcccagggtccagcctgagcccccaccaggggtctctgcccagcacaggaagctgaccctggcccagctctaccgaatcaggaccaccctgctgcttaactccacgctcactgcctcggaggtctgagcagagggaggcccccaagagtgccattgaccaagagacagcagacagcctgcctcctggggcgtgccggcacctgcttcagctactgcctcctgtatgcatgagccggatgctgggcaggatccctgcctacgcccgggcccgatttgcgctttgccggactggatggagtggaggaggcccaggccacagtaccaccccacctgcccaggcagcccctcgtcacctactccccgaagttaccagctcagctcgagtcttcagggctgggctcctaggctgcccatcctacttctaccctcactggcctccagtgggattcactcctgccctgcccccaccttcccagtcccacaggccacccctggcttgggctgggttctgtgaagttacgtatttattgagcttttggttcttttataaagacttgtctagactccactgggaagagtcctttgctttggggcccagtgactcggggcacttgagttcagggcggcctccttgtgttcctgtgctcctccacttgccacggatgggccacggatggagcttgccatgggaagcactgggaagtaatggggtgtggggtgccaccagaccaacacccccagacttccccaccttcagccaccatcagagcctctccccaggtgccccccggggattcagggctgaatctgcccagttcccacactcaggccagccctcttgggaaggtgggtcctccatgggggtcccttcaggaactttttttttttttttaatacagagtctcactctgtcacctaggttggagtgcagtggtgtgatgtcggctcactgcaacctctgcctcccgggttcaaacgattctcctgccccagccactctagtagctggaactgcaggtgtgcaccaccacgccgggctagtttttgtattttaagtagagacggcatttcaccatattggtcaggctggtctcgaactcctgaccccaagtgttccgcccgcctctgcctcccatagtgctagaattacaggcctgagctactgcgcttggccccttgcggtacttttggcccaacctcctccatggctggggacgcggaggccgagagagaagtcacttgccctggctctaccttgaagtggttctcagggttggggcgagagtcggggtggggaccgagatgcagctctatcctgtgcccctggtcgcagcaggcagcccagcgcttcgcgtgttctacttggcctgtccgctgccgcctaatgagctcaggtctaggccgagcagagggggcacctggtcggactcggttgggctcgggcggccccgcctccccccgcccgccaggcgggcccttctcgacggcgcggggcgggccctgcgggcgcggggctgaaggcggaaccacgacgggcagagagcacggagccgggaagcccctgggcgcccgtcggagggctatggagcagcggccgc

SEQ ID NO: 22738 - DNA, 4698 bp, Homo sapiens
  source 1..4698: mol_type = unassigned DNA
agcattcaaggagctccccaggagaaagagcaagttctgaggagccctctgagcccggcattggtgttgaggagggagtcagagaagagaggggcccggggccgcgcagaggcgcagaggtatgtcaccacgccgactgccagcagctgcaccgccgggggcccctcaacctctgcgaggcctgtgacagcaagttccacagcaccatgcattatgatgggcatgtccgcttcgaccttcccccacaaggctctgtgctggcccggaacgtgtccacccggtcatgcccgccgcgcaccagccccgcagtggacttggaggaggaggaggaggagagctctgtggatggcaaaggggaccggaagagcacaggcctgaaactctccaagaagaaagcaaggaggagacacacggatgacccaagcaaggaatgcttcactctgaaatttgacctgaatgtggacattgagacagagatcgtcccagccatgaagaagaagtcactgggggaggtgctgctgcctgtatttgaaaggaagggcattgcgctgggcaaagtggacatctacctggaccagtccaacacacccctgtccctcaccttcgaggcctacaggttcgggggacactaccttcgtgtcaaagccccagccaagcctggagatgagggcaaggtggagcagggcatgaaggactccaagtccctgagtttgccgattctgcggccagctgggaccgggccccccgccctggagcgtgtggacgcccagagccgccgggagagcctggacatcttggcccctggccgccgccgcaagaacatgtcggagttcctgggggaggcgagcatccccgggcaggagccccccacgccctccagctgctctctgcccagcggcagcagtggcagcaccaacactggcgacagctggaagaaccgggcggccagtcgcttcagcggctttttcagctccggccccagcaccagcgcctttggccgggaggtagacaagatggagcagctggagggcaagctgcacacctacagcctcttcgggctgcccaggctgccccgggggctgcgcttcgaccatgactcctgggaggaggagtacgatgaagacgaggatgaggacaatgcctgcctgaggctggaggacagctggcgggagctcattgatgggcatgagaagctgacccggcggcagtgccaccagcaggaggcggtgtgggagctgctgcacacggaggcctcctacatcaggaaactgcgggtgatcatcaacctgttcctgtgctgcctcctgaacctgcaagagtcagggctgctgtgtgaggtggaggcggagcgcctgttcagcaacatcccggagatcgcgcagctgcaccgcaggctgtgggctagcgtgatggcgccggtgctggagaaggcgcggcgcacgcgagcgctgctacagcccggggacttcctcaaaggcttcaagatgttcggctcgctcttcaagccctacatccgctactgcatggaggaggagggctgcatggagtacatgcgcggcctgctgcgcgacaacgacctcttccgggcctacatcacgtgggcggagaagcacccacagtgccagaggctgaagctgagcgacatgctggccaaaccccaccagcggctcaccaagtacccgctgctgctcaagtcggtgctgaggaagaccgaggagccgcgcgccaaggaggccgtcgtcgccatgatcggctccgtggagcgcttcatccaccacgtgaacgcgtgcatgcggcagcggcaggagcggcagcggctggcggccgtggtgagccgcatcgacgcctacgaggtggtggaaagcagcagcgacgaagtggacaagctcctgaaggaatttctgcacctggacttgacagcgcccatccctggcgcctccccggaggagacgcggcagctgctgctggaggggagcctgaggatgaaggaggggaaggacagcaagatggatgtgtactgcttcctcttcacggatctgctgttggtgaccaaagcagtgaagaaggcagagaggaccagggtcatcaggccacccctgctcgtggacaagattgtgtgccgggagctacgggaccctgggtccttcctccttatctacctgaatgagtttcacagtgctgtaggggcctacacgttccaggccagtggccaggccttgtgccgtggctgggtggacaccatttacaatgcccagaaccagctgcaacagctgcgtgcacaggagcccccaggcagtcagcagcccctgcagagcctggaagaggaggaggatgagcaggaggaggaagaggaggaggaggaggaggaggaggaaggcgaggacagtggcacttcagctgccagctcccctaccatcatgcggaaaagcagcggcagccccgactctcagcactgtgcctcagatggctccacggagaccctggccatggttgtggtagagcctggggacacgctgtcctcccccgagttcgacagcggtcctttcagctcccagtctgatgagacctctctcagcaccactgcctcatctgccacgcccaccagtgagctgctgcccctgggtccggtggacggccgctcctgctccatggactctgcctacggcaccctctccccaacctccttacaagactttgtggccccaggcccaatggcagagctagtgcctcgggccccagagtccccacgagttccttcccctccaccctcgccccgtctccgccgccgcacccctgtccagctgttgagctgcccgccccacctgctcaagtctaagtccgaggccagcctcctccagctgctggcaggggctggcacccatgggacaccctctgcccccagccgcagcctgtcagagctctgcctggctgttccagccccaggtattaggactcagggctcccctcaggaagctgggcccagctgggattgccgaggggcccctagccctggcagcggtcctgggctagtcggctgcctggccggggaacctgcaggctcccacaggaagaggtgtggagacctgccctcgggggcctctcccagggtccagcctgagcccccaccaggggtctctgcccagcacaggaagctgaccctggcccagctctaccgaatcaggaccaccctgctgcttaactccacgctcactgcctcggaggtctgagcagagggaggcccccaagagtgccattgaccaagagacagcagacagcctgcctcctggggcgtgccggcacctgcttcagctactgcctcctgtatgcatgagccggatgctgggcaggatccctgcctacgcccgggcccgatttgcgctttgccggactggatggagtggaggaggcccaggccacagtaccaccccacctgcccaggcagcccctcgtcacctactccccgaagttaccagctcagctcgagtcttcagggctgggctcctaggctgcccatcctacttctaccctcactggcctccagtgggattcactcctgccctgcccccaccttcccagtcccacaggccacccctggcttgggctgggttctgtgaagttacgtatttattgagcttttggttcttttataaagacttgtctagactccactgggaagagtcctttgctttggggcccagtgactcggggcacttgagttcagggcggcctccttgtgttcctgtgctcctccacttgccacggatgggccacggatggagcttgccatgggaagcactgggaagtaatggggtgtggggtgccaccagaccaacacccccagacttccccaccttcagccaccatcagagcctctccccaggtgccccccggggattcagggctgaatctgcccagttcccacactcaggccagccctcttgggaaggtgggtcctccatgggggtcccttcaggaactttttttttttttttaatacagagtctcactctgtcacctaggttggagtgcagtggtgtgatgtcggctcactgcaacctctgcctcccgggttcaaacgattctcctgccccagccactctagtagctggaactgcaggtgtgcaccaccacgccgggctagtttttgtattttaagtagagacggcatttcaccatattggtcaggctggtctcgaactcctgaccccaagtgttccgcccgcctctgcctcccatagtgctagaattacaggcctgagctactgcgcttggccccttgcggtacttttggcccaacctcctccatggctggggacgcggaggccgagagagaagtcacttgccctggctctaccttgaagtggttctcagggttggggcgagagtcggggtggggaccgagatgcagctctatcctgtgcccctggtcgcagcaggcagcccagcgcttcgcgtgttctacttggcctgtccgctgccgcctaatgagctcaggtctaggccgagcagagggggcacctggtcggactcggttgggctcgggcggccccgcctccccccgcccgccaggcgggcccttctcgacggcgcggggcgggccctgcgggcgcggggctgaaggcggaaccacgacgggcagagagcacggagccgggaagcccctgggcgcccgtcggagggctatggagcagcggccgc

SEQ ID NO: 22739 - DNA, 3697 bp, Homo sapiens
  source 1..3697: mol_type = unassigned DNA
cccagtccccggcgtccccggcgcccccgcccgccgcccgccccccgcgcggcacggggcctgctccatggacgaccagagccccgctgaaaagaagggactgcgctgtcagaaccccgcctgcatggacaaggggcgggcggccaaggtatgtcaccacgccgactgccagcagctgcaccgccgggggcccctcaacctctgcgaggcctgtgacagcaagttccacagcaccatgcattatgatgggcatgtccgcttcgaccttcccccacaaggctctgtgctggcccggaacgtgtccacccggtcatgcccgccgcgcaccagccccgcagtggacttggaggaggaggaggaggagagctctgtggatggcaaaggggaccggaagagcacaggcctgaaactctccaagaagaaagcaaggaggagacacacggatgacccaagcaaggaatgcttcactctgaaatttgacctgaatgtggacattgagacagagatcgtcccagccatgaagaagaagtcactgggggaggtgctgctgcctgtatttgaaaggaagggcattgcgctgggcaaagtggacatctacctggaccagtccaacacacccctgtccctcaccttcgaggcctacaggttcgggggacactaccttcgtgtcaaagccccagccaagcctggagatgagggcaaggtggagcagggcatgaaggactccaagtccctgagtttgccgattctgcggccagctgggaccgggccccccgccctggagcgtgtggacgcccagagccgccgggagagcctggacatcttggcccctggccgccgccgcaagaacatgtcggagttcctgggggaggcgagcatccccgggcaggagccccccacgccctccagctgctctctgcccagcggcagcagtggcagcaccaacactggcgacagctggaagaaccgggcggccagtcgcttcagcggctttttcagctccggccccagcaccagcgcctttggccgggaggtagacaagatggagcagctggagggcaagctgcacacctacagcctcttcgggctgcccaggctgccccgggggctgcgcttcgaccatgactcctgggaggaggagtacgatgaagacgaggatgaggacaatgcctgcctgaggctggaggacagctggcgggagctcattgatgggcatgagaagctgacccggcggcagtgccaccagcaggaggcggtgtgggagctgctgcacacggaggcctcctacatcaggaaactgcgggtgatcatcaacctgttcctgtgctgcctcctgaacctgcaagagtcagggctgctgtgtgaggtggaggcggagcgcctgttcagcaacatcccggagatcgcgcagctgcaccgcaggctgtgggctagcgtgatggcgccggtgctggagaaggcgcggcgcacgcgagcgctgctacagcccggggacttcctcaaaggcttcaagatgttcggctcgctcttcaagccctacatccgctactgcatggaggaggagggctgcatggagtacatgcgcggcctgctgcgcgacaacgacctcttccgggcctacatcacgtgggcggagaagcacccacagtgccagaggctgaagctgagcgacatgctggccaaaccccaccagcggctcaccaagtacccgctgctgctcaagtcggtgctgaggaagaccgaggagccgcgcgccaaggaggccgtcgtcgccatgatcggctccgtggagcgcttcatccaccacgtgaacgcgtgcatgcggcagcggcaggagcggcagcggctggcggccgtggtgagccgcatcgacgcctacgaggtggtggaaagcagcagcgacgaagtggacaagctcctgaaggaatttctgcacctggacttgacagcgcccatccctggcgcctccccggaggagacgcggcagctgctgctggaggggagcctgaggatgaaggaggggaaggacagcaagatggatgtgtactgcttcctcttcacggatctgctgttggtgaccaaagcagtgaagaaggcagagaggaccagggtcatcaggccacccctgctcgtggacaagattgtgtgccgggagctacgggaccctgggtccttcctccttatctacctgaatgagtttcacagtgctgtaggggcctacacgttccaggccagtggccaggccttgtgccgtggctgggtggacaccatttacaatgcccagaaccagctgcaacagctgcgtgcacaggagcccccaggcagtcagcagcccctgcagagcctggaagaggaggaggatgagcaggaggaggaagaggaggaggaggaggaggaggaggaaggcgaggacagtggcacttcagctgccagctcccctaccatcatgcggaaaagcagcggcagccccgactctcagcactgtgcctcagatggctccacggagaccctggccatggttgtggtagagcctggggacacgctgtcctcccccgagttcgacagcggtcctttcagctcccagtctgatgagacctctctcagcaccactgcctcatctgccacgcccaccagtgagctgctgcccctgggtccggtggacggccgctcctgctccatggactctgcctacggcaccctctccccaacctccttacaagactttgtggccccaggcccaatggcagagctagtgcctcgggccccagagtccccacgagttccttcccctccaccctcgccccgtctccgccgccgcacccctgtccagctgttgagctgcccgccccacctgctcaagtctaagtccgaggccagcctcctccagctgctggcaggggctggcacccatgggacaccctctgcccccagccgcagcctgtcagagctctgcctggctgttccagccccaggtattaggactcagggctcccctcaggaagctgggcccagctgggattgccgaggggcccctagccctggcagcggtcctgggctagtcggctgcctggccggggaacctgcaggctcccacaggaagaggtgtggagacctgccctcgggggcctctcccagggtccagcctgagcccccaccaggggtctctgcccagcacaggaagctgaccctggcccagctctaccgaatcaggaccaccctgctgcttaactccacgctcactgcctcggaggtctgagcagagggaggcccccaagagtgccattgaccaagagacagcagacagcctgcctcctggggcgtgccggcacctgcttcagctactgcctcctgtatgcatgagccggatgctgggcaggatccctgcctacgcccgggcccgatttgcgctttgccggactggatggagtggaggaggcccaggccacagtaccaccccacctgcccaggcagcccctcgtcacctactccccgaagttaccagctcagctcgagtcttcagggctgggctcctaggctgcccatcctacttctaccctcactggcctccagtgggattcactcctgccctgcccccaccttcccagtcccacaggccacccctggcttgggctgggttctgtgaagttacgtatttattgagcttttggttcttttataaagacttgtctagactcca

SEQ ID NO: 22740 - DNA, 3694 bp, Homo sapiens
  source 1..3694: mol_type = unassigned DNA
gcagaccgcggcttcctccggccgccatggggacaggacccggtgtctccggacgcctagcagcctccaggccgggcccggggctgcccctccgggactcggagccctcctgggccgggggtcgtgcccgcgacggtgatagccaggtatgtcaccacgccgactgccagcagctgcaccgccgggggcccctcaacctctgcgaggcctgtgacagcaagttccacagcaccatgcattatgatgggcatgtccgcttcgaccttcccccacaaggctctgtgctggcccggaacgtgtccacccggtcatgcccgccgcgcaccagccccgcagtggacttggaggaggaggaggaggagagctctgtggatggcaaaggggaccggaagagcacaggcctgaaactctccaagaagaaagcaaggaggagacacacggatgacccaagcaaggaatgcttcactctgaaatttgacctgaatgtggacattgagacagagatcgtcccagccatgaagaagaagtcactgggggaggtgctgctgcctgtatttgaaaggaagggcattgcgctgggcaaagtggacatctacctggaccagtccaacacacccctgtccctcaccttcgaggcctacaggttcgggggacactaccttcgtgtcaaagccccagccaagcctggagatgagggcaaggtggagcagggcatgaaggactccaagtccctgagtttgccgattctgcggccagctgggaccgggccccccgccctggagcgtgtggacgcccagagccgccgggagagcctggacatcttggcccctggccgccgccgcaagaacatgtcggagttcctgggggaggcgagcatccccgggcaggagccccccacgccctccagctgctctctgcccagcggcagcagtggcagcaccaacactggcgacagctggaagaaccgggcggccagtcgcttcagcggctttttcagctccggccccagcaccagcgcctttggccgggaggtagacaagatggagcagctggagggcaagctgcacacctacagcctcttcgggctgcccaggctgccccgggggctgcgcttcgaccatgactcctgggaggaggagtacgatgaagacgaggatgaggacaatgcctgcctgaggctggaggacagctggcgggagctcattgatgggcatgagaagctgacccggcggcagtgccaccagcaggaggcggtgtgggagctgctgcacacggaggcctcctacatcaggaaactgcgggtgatcatcaacctgttcctgtgctgcctcctgaacctgcaagagtcagggctgctgtgtgaggtggaggcggagcgcctgttcagcaacatcccggagatcgcgcagctgcaccgcaggctgtgggctagcgtgatggcgccggtgctggagaaggcgcggcgcacgcgagcgctgctacagcccggggacttcctcaaaggcttcaagatgttcggctcgctcttcaagccctacatccgctactgcatggaggaggagggctgcatggagtacatgcgcggcctgctgcgcgacaacgacctcttccgggcctacatcacgtgggcggagaagcacccacagtgccagaggctgaagctgagcgacatgctggccaaaccccaccagcggctcaccaagtacccgctgctgctcaagtcggtgctgaggaagaccgaggagccgcgcgccaaggaggccgtcgtcgccatgatcggctccgtggagcgcttcatccaccacgtgaacgcgtgcatgcggcagcggcaggagcggcagcggctggcggccgtggtgagccgcatcgacgcctacgaggtggtggaaagcagcagcgacgaagtggacaagctcctgaaggaatttctgcacctggacttgacagcgcccatccctggcgcctccccggaggagacgcggcagctgctgctggaggggagcctgaggatgaaggaggggaaggacagcaagatggatgtgtactgcttcctcttcacggatctgctgttggtgaccaaagcagtgaagaaggcagagaggaccagggtcatcaggccacccctgctcgtggacaagattgtgtgccgggagctacgggaccctgggtccttcctccttatctacctgaatgagtttcacagtgctgtaggggcctacacgttccaggccagtggccaggccttgtgccgtggctgggtggacaccatttacaatgcccagaaccagctgcaacagctgcgtgcacaggagcccccaggcagtcagcagcccctgcagagcctggaagaggaggaggatgagcaggaggaggaagaggaggaggaggaggaggaggaggaaggcgaggacagtggcacttcagctgccagctcccctaccatcatgcggaaaagcagcggcagccccgactctcagcactgtgcctcagatggctccacggagaccctggccatggttgtggtagagcctggggacacgctgtcctcccccgagttcgacagcggtcctttcagctcccagtctgatgagacctctctcagcaccactgcctcatctgccacgcccaccagtgagctgctgcccctgggtccggtggacggccgctcctgctccatggactctgcctacggcaccctctccccaacctccttacaagactttgtggccccaggcccaatggcagagctagtgcctcgggccccagagtccccacgagttccttcccctccaccctcgccccgtctccgccgccgcacccctgtccagctgttgagctgcccgccccacctgctcaagtctaagtccgaggccagcctcctccagctgctggcaggggctggcacccatgggacaccctctgcccccagccgcagcctgtcagagctctgcctggctgttccagccccaggtattaggactcagggctcccctcaggaagctgggcccagctgggattgccgaggggcccctagccctggcagcggtcctgggctagtcggctgcctggccggggaacctgcaggctcccacaggaagaggtgtggagacctgccctcgggggcctctcccagggtccagcctgagcccccaccaggggtctctgcccagcacaggaagctgaccctggcccagctctaccgaatcaggaccaccctgctgcttaactccacgctcactgcctcggaggtctgagcagagggaggcccccaagagtgccattgaccaagagacagcagacagcctgcctcctggggcgtgccggcacctgcttcagctactgcctcctgtatgcatgagccggatgctgggcaggatccctgcctacgcccgggcccgatttgcgctttgccggactggatggagtggaggaggcccaggccacagtaccaccccacctgcccaggcagcccctcgtcacctactccccgaagttaccagctcagctcgagtcttcagggctgggctcctaggctgcccatcctacttctaccctcactggcctccagtgggattcactcctgccctgcccccaccttcccagtcccacaggccacccctggcttgggctgggttctgtgaagttacgtatttattgagcttttggttcttttataaagacttgtctagactcc

SEQ ID NO: 22741 - DNA, 3456 bp, Homo sapiens
  source 1..3456: mol_type = unassigned DNA
agcattcaaggagctccccaggagaaagagcaagttctgaggagccctctgagcccggaacgtgtccacccggtcatgcccgccgcgcaccagccccgcagtggacttggaggaggaggaggaggagagctctgtggatggcaaaggggaccggaagagcacaggcctgaaactctccaagaagaaagcaaggaggagacacacggatgacccaagcaaggaatgcttcactctgaaatttgacctgaatgtggacattgagacagagatcgtcccagccatgaagaagaagtcactgggggaggtgctgctgcctgtatttgaaaggaagggcattgcgctgggcaaagtggacatctacctggaccagtccaacacacccctgtccctcaccttcgaggcctacaggttcgggggacactaccttcgtgtcaaagccccagccaagcctggagatgagggcaaggtggagcagggcatgaaggactccaagtccctgagtttgccgattctgcggccagctgggaccgggccccccgccctggagcgtgtggacgcccagagccgccgggagagcctggacatcttggcccctggccgccgccgcaagaacatgtcggagttcctgggggaggcgagcatccccgggcaggagccccccacgccctccagctgctctctgcccagcggcagcagtggcagcaccaacactggcgacagctggaagaaccgggcggccagtcgcttcagcggctttttcagctccggccccagcaccagcgcctttggccgggaggtagacaagatggagcagctggagggcaagctgcacacctacagcctcttcgggctgcccaggctgccccgggggctgcgcttcgaccatgactcctgggaggaggagtacgatgaagacgaggatgaggacaatgcctgcctgaggctggaggacagctggcgggagctcattgatgggcatgagaagctgacccggcggcagtgccaccagcaggaggcggtgtgggagctgctgcacacggaggcctcctacatcaggaaactgcgggtgatcatcaacctgttcctgtgctgcctcctgaacctgcaagagtcagggctgctgtgtgaggtggaggcggagcgcctgttcagcaacatcccggagatcgcgcagctgcaccgcaggctgtgggctagcgtgatggcgccggtgctggagaaggcgcggcgcacgcgagcgctgctacagcccggggacttcctcaaaggcttcaagatgttcggctcgctcttcaagccctacatccgctactgcatggaggaggagggctgcatggagtacatgcgcggcctgctgcgcgacaacgacctcttccgggcctacatcacgtgggcggagaagcacccacagtgccagaggctgaagctgagcgacatgctggccaaaccccaccagcggctcaccaagtacccgctgctgctcaagtcggtgctgaggaagaccgaggagccgcgcgccaaggaggccgtcgtcgccatgatcggctccgtggagcgcttcatccaccacgtgaacgcgtgcatgcggcagcggcaggagcggcagcggctggcggccgtggtgagccgcatcgacgcctacgaggtggtggaaagcagcagcgacgaagtggacaagctcctgaaggaatttctgcacctggacttgacagcgcccatccctggcgcctccccggaggagacgcggcagctgctgctggaggggagcctgaggatgaaggaggggaaggacagcaagatggatgtgtactgcttcctcttcacggatctgctgttggtgaccaaagcagtgaagaaggcagagaggaccagggtcatcaggccacccctgctcgtggacaagattgtgtgccgggagctacgggaccctgggtccttcctccttatctacctgaatgagtttcacagtgctgtaggggcctacacgttccaggccagtggccaggccttgtgccgtggctgggtggacaccatttacaatgcccagaaccagctgcaacagctgcgtgcacaggagcccccaggcagtcagcagcccctgcagagcctggaagaggaggaggatgagcaggaggaggaagaggaggaggaggaggaggaggaggaaggcgaggacagtggcacttcagctgccagctcccctaccatcatgcggaaaagcagcggcagccccgactctcagcactgtgcctcagatggctccacggagaccctggccatggttgtggtagagcctggggacacgctgtcctcccccgagttcgacagcggtcctttcagctcccagtctgatgagacctctctcagcaccactgcctcatctgccacgcccaccagtgagctgctgcccctgggtccggtggacggccgctcctgctccatggactctgcctacggcaccctctccccaacctccttacaagactttgtggccccaggcccaatggcagagctagtgcctcgggccccagagtccccacgagttccttcccctccaccctcgccccgtctccgccgccgcacccctgtccagctgttgagctgcccgccccacctgctcaagtctaagtccgaggccagcctcctccagctgctggcaggggctggcacccatgggacaccctctgcccccagccgcagcctgtcagagctctgcctggctgttccagccccaggtattaggactcagggctcccctcaggaagctgggcccagctgggattgccgaggggcccctagccctggcagcggtcctgggctagtcggctgcctggccggggaacctgcaggctcccacaggaagaggtgtggagacctgccctcgggggcctctcccagggtccagcctgagcccccaccaggggtctctgcccagcacaggaagctgaccctggcccagctctaccgaatcaggaccaccctgctgcttaactccacgctcactgcctcggaggtctgagcagagggaggcccccaagagtgccattgaccaagagacagcagacagcctgcctcctggggcgtgccggcacctgcttcagctactgcctcctgtatgcatgagccggatgctgggcaggatccctgcctacgcccgggcccgatttgcgctttgccggactggatggagtggaggaggcccaggccacagtaccaccccacctgcccaggcagcccctcgtcacctactccccgaagttaccagctcagctcgagtcttcagggctgggctcctaggctgcccatcctacttctaccctcactggcctccagtgggattcactcctgccctgcccccaccttcccagtcccacaggccacccctggcttgggctgggttctgtgaagttacgtatttattgagcttttggttcttttataaagacttgtctagac

SEQ ID NO: 22742 - DNA, 3381 bp, Homo sapiens
  source 1..3381: mol_type = unassigned DNA
accgcggtgcactccagcccccaggaagagaggcagcttggagggggccaaattcagggtcaaagatgagtcttggggaacgggggtcgccccagaccttcgggggctcctctgtctctaaagggagcgatgcagggcacgaccagagccccgctgaaaagaagggactgcgctgtcagaaccccgcctgcatggacaaggggcgggcggccaaggtatgtcaccacgccgactgccagcagctgcaccgccgggggcccctcaacctctgcgaggcctgtgacagcaagttccacagcaccatgcattatgatgggcatgtccgcttcgaccttcccccacaaggctctgtgctggcccggaacgtgtccacccggtcatgcccgccgcgcaccagccccgcagtggacttggaggaggaggaggaggagagctctgtggatggcaaaggggaccggaagagcacaggcctgaaactctccaagaagaaagcaaggaggagacacacggatgacccaagcaaggaatgcttcactctgaaatttgacctgaatgtggacattgagacagagatcgtcccagccatgaagaagaagtcactgggggaggtgctgctgcctgtatttgaaaggaagggcattgcgctgggcaaagtggacatctacctggaccagtccaacacacccctgtccctcaccttcgaggcctacaggttcgggggacactaccttcgtgtcaaagccccagccaagcctggagatgagggcaaggtggagcagggcatgaaggactccaagtccctgagtttgccgattctgcggccagctgggaccgggccccccgccctggagcgtgtggacgcccagagccgccgggagagcctggacatcttggcccctggccgccgccgcaagaacatgtcggagttcctgggggaggcgagcatccccgggcaggagccccccacgccctccagctgctctctgcccagcggcagcagtggcagcaccaacactggcgacagctggaagaaccgggcggccagtcgcttcagcggctttttcagctccggccccagcaccagcgcctttggccgggaggtagacaagatggagcagctggagggcaagctgcacacctacagcctcttcgggctgcccaggctgccccgggggctgcgcttcgaccatgactcctgggaggaggagtacgatgaagacgaggatgaggacaatgcctgcctgaggctggaggacagctggcgggagctcattgatgggcatgagaagctgacccggcggcagtgccaccagcaggaggcggtgtgggagctgctgcacacggaggcctcctacatcaggaaactgcgggtgatcatcaacctgttcctgtgctgcctcctgaacctgcaagagtcagggctgctgtgtgaggtggaggcggagcgcctgttcagcaacatcccggagatcgcgcagctgcaccgcaggctgtgggctagcgtgatggcgccggtgctggagaaggcgcggcgcacgcgagcgctgctacagcccggggacttcctcaaaggcttcaagatgttcggctcgctcttcaagccctacatccgctactgcatggaggaggagggctgcatggagtacatgcgcggcctgctgcgcgacaacgacctcttccgggcctacatcacgtgggcggagaagcacccacagtgccagaggctgaagctgagcgacatgctggccaaaccccaccagcggctcaccaagtacccgctgctgctcaagtcggtgctgaggaagaccgaggagccgcgcgccaaggaggccgtcgtcgccatgatcggctccgtggagcgcttcatccaccacgtgaacgcgtgcatgcggcagcggcaggagcggcagcggctggcggccgtggtgagccgcatcgacgcctacgaggtggtggaaagcagcagcgacgaagtggacaagctcctgaaggaatttctgcacctggacttgacagcgcccatccctggcgcctccccggaggagacgcggcagctgctgctggaggggagcctgaggatgaaggaggggaaggacagcaagatggatgtgtactgcttcctcttcacggatctgctgttggtgaccaaagcagtgaagaaggcagagaggaccagggtcatcaggccacccctgctcgtggacaagattgtgtgccgggagctacgggaccctgggtccttcctccttatctacctgaatgagtttcacagtgctgtaggggcctacacgttccaggccagtggccaggccttgtgccgtggctgggtggacaccatttacaatgcccagaaccagctgcaacagctgcgtgcacaggagcccccaggcagtcagcagcccctgcagagcctggaagaggaggaggatgagcaggaggaggaagaggaggaggaggaggaggaggaggaaggcgaggacagtggcacttcagctgccagctcccctaccatcatgcggaaaagcagcggcagccccgactctcagcactgtgcctcagatggctccacggagaccctggccatggttgtggtagagcctggggacacgctgtcctcccccgagttcgacagcggtcctttcagctcccagtctgatgagacctctctcagcaccactgcctcatctgccacgcccaccagtgagctgctgcccctgggtccggtggacggccgctcctgctccatggactctgcctacggcaccctctccccaacctccttacaagactttgtggccccaggcccaatggcagagctagtgcctcgggccccagagtccccacgagttccttcccctccaccctcgccccgtctccgccgccgcacccctgtccagctgttgagctgcccgccccacctgctcaagtctaagtccgaggccagcctcctccagctgctggcaggggctggcacccatgggacaccctctgcccccagccgcagcctgtcagagctctgcctggctgttccagccccaggtattaggactcagggctcccctcaggaagctgggcccagctgggattgccgaggggcccctagccctggcagcggtcctgggctagtcggctgcctggccggggaacctgcaggctcccacaggaagaggtgtggagacctgccctcgggggcctctcccagggtccagcctgagcccccaccaggggtctctgcccagcacaggaagctgaccctggcccagctctaccgaatcaggaccaccctgctgcttaactccacgctcactgcctcggaggtctgagcagagggaggcccccaagagtgccattgaccaagagacagcagacagcctgcctcct

SEQ ID NO: 22743 - DNA, 3062 bp, Homo sapiens
  source 1..3062: mol_type = unassigned DNA
gtgcgagggtccggcggcggcggctctgcggcctcccagtccccggcgtccccggcgcccccgcccgccgcccgccccccgcgcggcacggggcctgctccatggacgaccagagccccgctgaaaagaagggactgcgctgtcagaaccccgcctgcatggacaaggggcgggcggccaaggtatgtcaccacgccgactgccagcagctgcaccgccgggggcccctcaacctctgcgaggcctgtgacagcaagttccacagcaccatgcattatgatgggcatgtccgcttcgaccttcccccacaaggctctgtgctggcccggaacgtgtccacccggtcatgcccgccgcgcaccagccccgcagtggacttggaggaggaggaggaggagagctctgtggatggcaaaggggaccggaagagcacaggcctgaaactctccaagaagaaagcaaggaggagacacacggatgacccaagcaaggaatgcttcactctgaaatttgacctgaatgtggacattgagacagagatcgtcccagccatgaagaagaagtcactgggggaggtgctgctgcctgtatttgaaaggaagggcattgcgctgggcaaagtggacatctacctggaccagtccaacacacccctgtccctcaccttcgaggcctacaggttcgggggacactaccttcgtgtcaaagccccagccaagcctggagatgagggcaaggtggagcagggcatgaaggactccaagtccctgagtttgccgattctgcggccagctgggaccgggccccccgccctggagcgtgtggacgcccagagccgccgggagagcctggacatcttggcccctggccgccgccgcaagaacatgtcggagttcctgggggaggcgagcatccccgggcaggagccccccacgccctccagctgctctctgcccagcggcagcagtggcagcaccaacactggcgacagctggaagaaccgggcggccagtcgcttcagcggctttttcagctccggccccagcaccagcgcctttggccgggaggtagacaagatggagcagctggagggcaagctgcacacctacagcctcttcgggctgcccaggctgccccgggggctgcgcttcgaccatgactcctgggaggaggagtacgatgaagacgaggatgaggacaatgcctgcctgaggctggaggacagctggcgggagctcattgatgggcatgagaagctgacccggcggcagtgccaccagcaggaggcggtgtgggagctgctgcacacggaggcctcctacatcaggaaactgcgggtgatcatcaacctgttcctgtgctgcctcctgaacctgcaagagtcagggctgctgtgtgaggtggaggcggagcgcctgttcagcaacatcccggagatcgcgcagctgcaccgcaggctgtgggctagcgtgatggcgccggtgctggagaaggcgcggcgcacgcgagcgctgctacagcccggggacttcctcaaaggcttcaagatgttcggctcgctcttcaagccctacatccgctactgcatggaggaggagggctgcatggagtacatgcgcggcctgctgcgcgacaacgacctcttccgggcctacatcacgtgggcggagaagcacccacagtgccagaggctgaagctgagcgacatgctggccaaaccccaccagcggctcaccaagtacccgctgctgctcaagtcggtgctgaggaagaccgaggagccgcgcgccaaggaggccgtcgtcgccatgatcggctccgtggagcgcttcatccaccacgtgaacgcgtgcatgcggcagcggcaggagcggcagcggctggcggccgtggtgagccgcatcgacgcctacgaggtggtggaaagcagcagcgacgaagtggacaagctcctgaaggaatttctgcacctggacttgacagcgcccatccctggcgcctccccggaggagacgcggcagctgctgctggaggggagcctgaggatgaaggaggggaaggacagcaagatggatgtgtactgcttcctcttcacggatctgctgttggtgaccaaagcagtgaagaaggcagagaggaccagggtcatcaggccacccctgctcgtggacaagattgtgtgccgggagctacgggaccctgggtccttcctccttatctacctgaatgagtttcacagtgctgtaggggcctacacgttccaggccagtggccaggccttgtgccgtggctgggtggacaccatttacaatgcccagaaccagctgcaacagctgcgtgcacaggagcccccaggcagtcagcagcccctgcagagcctggaagaggaggaggatgagcaggaggaggaagaggaggaggaggaggaggaggaggaaggcgaggacagtggcacttcagctgccagctcccctaccatcatgcggaaaagcagcggcagccccgactctcagcactgtgcctcagatggctccacggagaccctggccatggttgtggtagagcctggggacacgctgtcctcccccgagttcgacagcggtcctttcagctcccagtctgatgagacctctctcagcaccactgcctcatctgccacgcccaccagtgagctgctgcccctgggtccggtggacggccgctcctgctccatggactctgcctacggcaccctctccccaacctccttacaagactttgtggccccaggcccaatggcagagctagtgcctcgggccccagagtccccacgagttccttcccctccaccctcgccccgtctccgccgccgcacccctgtccagctgttgagctgcccgccccacctgctcaagtctaagtccgaggccagcctcctccagctgctggcaggggctggcacccatgggacaccctctgcccccagccgcagcctgtcagagctctgcctggctgttccagccccagcacaggaagctgaccctggcccagctctaccgaatcaggaccaccctgctgcttaa

SEQ ID NO: 22744 - DNA, 2881 bp, Homo sapiens
  source 1..2881: mol_type = unassigned DNA
agcgcctcgcgggggtctggcccggagtggagggcgcgcggtcccagccctcccgctcggccggcgggtgtcgagttcagccctaggggacctctttctcctggacattgaagatatggccctttggaggtgacccaggagagaagggatgaaggcctttggtcctccacatgagggccccctccaaggactcgtggcctcccgcattgagacttatgggggccggcatcgagcctctgctcagagcactgctggcagactctatccccgaggataccctgtgctggatcccagtcgccgacgcctccagcagtatgtcccctttgccaggggttctggccaggcccgaggcctgtcacccatgagactgcgagatccagagcccgagaagaggcacgggggccatgtgggggctggcctgcttcactcccccaaactcaaggaactcaccaaggcccatgagctggaggtgaggctgcacactttcagcatgtttgggatgccccggctgccccctgaggaccggcggcactgggagataggagagggtggcgacagtggcctgaccatcgagaagtcctggagggagctggtgcctgggcacaaggagatgagccaggagctctgccaccaacaggaggccctgtgggagctcctgaccaccgagctgatctacgtgagaaagctcaagatcatgactgatctgctagccgccggcctgctgaacctgcagcgagtgggactgctgatggaagtgtcagctgagaccctgtttggaaatgtccccagcctgattcgaacccaccggagcttttgggatgaggtgctggggcccaccctggaggagactcgggcctcgggccagcctctggaccccattggtctgcaaagtggcttcctgacgtttggccagcggttccacccctatgtccagtactgcctccgagtgaagcagaccatggcttacgcccgagaacagcaagaaactaaccctctcttccatgccttcgtgcagtggtgtgagaagcacaagcgctctgggaggcagatgctctgtgacttgcttatcaagccccaccagcgcatcaccaagtacccactgctgctccatgctgtgctcaagaggagccccgaggcacgagcccaagaggccctgaatgccatgattgaagccgtggagtcattcctgcgacacatcaatgggcaggtccgccagggcgaagagcaagagagcttggcggctgcagcacaacgcatcgggccctacgaggtgctggagccacccagtgatgaggtggagaagaacctgcgcccattctccaccctggacctgacgtcccccatgctgggggttgcatctgagcacaccagacagctgctgctggaggggcctgtgcgagtgaaggagggacgagaagggaagctggacgtgtacctgttcctcttctctgatgtgctccttgtgaccaagccccagcgcaaggcggacaaagccaaggtcatccgaccccctctcatgctggagaagctcgtgtgccaacccctgcgagaccccaacagcttcctgctgatccacctcactgaattccagtgtgtctccagcgccctccttgtgcactgtcccagtcctacagaccgtgcccagtggctggagaagacccagcaggcccaggccgccctacagaagctgaaggcagaggagtatgttcaacagaagagggagctcctgaccctctatcgggaccaggacagggagtcccccagcaccaggccctccacgccttccctggagggctctcagagcagcgcagaggggaggactcctgagttctcgaccattatcccccacctggtggtgacagaagacacagatgaagatgctccccttgtgccagatgatacctcagactctggctacggcactttgatcccaggcacccccacggggtcccgctccccactgagccgtctacgccaaagagcccttcggcgggaccctcgcctcaccttctccaccctggaactccgggacatccctctgcgtccccaccctcccgacccccaagctcctcaacgccgaagcgcccccgaactgccggaaggaatcctaaaaggaggcagtcttccccaggaagacccaccaacctggtctgaggaagaagatggggcctccgagcgagggaatgtggtggtggaaacactccacagggcccggcttcggggccagcttccctcctccccaacccatgctgactctgccggggaaagcccctgggagtcctcaggggaggaggaagaagaggggcctctgttcctgaaagctggccacacatccctgcgcccaatgcgggctgaggacatgctcagagagatccgggaggagctggccagccaaaggattgagggggccgaggagccccgggacagcaggccacggaagctgactcgggcccagctgcagaggatgcgggggccccacatcattcagctggacacccctctgtccgcatcagaggtatgaggaatgcagaggacctttggcatgcatctctcccagaggagatctctccccagtagtgctggtcaccctccggcatctgtgactctacctcaaggaccacatttcccaaaggaagcctggcccaggcaccctgcctcctgctctgtttggggatcaagaactgtaaatttatgtatcataggtgcacctgagccccacagaaagttgtgcataaaaatgactgccctggctgggcatggctgcctgtaatcccagcactttgggaggctgaggtgggaggatcccttgagcccaggagttccagaccagcctgggcaatatagggaaaccctgtctttacaaaaaaaaattttaaaaatt

SEQ ID NO: 22745 - DNA, 1424 bp, Homo sapiens
  source 1..1424: mol_type = unassigned DNA
aaaagaatgtaggaaggaaggaaggaacgaatgaacatgggagcgcagaggggaggaggagagaggctggggtggattcagtttcagactggacaatctgatgtgccccagagagggaggcagagcctccaccatccatcagaagacagaaaaagcctttggccagctactgtgccagccactgggagagcccaagatacagcatcccctgaaggccgccctacagaagctgaaggcagaggagtatgttcaacagaagagggagctcctgaccctctatcgggaccaggacagggagtcccccagcaccaggccctccacgccttccctggagggctctcagagcagcgcagaggggaggactcctgagttctcgaccattatcccccacctggtggtgacagaagacacagatgaagatgctccccttgtgccagatgatacctcagactctggctacggcactttgatcccaggcacccccacggggtcccgctccccactgagccgtctacgccaaagagcccttcggcgggaccctcgcctcaccttctccaccctggaactccgggacatccctctgcgtccccaccctcccgacccccaagctcctcaacgccgaagcgcccccgaactgccggaaggaatcctaaaaggaggcagtcttccccaggaagacccaccaacctggtctgaggaagaagatggggcctccgagcgagggaatgtggtggtggaaacactccacagggcccggcttcggggccagcttccctcctccccaacccatgctgactctgccggggaaagcccctgggagtcctcaggggaggaggaagaagaggggcctctgttcctgaaagctggccacacatccctgcgcccaatgcgggctgaggacatgctcagagagatccgggaggagctggccagccaaaggattgagggggccgaggagccccgggacagcaggccacggaagctgactcgggcccagctgcagaggatgcgggggccccacatcattcagctggacacccctctgtccgcatcagaggtatgaggaatgcagaggacctttggcatgcatctctcccagaggagatctctccccagtagtgctggtcaccctccggcatctgtgactctacctcaaggaccacatttcccaaaggaagcctggcccaggcaccctgcctcctgctctgtttggggatcaagaactgtaaatttatgtatcataggtgcacctgagccccacagaaagttgtgcataaaaatgactgccctggctgggcatggctgcctgtaatcccagcactttgggaggctgaggtgggaggatcccttgagcccaggagttccagaccagcctgggcaatatagggaaaccctgtctttacaaaaaaaaattttaaaaatta

SEQ ID NO: 22746 - DNA, 2963 bp, Homo sapiens
  source 1..2963: mol_type = unassigned DNA
ctggcctcccgaaggcgggaggaggggagccgggggctgggctgagacaggaccctgggtagggagcagtgcgagggagacagcgccctcagagggaggactattgggaggcggcaggagggacagcgaacgtttcctcctctgctcctgaatcggaggaagccctaggggacctctttctcctggacattgaagatatggccctttggaggtgacccaggagagaagggatgaaggcctttggtcctccacatgagggccccctccaaggactcgtggcctcccgcattgagacttatgggggccggcatcgagcctctgctcagagcactgctggcagactctatccccgaggataccctgtgctggatcccagtcgccgacgcctccagcagtatgtcccctttgccaggggttctggccaggcccgaggcctgtcacccatgagactgcgagatccagagcccgagaagaggcacgggggccatgtgggggctggcctgcttcactcccccaaactcaaggaactcaccaaggcccatgagctggaggtgaggctgcacactttcagcatgtttgggatgccccggctgccccctgaggaccggcggcactgggagataggagagggtggcgacagtggcctgaccatcgagaagtcctggagggagctggtgcctgggcacaaggagatgagccaggagctctgccaccaacaggaggccctgtgggagctcctgaccaccgagctgatctacgtgagaaagctcaagatcatgactgatctgctagccgccggcctgctgaacctgcagcgagtgggactgctgatggaagtgtcagctgagaccctgtttggaaatgtccccagcctgattcgaacccaccggagcttttgggatgaggtgctggggcccaccctggaggagactcgggcctcgggccagcctctggaccccattggtctgcaaagtggcttcctgacgtttggccagcggttccacccctatgtccagtactgcctccgagtgaagcagaccatggcttacgcccgagaacagcaagaaactaaccctctcttccatgccttcgtgcagtggtgtgagaagcacaagcgctctgggaggcagatgctctgtgacttgcttatcaagccccaccagcgcatcaccaagtacccactgctgctccatgctgtgctcaagaggagccccgaggcacgagcccaagaggccctgaatgccatgattgaagccgtggagtcattcctgcgacacatcaatgggcaggtccgccagggcgaagagcaagagagcttggcggctgcagcacaacgcatcgggccctacgaggtgctggagccacccagtgatgaggtggagaagaacctgcgcccattctccaccctggacctgacgtcccccatgctgggggttgcatctgagcacaccagacagctgctgctggaggggcctgtgcgagtgaaggagggacgagaagggaagctggacgtgtacctgttcctcttctctgatgtgctccttgtgaccaagccccagcgcaaggcggacaaagccaaggtcatccgaccccctctcatgctggagaagctcgtgtgccaacccctgcgagaccccaacagcttcctgctgatccacctcactgaattccagtgtgtctccagcgccctccttgtgcactgtcccagtcctacagaccgtgcccagtggctggagaagacccagcaggcccaggccgccctacagaagctgaaggcagaggagtatgttcaacagaagagggagctcctgaccctctatcgggaccaggacagggagtcccccagcaccaggccctccacgccttccctggagggctctcagagcagcgcagaggggaggactcctgagttctcgaccattatcccccacctggtggtgacagaagacacagatgaagatgctccccttgtgccagatgatacctcagactctggctacggcactttgatcccaggcacccccacggggtcccgctccccactgagccgtctacgccaaagagcccttcggcgggaccctcgcctcaccttctccaccctggaactccgggacatccctctgcgtccccaccctcccgacccccaagctcctcaacgccgaagcgcccccgaactgccggaaggaatcctaaaaggaggcagtcttccccaggaagacccaccaacctggtctgaggaagaagatggggcctccgagcgagggaatgtggtggtggaaacactccacagggcccggcttcggggccagcttccctcctccccaacccatgctgactctgccggggaaagcccctgggagtcctcaggggaggaggaagaagaggggcctctgttcctgaaagctggccacacatccctgcgcccaatgcgggctgaggacatgctcagagagatccgggaggagctggccagccaaaggattgagggggccgaggagccccgggacagcaggccacggaagctgactcgggcccagctgcagaggatgcgggggccccacatcattcagctggacacccctctgtccgcatcagaggtatgaggaatgcagaggacctttggcatgcatctctcccagaggagatctctccccagtagtgctggtcaccctccggcatctgtgactctacctcaaggaccacatttcccaaaggaagcctggcccaggcaccctgcctcctgctctgtttggggatcaagaactgtaaatttatgtatcataggtgcacctgagccccacagaaagttgtgcataaaaatgactgccctggctgggcatggctgcctgtaatcccagcactttgggaggctgaggtgggaggatcccttgagcccaggagttccagaccagcctgggcaatatagggaaaccctgtctttacaaaaaaaaattttaaaaatt

SEQ ID NO: 22747 - DNA, 3111 bp, Homo sapiens
  source 1..3111: mol_type = unassigned DNA
atcaaaccccagagctggcgcctcccaggctcccgcctctgcttggcaggagtttgaggccttcctgagatctgcctctccctgagtcaggatgaagatgagcaaaggttcagggtgtccctactcctccagtggtgggtagggacaggagggtgcctgccttggctccacccctggctccacctgcctggctctcctccagtcctaaccaagcagaggggtgtggaagccaggtctgtccctcagcctgcaggtttcccctccaccttgaggacagttctgcttgtggctgggacatcccctgcctcaatgcacgataattttgcctttggagatgggactttcctaggctgtgggtgagaagggagactagaaagtatgtggggtaattcaggccacaggcaaatgaaggaatgtgaccaggcctgccctgggaggagctgtgtggctgtggcttcagcctttcacacagaagggcagccactcccagctggatgggatgcaggctgcacgcccctggggagaaggctgcacatgatcccagtcgccgacgcctccagcagtatgtcccctttgccaggggttctggccaggcccgaggcctgtcacccatgagactgcgagatccagagcccgagaagaggcacgggggccatgtgggggctggcctgcttcactcccccaaactcaaggaactcaccaaggcccatgagctggaggtgaggctgcacactttcagcatgtttgggatgccccggctgccccctgaggaccggcggcactgggagataggagagggtggcgacagtggcctgaccatcgagaagtcctggagggagctggtgcctgggcacaaggagatgagccaggagctctgccaccaacaggaggccctgtgggagctcctgaccaccgagctgatctacgtgagaaagctcaagatcatgactgatctgctagccgccggcctgctgaacctgcagcgagtgggactgctgatggaagtgtcagctgagaccctgtttggaaatgtccccagcctgattcgaacccaccggagcttttgggatgaggtgctggggcccaccctggaggagactcgggcctcgggccagcctctggaccccattggtctgcaaagtggcttcctgacgtttggccagcggttccacccctatgtccagtactgcctccgagtgaagcagaccatggcttacgcccgagaacagcaagaaactaaccctctcttccatgccttcgtgcagtggtgtgagaagcacaagcgctctgggaggcagatgctctgtgacttgcttatcaagccccaccagcgcatcaccaagtacccactgctgctccatgctgtgctcaagaggagccccgaggcacgagcccaagaggccctgaatgccatgattgaagccgtggagtcattcctgcgacacatcaatgggcaggtccgccagggcgaagagcaagagagcttggcggctgcagcacaacgcatcgggccctacgaggtgctggagccacccagtgatgaggtggagaagaacctgcgcccattctccaccctggacctgacgtcccccatgctgggggttgcatctgagcacaccagacagctgctgctggaggggcctgtgcgagtgaaggagggacgagaagggaagctggacgtgtacctgttcctcttctctgatgtgctccttgtgaccaagccccagcgcaaggcggacaaagccaaggtcatccgaccccctctcatgctggagaagctcgtgtgccaacccctgcgagaccccaacagcttcctgctgatccacctcactgaattccagtgtgtctccagcgccctccttgtgcactgtcccagtcctacagaccgtgcccagtggctggagaagacccagcaggcccaggccgccctacagaagctgaaggcagaggagtatgttcaacagaagagggagctcctgaccctctatcgggaccaggacagggagtcccccagcaccaggccctccacgccttccctggagggctctcagagcagcgcagaggggaggactcctgagttctcgaccattatcccccacctggtggtgacagaagacacagatgaagatgctccccttgtgccagatgatacctcagactctggctacggcactttgatcccaggcacccccacggggtcccgctccccactgagccgtctacgccaaagagcccttcggcgggaccctcgcctcaccttctccaccctggaactccgggacatccctctgcgtccccaccctcccgacccccaagctcctcaacgccgaagcgcccccgaactgccggaaggaatcctaaaaggaggcagtcttccccaggaagacccaccaacctggtctgaggaagaagatggggcctccgagcgagggaatgtggtggtggaaacactccacagggcccggcttcggggccagcttccctcctccccaacccatgctgactctgccggggaaagcccctgggagtcctcaggggaggaggaagaagaggggcctctgttcctgaaagctggccacacatccctgcgcccaatgcgggctgaggacatgctcagagagatccgggaggagctggccagccaaaggattgagggggccgaggagccccgggacagcaggccacggaagctgactcgggcccagctgcagaggatgcgggggccccacatcattcagctggacacccctctgtccgcatcagaggtatgaggaatgcagaggacctttggcatgcatctctcccagaggagatctctccccagtagtgctggtcaccctccggcatctgtgactctacctcaaggaccacatttcccaaaggaagcctggcccaggcaccctgcctcctgctctgtttggggatcaagaactgtaaatttatgtatcataggtgcacctgagccccacagaaagttgtgcataaaaatgactgccctggctgggcatggctgcctgtaatcccagcactttgggaggctgaggtgggaggatcccttgagcccaggagttccagaccagcctgggcaatatagggaaaccctgtctttac

SEQ ID NO: 22748 - DNA, 6981 bp, Homo sapiens
  source 1..6981: mol_type = unassigned DNA
gagctcggcttgaggcgggcgcgggctgagagtccggggatcccgggggccagtcgcggccgggacatcgggcgctgcggccggggacccgctgctgagatagacagaatatggcagagctttctgagccagagggaccagtagattggaaggaacgatgtgtagctctggagtcccaactcatgaaatttagagttcaagcaagcaagatacgagagcttttagcagagaagatgcaacagcttgagagacaagttattgatgctgaacgtcaagcagaaaaagcttttcaacaggtacaagttatggaagataaattaaaagcagctaatattcaaaccagtgaatcagagacaagattatataataagtgtcaagatctggagtcgctaatacaggaaaaagatgacgtcattcaaaacttggaattgcaacttgaagagcagaaacaaataagaatacaagaagctaaaataatagaagagaaagcagctaagataaaagaatgggtaacagttaagttaaatgagctggaattggagaatcagaatcttcgtttgatcaaccaaaaccaaactgaagagataagaacaatgcagtcaaaactacaagaagttcaaggaaagaagtcatccactgtctctacactaaagctttcggaaggccagcgcctgagcagtttgacctttgggtgctttttatctcgagcaaggagtcctcctcaagtagtaaaatctgaggaaatgagcaagatatcatcgaaagaacctgagttcactgaaggaaaagacatggaagaaatggaaattccagaaaagtctgttgataaccaagttctagaaaacaacagaggccagagaacattgcatcaaaccccttgtggctcagaacagaatcggaaaacaagaacaagctttgccacagatggtggcatctcccagaattctggggctcctgtgagtgactggagctctgatgaggaagacgggagcaaaggaagatccaagtccagatgcacatccaccctctccagtcacacatctgaggaaggggtccagtgtagcaggatgggaagtgaaatgtatctgacagcatctgatgacagcagctctatatttgaggaagagacttttggcataaagagaccagaacacaagaagctatattcttggcagcaggaggcacagtggaaagctctaaatagtcctcttggaaagggaaattctgaattaagtaaaaaggaacaagatagttcctcggatgaactgaataaaaaatttcaatcccagagactcgattattcatcttcatcgagtgaagccaacaccccaagccctattttgaccccagctttaatgccaaagcatcctaactcactctctggaaaaggaacacaattagtgccttcatcacacctgccacccccaaagttaaggattcctaatgttttcagtataagtgtagcactagccaaaaggcacttaagccagccacagttaagctctgacaggatgtttggtacaaatagaaacgctataagcatgatacgaccactgagacctcaggaaactgatcttgatctagttgatggagacagtacagaagttttagagaatatggacacgagttgtgatgatggattattttcctatgactccttggactctccaaattcagatgaccaggaacactgtgactcagcaaagaaggtggcatacagcaaacctccaactcctcccctgcaccgttttccttcttgggaaagcagaatttatgctgtagccaaatcaggtattcgaatgtctgaggccttcaatatggagagtgttaataaaaattctgctgcaaccctttcctatactacatcaggactttatacatctctgatatacaagaacatgaccaccccagtgtatacaactttgaaggggaaggcgacccaaataagtagcagccctttcctggatgactcatctgggtcagaggaagaagacagctccagatccagctcccggacgtcagagtcagactcacgcagtaggagtgggccaggcagccccagagccatgaaacgaggtgtgtctctctcctctgtggcttctgaaagtgattatgctattcctcctgatgcttactccacagacacggagtactcacagccagagcagaagctcccaaaaacttgctcatcttccagtgataatgggaaaaatgaaccactggaaaaatctggttatttattaaaaatgagtggtaaagtcaagtcttggaagcggcggtggtttgttcttaaaggtggtgaattactttactacaaatctccgagtgatgtaattagaaaaccccagggccatattgaacttagtgcatcctgtagtattttaagaggagataacaaacaaacagttcagttgaccactgaaaaacacacatactatctgactgcagattctcccaatatattggaagagtggattaaagtgttacagaatgttcttcgagtacaagctgccaacccactttccctgcagcctgagggcaaacccaccatgaagggattgctcactaaggtaaaacatggatattccaagagagtctggtgtacactaataggaaagacattatattattttcggagtcaagaagataagtttcctttaggtcagatcaaactctgggaggctaaagtggaagaggttgacagatcttgtgattcagatgaagattatgaagccagtggacgaagtctgttatccacacattatactatcgttatccatcccaaagaccaaggtccaacttacctcctaattggatccaagcatgaaaaggacacttggctttatcatctgactgttgcagctggaagcaacaatgtaaacgttggatctgaatttgaacaactggtttgcaaattgctaaatatagacggggagccttcctctcagatatggagacaccccactttgtgtcacagtaaagaaggaatcatttcccctctgacaactctaccttccgaagccctgcagacagaagctattaaattatttaagacctgccagctttttataaatgctgcagttgactctcctgcaattgattaccacatatctttagcccagagtgctttgcaaatctgcctgacacatcctgagctgcagaatgaaatttgctgtcagcttattaaacagacaagacgaagacagccacagaatcaaccaggaccattgcagggctggcagctcttggcactctgcgttgggctcttccttccccatcatcctttcctgtggctcctcaggcttcacctaaagaggaatgcagattccaggacagaatttggaaaatatgccatttactgccagcgttgtgtagaaagaacgcaacaaaatggtgacagagaagcaagaccctcaaggatggaaattctttcaactcttctccgaaacccttatcaccattctttgccctttagtatacctgtgcacttcatgaatgggatataccaggtagttggttttgacgcatctaccacagtggaagaatttttgaatactttgaaccaggacacaggaatgaggaaaccagcgcagtctggatttgcgttgttcactgacgatccttctggcagagatttagagcattgtcttcaaggaaacatcaagatttgtgacattatttccaaatgggaacaggcttccaaagaacagcagcctggaaaatgtgaaggtacaaggactgttcgtctgacatacaaaaacagactatatttctcagtgcaagctcgtggagagactgatagagaaaagttgctgttaatgtatcagacaaatgatcaaatcataaatggactttttcctctgaacaaagatctggcattagaaatggcagctcttttatctcaggtagagattggagattttgaaagacctttctcaactccagcagggcatgttaccaatcagtgcaaagtgaatcaaactctaaagcaagtcatagagaaattttatcctaaaaggtatagagatggctgttctgaagagcagttaaggcagctttgccagcgactttcaaccagatggatggccctccggggacacagtgctgctgactgtgtgcgcatttatttgacagtagccaggaagtggccattctttggtgccaagttgtttcttgcaaaacccataactccatcatcacttggaagtactttcttgtggctggctgtacatgaggatggtttaagcctcttagaatacaactccatgaggttaatagtcagctatgtgtacaagagtctaatgacctttggaggctatcaagatgattttatggtagtcattaacaatacacattcaaaggacaaaccaacagagaaattactttttgccatggcaaaacccaagattcttgaaatcactcttttgatcgccagttacataaacaacttccatcagcaaaaggcagcatttcaccacctctctgctccagcactgctctcagcccagacccggggaccccaagccagaatgatgggaagccagcctcttctgtcaagcagcagaccgaccaaaggccccaccttactctgaaagctggggagcctgaacattcactccttgtcctccatgctgtggctgtatcagctccctacaagttcgtttacacctggcagcacggcagccacacaccggtattccaaaccttaacaatgaagggggttagtctcttttatttgattcttaaatattcaaataaatattaacagtaaaacataaacacaaaatttgccaacacactaattttcttatagagtaaatgagtaagaattcatcattttttccatctcccttctcccttgtcatcagacacattgtgcaatgtggcttttcttttcttttctttttttcccctttttaatattctggcaatctttagaaagggagattccaaactcccatttggtaaaccagttgattatttggaaatgttcactgccaaaatagtaagtgctataactaaatgcgcttttaattaatgatatagtgtttggaaaggagtagaacatgcagcataagaaactgctgcagagtggtgcgaggagtacattttcagagcaggtgcagtacatcttccggctctatgaatcattatgtgagaaagcaggataacattaggtaacctgagcctcctgtgtggtattagaaagtataccgtcaccttttcacatcactggagtgtaaaatttaaaacaagatggtgattcctgacattccttggctgtcagtgctgcccagattcagaagaatattgcccacatttcactgtatttggtgctgggtcattttgaccttgctttgttaataatatctttaaaaacaaagacaatccttaaagctttgctcctcacacattaccttctaattatagtttgaaaatagattccctacacatacatacatatgtatgcacagatagggtcttgctatgttgcccaggctggtcttgaactcctggcctcaagcaatcctctctcctcagcctcccaaagtgctgggattacaagtgtgagccaccacacctggctccagaaattttattttatttttttgaggcagggtctcactctggttgcccaggctggagtgcagtggtgccatcatagctcactgtagcctcgaccttccgggatcaagcaatcccacttcagcctcttgaatagctgggactagaagcatgcaccaccatgcccatctaatatttgtatttttagtagagacaggatctccctatgttgtccagcctagtctcaaactcctgggttcaagcaatcctcccacctcggcctcccaaagtgctgggattgcaggcatgagccaccgtgcccagcctcaaaaatattttttaaaagaaaagagaaaataattcttctgtcaaaggaggttaaattttagttgatagagtacttaaatgcattactttattaggttatgtaagtggtcagtgcattccagtatgtgtcacaacagtgtagttcatattcatgataaaaatgaaactgtgataagacatgaaaattatattattaaaatgttcaattgtaatggtaatcatgagtatacttaattttatttatgtatagaatatttgtatttattttttggacatatatttatcactttgtcattttttttaaccaatttgagaaatgttagctgctgaattaatttgttgcccgagccttcatattttcttctttgctgccttctccctgtggcaatgtactgttctcacattaagccttttaaaaatgttccatactgtattagcatccttagaagggacagaactaagaaatacattgctcaaataatattttactttattgataatgacaaaaagaatattttttaaaccccatcaaaatagatttcaattgactgtttcccctacatcttttgagccacagtcgcccatcgaataagcaaatttgtttttgagaataaactggtaaccagtttgtgatgactctcagaagccttttggctgggttacagaagagtttctaagttcctagagagccatttaataattagttggtgagccagaggcttgacagagctgttacttatgtgtgagggctttattctcaggcagtagtttattcatcatttggtaagcccctccccacactcctctaatttaaacaagtagtgaaggcttatcttaaactgtgtagtaccttagacttggcatttatttttgatagagcagagataaaatattttgatggaaggaaatcaattttctgtaactgatgatgtgaaaattttattttctgggaaattatatagccattcaaaaattcaaagtatgttattatgattggttacaagagaataatgttacatgtttaattgtaatatttgtctcctatcattttcttccctttcagtcataataaatgatttacaaaaccca

SEQ ID NO: 22749 - DNA, 4995 bp, Homo sapiens
  source 1..4995: mol_type = unassigned DNA
agaccgcatcgtcggctcggaggctgaggggctgccgcggccgggagcgcccctcgcctcgctcctcgctccgcttggtgtcatgtgattctctgagggagcagctgcgtgagtggagatgctttcagtggtggagaatggactggacccccaggctgccatcccgacacatcatctcagagttggagcacctgacgtttgtcaacacggatgtgggccgctgccgggcatggctgcggctggccctgaacgatggcctgatggagtgctacctgaagctgctgctgcaggagcaggcccgcttgcatgagtactaccagcccaccgccctgctccgggatgctgaggagggcgagttcctccttagcttcctgcagggcctcacgtccttgtccttcgaactctcctacaagtctgccatcttaaatgagtggacgctcaccccattggccctgtctgggctttgcccgctttctgagctggaccctctctctacctctggtgcagaactacagcggaaggaatctctggattccatttcccattcttcaggctctgaagacatcgaagtccatcactcgggccataagatacggaggaaccagaagctgactgcctcctccctcagcctggacacggccagttcatcccagctgtcctgcagcctaaactctgatagctgcttactccaagagaatggctccaagagtccagaccattgcgaggagcccatgtcctgtgactcagacctgggcacagcaaatgctgaggactcagaccggtctctgcaagaggtattgttggaattcagcaaagcccaggtaaactctgtgccaaccaacggactgagccaagaaacagagatccccacaccacaggcctcgctctccctccatggcctcaacaccagcacatacctgcactgtgaggcacctgcagagccccttcctgcccaggcagcctctggaactcaagatggtgtccacgtgcaggagccgcgtccccaggcgcccagccccctggacttacagcagcctgtagagagcacctcaggccagcagccttctagtactgtcagcgagacagccagagaagtgggccaagggaatggcctgcagaaggcccaggctcatgacggagctggtctgaagctggtagtttcctcacccaccagtccgaaaaacaagagctggatctcagaggatgacttctaccggccttcccgggagcaacccctggagagtgcttcagaccacccaatagcttcttacagggggactccagggtcaaggcctggtctccacaggcatttttctcaagaaccaagaaaaaactgctccctgggggcgttagaccaagcgtgtgtaccttccccaggaagaaggcaagcccaggcagccccatcccaggggcataagagcttccgggtggtacaccggagacagatgggactgtccaacccattccggggtctcatgaagctgggcaccgtggagcggcggggggcaatgggcatctggaaggagctcttctgcgagctctccccgctggagttccgcctctacctgagcaacgaggagcacacctgtgtggagaactgctcgctgcttcgctgtgagtctgtggggccagcccatagtgatgggcgctttgagctggtcttctctggcaagaagctggccctgcgcgcctcctcccaggacgaagctgaggactggctggaccgggtgcgggaggccctgcagaaggtccggcctcagcaggaggatgagtgggtgaacgtgcagtacccagaccagcctgaggaaccccccgaggcgccccagggctgcctctctccctcagacctgctctcggagcccgcggccctccagggcacacagtttgactggtcgtccgcccaggttccagagccagatgccatcaaggagtccctgctgtacttgtacatggacaggacctggatgccctatatattttctctgtccttggaggctctgaaatgtttccgcatcaggaacaatgagaagatgctgagtgacagccacggcgtggagaccatccgggacatcctgccagacaccagccttgggggcccatccttcttcaaaatcatcacggccaaggctgtcctgaagctgcaggccggaaacgccgaggaagccgccctgtggagggatctggtccgcaaagtcctggcatcctacttggagacagccgaggaggcggtgaccctgggcgggagcctggatgaaaactgtcaggaggtgctgaaatttgccacccgggagaatggcttcctgctgcagtacctggtggctatccccatggagaaaggccttgactcccaaggctgcttctgcgcaggctgctcccggcagatcggcttctcctttgtacgacccaagctctgtgccttctctggcctctattactgtgacatctgccaccaagacgatgcctcagtgattccggccaggatcatccacaactgggacctcaccaagcgcccgatctgcaggcaggccctgaagtttctgacacagatccgggcccagcccctcatcaacctgcagatggtgaacgcgtctctgtacgagcatgtggagcggatgcacctcattgggaggagacgggagcagctgaagctcctgggggattacctgggcctgtgccggagtggcgccctgaaggagctcagcaagaggctcaaccacaggaattatctcttggaatctccgcataggttcagtgttgctgacctccaacagatcgcagacggggtgtatgaaggattcctcaaggccctgattgaatttgcctcccagcatgtctaccactgcgacctgtgcacccagcgcggcttcatctgccagatctgccagcaccacgacatcatcttcccctttgagtttgacaccacagtcaggtgtgccgagtgcaagaccgtcttccaccagagctgccaggctgtggtgaagaagggctgcccccgctgtgcccgccggcgcaagtaccaggaacagaacattttcgcctgatgcccatctgctgaccccgctctgaaagccgggggtgagtgtggctcagccatcccggctgggtttgccatcagcccaggatactcaccgtgtcacagctgtgtccccttgtcaggaagaccctcagatgtggccagagcaccggcctcccagagaaagcccaggaagtccccgtggtgtcccctggccctccccccacccctctgctgcaggaggcgtggccaccaccagatgctccctgtctggggcaggcagggccgtttactcaccaggccctggctcaccagcgtcccggcgcctccgttagggctgcccaaacactgtggaaaggggacttggggagcattttcaattccacattcctgattaaaaggtctagttttttaaggtgggtttttcccattcatatttcaacagaaagtatttttttattcttgaccctacgtgagtcacccatgaaatccagacattctcacccccagcggatgcacaggagccactcaggcctggcttagaggtagcgggtggctggtgggcaggccactgctgggacagggtctatgggcccacccagtgcctttccttggccctcactgccagtgccaaaccgcccctcagcagggcagggccagtcctggcgaccccggttcctctgtgtcctctttactccccaccccagtgcgtctcgcctgctgagcccaccgctttctcagcgtcagagcccctagctcttctctagcctggggccttggccccattaggagaaggagaaatgactggaaaccagcactgtcagcactttgagccctcctcggtttatggagggtcgccgtcttgcccacccccgatccccgtgcgctcctcacccctctacagacaggggcgctgctgcagatgctccaggcccaccttggtgggtgcccggggtcacactctctgcctgactgacccctgccagggcacagataggcaggaccccagagagggcaggcagccacgccctgcactgtggagaagtgacctggtcctaagctgtgcagggcgtgcgggggaactgccctgtggatgcagccaccacctcacaaagccatgaattcccaaagcatcactgaacttgcccagccgggacactggagactgaagaagttccccggagcaggactgcctttgaaggggccttggggctggggtgggagtctggaattgttttcaaagtgatggtcagaccctccaggcttcggggaaatgtgggtttgctggtctctctgtcgccttcccccacctctcctggacctagcaggccctcagtcctagctgtcttacctgcgctcagcttggagtcaggcctcaggtggagagccgcatgtcactgtcagagatgagcccacccccacccttccctgggggcgattagctgctgagtcacccacccagccttggagctggatgcctgtgcagcagaacagaggcaacggtggcaggcaggtggaggctgcgcacagcttctcccggtcatggcacacacctgtgcccagacgccaatgcctcctaagccaggagctgggttatgcaccgccatggcccacattaacgctccaccacaagcccagcctagtcagagccctcattgccccatccctgagtgggcaggagcctggcctggggagggcttgggcctgtgaggattctccccgaaggtgccctcggaggcagcaggtttgaggccctggggggcccgttccccagaagctgccagtgctttcagatgcattgactcttcccgcctcccctccctcagaaaggtagtgcccacactatttttaaaatgttattttatgcaatacactgttcctagtgagcagggctctggccctgaggagtctttgcaatgtattgaaggaattgctgccgtgtgagttttgaatgattttgcagtaaagacctgatctttctc

SEQ ID NO: 22750 - DNA, 5298 bp, Homo sapiens
  source 1..5298: mol_type = unassigned DNA
aacgtgatggcgtcaggggccggggcgccgcttcctgttgtcagtggccgagagaccgcatcgtcggctcggaggctgaggggctgccgcggccgggagcgcccctcgcctcgctcctcgctccgcttggtgtcatgtgattctctgagggagcagctgcgtgagtggagatgctttcagtggtggagaatggactggacccccaggctgccatcccggtcatcaagaagaagctggtgggatccgtgaaggccttgcagaagcagtacgtgtccctggacacggtggtcactagtgaagacggagatgccaacaccatgtgcagcgccctggaggccgtatttatccatggcctgcacgccaagcacatccgagctgaggccggaggaaaaaggaagaaaagtgcccaccagaagcctctgccccagcctgtcttctggcccctcctgaaagctgtcacccacaaacacatcatctcagagttggagcacctgacgtttgtcaacacggatgtgggccgctgccgggcatggctgcggctggccctgaacgatggcctgatggagtgctacctgaagctgctgctgcaggagcaggcccgcttgcatgagtactaccagcccaccgccctgctccgggatgctgaggagggcgagttcctccttagcttcctgcagggcctcacgtccttgtccttcgaactctcctacaagtctgccatcttaaatgagtggacgctcaccccattggccctgtctgggctttgcccgctttctgagctggaccctctctctacctctggtgcagaactacagcggaaggaatctctggattccatttcccattcttcaggctctgaagacatcgaagtccatcactcgggccataagatacggaggaaccagaagctgactgcctcctccctcagcctggacacggccagttcatcccagctgtcctgcagcctaaactctgatagctgcttactccaagagaatggctccaagagtccagaccattgcgaggagcccatgtcctgtgactcagacctgggcacagcaaatgctgaggactcagaccggtctctgcaagaggtattgttggaattcagcaaagcccaggtaaactctgtgccaaccaacggactgagccaagaaacagagatccccacaccacaggcctcgctctccctccatggcctcaacaccagcacatacctgcactgtgaggcacctgcagagccccttcctgcccaggcagcctctggaactcaagatggtgtccacgtgcaggagccgcgtccccaggcgcccagccccctggacttacagcagcctgtagagagcacctcaggccagcagccttctagtactgtcagcgagacagccagagaagtgggccaagggaatggcctgcagaaggcccaggctcatgacggagctggtctgaagctggtagtttcctcacccaccagtccgaaaaacaagagctggatctcagaggatgacttctaccggccttcccgggagcaacccctggagagtgcttcagaccacccaatagcttcttacagggggactccagggtcaaggcctggtctccacaggcatttttctcaagaaccaagaaaaaactgctccctgggggcgttagaccaagcgtgtgtaccttccccaggaagaaggcaagcccaggcagccccatcccaggggcataagagcttccgggtggtacaccggagacagatgggactgtccaacccattccggggtctcatgaagctgggcaccgtggagcggcggggggcaatgggcatctggaaggagctcttctgcgagctctccccgctggagttccgcctctacctgagcaacgaggagcacacctgtgtggagaactgctcgctgcttcgctgtgagtctgtggggccagcccatagtgatgggcgctttgagctggtcttctctggcaagaagctggccctgcgcgcctcctcccaggacgaagctgaggactggctggaccgggtgcgggaggccctgcagaaggtccggcctcagcaggaggatgagtgggtgaacgtgcagtacccagaccagcctgaggaaccccccgaggcgccccagggctgcctctctccctcagacctgctctcggagcccgcggccctccagggcacacagtttgactggtcgtccgcccaggttccagagccagatgccatcaaggagtccctgctgtacttgtacatggacaggacctggatgccctatatattttctctgtccttggaggctctgaaatgtttccgcatcaggaacaatgagaagatgctgagtgacagccacggcgtggagaccatccgggacatcctgccagacaccagccttgggggcccatccttcttcaaaatcatcacggccaaggctgtcctgaagctgcaggccggaaacgccgaggaagccgccctgtggagggatctggtccgcaaagtcctggcatcctacttggagacagccgaggaggcggtgaccctgggcgggagcctggatgaaaactgtcaggaggtgctgaaatttgccacccgggagaatggcttcctgctgcagtacctggtggctatccccatggagaaaggccttgactcccaaggctgcttctgcgcaggctgctcccggcagatcggcttctcctttgtacgacccaagctctgtgccttctctggcctctattactgtgacatctgccaccaagacgatgcctcagtgattccggccaggatcatccacaactgggacctcaccaagcgcccgatctgcaggcaggccctgaagtttctgacacagatccgggcccagcccctcatcaacctgcagatggtgaacgcgtctctgtacgagcatgtggagcggatgcacctcattgggaggagacgggagcagctgaagctcctgggggattacctgggcctgtgccggagtggcgccctgaaggagctcagcaagaggctcaaccacaggaattatctcttggaatctccgcataggttcagtgttgctgacctccaacagatcgcagacggggtgtatgaaggattcctcaaggccctgattgaatttgcctcccagcatgtctaccactgcgacctgtgcacccagcgcggcttcatctgccagatctgccagcaccacgacatcatcttcccctttgagtttgacaccacagtcaggtgtgccgagtgcaagaccgtcttccaccagagctgccaggctgtggtgaagaagggctgcccccgctgtgcccgccggcgcaagtaccaggaacagaacattttcgcctgatgcccatctgctgaccccgctctgaaagccgggggtgagtgtggctcagccatcccggctgggtttgccatcagcccaggatactcaccgtgtcacagctgtgtccccttgtcaggaagaccctcagatgtggccagagcaccggcctcccagagaaagcccaggaagtccccgtggtgtcccctggccctccccccacccctctgctgcaggaggcgtggccaccaccagatgctccctgtctggggcaggcagggccgtttactcaccaggccctggctcaccagcgtcccggcgcctccgttagggctgcccaaacactgtggaaaggggacttggggagcattttcaattccacattcctgattaaaaggtctagttttttaaggtgggtttttcccattcatatttcaacagaaagtatttttttattcttgaccctacgtgagtcacccatgaaatccagacattctcacccccagcggatgcacaggagccactcaggcctggcttagaggtagcgggtggctggtgggcaggccactgctgggacagggtctatgggcccacccagtgcctttccttggccctcactgccagtgccaaaccgcccctcagcagggcagggccagtcctggcgaccccggttcctctgtgtcctctttactccccaccccagtgcgtctcgcctgctgagcccaccgctttctcagcgtcagagcccctagctcttctctagcctggggccttggccccattaggagaaggagaaatgactggaaaccagcactgtcagcactttgagccctcctcggtttatggagggtcgccgtcttgcccacccccgatccccgtgcgctcctcacccctctacagacaggggcgctgctgcagatgctccaggcccaccttggtgggtgcccggggtcacactctctgcctgactgacccctgccagggcacagataggcaggaccccagagagggcaggcagccacgccctgcactgtggagaagtgacctggtcctaagctgtgcagggcgtgcgggggaactgccctgtggatgcagccaccacctcacaaagccatgaattcccaaagcatcactgaacttgcccagccgggacactggagactgaagaagttccccggagcaggactgcctttgaaggggccttggggctggggtgggagtctggaattgttttcaaagtgatggtcagaccctccaggcttcggggaaatgtgggtttgctggtctctctgtcgccttcccccacctctcctggacctagcaggccctcagtcctagctgtcttacctgcgctcagcttggagtcaggcctcaggtggagagccgcatgtcactgtcagagatgagcccacccccacccttccctgggggcgattagctgctgagtcacccacccagccttggagctggatgcctgtgcagcagaacagaggcaacggtggcaggcaggtggaggctgcgcacagcttctcccggtcatggcacacacctgtgcccagacgccaatgcctcctaagccaggagctgggttatgcaccgccatggcccacattaacgctccaccacaagcccagcctagtcagagccctcattgccccatccctgagtgggcaggagcctggcctggggagggcttgggcctgtgaggattctccccgaaggtgccctcggaggcagcaggtttgaggccctggggggcccgttccccagaagctgccagtgctttcagatgcattgactcttcccgcctcccctccctcagaaaggtagtgcccacactatttttaaaatgttattttatgcaatacactgttcctagtgagcagggctctggccctgaggagtctttgcaatgtattgaaggaattgctgccgtgtgagttttgaatgattttgcagtaaagacctgatctttctcatc

SEQ ID NO: 22751 - DNA, 3118 bp, Homo sapiens
  source 1..3118: mol_type = unassigned DNA
acacaattcaggcagtggagagaaggccgtggggagtggctgaggagtccctcaagagaagaggttgctgttcactgatggtggagtgttttgagagtggtggaaccaggttatccctttcttcttttaacgtgtcatgtgattctctgagggagcagctgcgtgagtggagatgctttcagtggtggagaatggactggacccccaggctgccatcccgacacatcatctcagagttggagcacctgacgtttgtcaacacggatgtgggccgctgccgggcatggctgcggctggccctgaacgatggcctgatggagtgctacctgaagctgctgctgcaggagcaggcccgcttgcatgagtactaccagcccaccgccctgctccgggatgctgaggagggcgagttcctccttagcttcctgcagggcctcacgtccttgtccttcgaactctcctacaagtctgccatcttaaatgagtggacgctcaccccattggccctgtctgggctttgcccgctttctgagctggaccctctctctacctctggtgcagaactacagcggaaggaatctctggattccatttcccattcttcaggctctgaagacatcgaagtccatcactcgggccataagatacggaggaaccagaagctgactgcctcctccctcagcctggacacggccagttcatcccagctgtcctgcagcctaaactctgatagctgcttactccaagagaatggctccaagagtccagaccattgcgaggagcccatgtcctgtgactcagacctgggcacagcaaatgctgaggactcagaccggtctctgcaagaggtattgttggaattcagcaaagcccaggtaaactctgtgccaaccaacggactgagccaagaaacagagatccccacaccacaggcctcgctctccctccatggcctcaacaccagcacatacctgcactgtgaggcacctgcagagccccttcctgcccaggcagcctctggaactcaagatggtgtccacgtgcaggagccgcgtccccaggcgcccagccccctggacttacagcagcctgtagagagcacctcaggccagcagccttctagtactgtcagcgagacagccagagaagtgggccaagggaatggcctgcagaaggcccaggctcatgacggagctggtctgaagctggtagtttcctcacccaccagtccgaaaaacaagagctggatctcagaggatgacttctaccggccttcccgggagcaacccctggagagtgcttcagaccacccaatagcttcttacagggggactccagggtcaaggcctggtctccacaggcatttttctcaagaaccaagaaaaaactgctccctgggggcgttagaccaagcgtgtgtaccttccccaggaagaaggcaagcccaggcagccccatcccaggggcataagagcttccgggtggtacaccggagacagatgggactgtccaacccattccggggtctcatgaagctgggcaccgtggagcggcggggggcaatgggcatctggaaggagctcttctgcgagctctccccgctggagttccgcctctacctgagcaacgaggagcacacctgtgtggagaactgctcgctgcttcgctgtgagtctgtggggccagcccatagtgatgggcgctttgagctggtcttctctggcaagaagctggccctgcgcgcctcctcccaggacgaagctgaggactggctggaccgggtgcgggaggccctgcagaaggtccggcctcagcaggaggatgagtgggtgaacgtgcagtacccagaccagcctgaggaaccccccgaggcgccccagggctgcctctctccctcagacctgctctcggagcccgcggccctccagggcacacagtttgactggtcgtccgcccaggttccagagccagatgccatcaaggagtccctgctgtacttgtacatggacaggacctggatgccctatatattttctctgtccttggaggctctgaaatgtttccgcatcaggaacaatgagaagatgctgagtgacagccacggcgtggagaccatccgggacatcctgccagacaccagccttgggggcccatccttcttcaaaatcatcacggccaaggctgtcctgaagctgcaggccggaaacgccgaggaagccgccctgtggagggatctggtccgcaaagtcctggcatcctacttggagacagccgaggaggcggtgaccctgggcgggagcctggatgaaaactgtcaggaggtgctgaaatttgccacccgggagaatggcttcctgctgcagtacctggtggctatccccatggagaaaggccttgactcccaaggctgcttctgcgcaggctgctcccggcagatcggcttctcctttgtacgacccaagctctgtgccttctctggcctctattactgtgacatctgccaccaagacgatgcctcagtgattccggccaggatcatccacaactgggacctcaccaagcgcccgatctgcaggcaggccctgaagtttctgacacagatccgggcccagcccctcatcaacctgcagatggtgaacgcgtctctgtacgagcatgtggagcggatgcacctcattgggaggagacgggagcagctgaagctcctgggggattacctgggcctgtgccggagtggcgccctgaaggagctcagcaagaggctcaaccacaggaattatctcttggaatctccgcataggttcagtgttgctgacctccaacagatcgcagacggggtgtatgaaggattctccccgaaggtgccctcggaggcagcaggtttgaggccctggggggcccgttccccagaagctgccagtgctttcagatgcattgactcttcccgcctcccctccctcagaaaggtagtgcccacactatttttaaaatgttattttatgcaatacactgttcctagtgagcagggctctggccctgaggagtctttgcaatgtattgaaggaattgctgccgtgtgagttttgaatgattttgcagtaaagacctgatctttctc

SEQ ID NO: 22752 - DNA, 5781 bp, Homo sapiens
  source 1..5781: mol_type = unassigned DNA
gttgtttcctcctcctcctcctccgcctccgccgccgttgcttgaatggtggagccgaagctcggctcgtgaacacacactgacagctatagggcaggcggcggcaccgtccccgcttcccctcggcggcggggtgtcccgtcggcggccctgaagtgacccataaacatgtcttgtgagaggaaaggcctctcggagctgcgatcggagctctacttcctcatcgcccggttcctggaagatggaccctgtcagcaggcggctcaggtgctgatccgcgaggtggccgagaaggagctgctgccccggcgcaccgactggaccgggaaggagcatcccaggacctaccagaatctggtgaagtattacagacacttagcacctgatcacttgctgcaaatatgtcatcgactaggacctcttcttgaacaagaaattcctcaaagtgttcctggagtacaaactttattaggagctggaagacagtctttactacgcacaaataaaagctgcaagcatgttgtgtggaaaggatctgctctggctgcgttgcactgtggaagaccacctgagtcaccagttaactatggtagcccacccagcattgcggatactctgttttcaaggaagctgaatgggaaatacagacttgagcgacttgttccaactgcagtgtatcagcacatgaaaatgcataaacgaattcttggacacttgtcatctgtgtactgtgtaacttttgatcgaactggcagacggatatttactggttctgatgactgtcttgtgaaaatatgggcaacagatgatgggaggttgttagctaccttaagaggacatgctgctgaaatatcagacatggctgtaaactatgagaataccatgatagcagctggaagttgtgataaaatgatccgagtctggtgtcttcgaacctgtgcacctttggctgttcttcagggccatagtgcatctattacatcactacagttctcaccattgtgcagtggctcaaagagatatctatcttctactggggcagatggcactatttgtttttggctctgggatgctggaacccttaaaataaacccaagacctgcaaaatttacagagcgccctcggcctggagttcaaatgatctgttcttcttttagtgctggtggaatgtttctggcgacgggaagcacagatcatattattcgggtttatttttttggatcaggtcagccagagaaaatatcagaattggagtttcatactgacaaagttgacagtatccagttttccaacactagtaacaggtttgtaagtggcagtcgtgatgggacagcacgtatttggcaatttaaacgaagagagtggaagagcattttgttggatatggctactcgtccagcaggccaaaaccttcaaggaatagaagataaaatcacaaaaatgaaggttactatggtagcttgggatcgacatgacaatacagttataactgcagttaataacatgactctgaaagtttggaattcttacactggtcaactaattcatgtcctgatgggtcatgaagatgaggtatttgttcttgaaccacacccgttcgatcctagagttctcttttctgctggtcatgatggaaacgtgatagtgtgggatctggcaagaggagtcaaaatacgatcttatttcaatatgattgaaggccaaggacatggcgcagtatttgactgcaaatgctctcctgatggtcagcattttgcatgcacagactctcatggacatcttttaatttttggctttgggtccagtagcaaatatgacaagatagcagatcagatgttctttcatagtgattatcggccacttattcgtgatgccaacaattttgtattagatgaacagactcagcaagcacctcatcttatgcctcccccttttttggttgatgttgatggtaaccctcatccatcaagatatcaaagattagttcctggccgtgaaaattgcagggaggagcaactcatccctcagatgggagtaacttcctcaggactgaatcaagttttaagtcagcaagcaaaccaggagatcagcccactggacagcatgattcaaagactacaacaggagcaagacctgagacgttctggtgaagcagttatcagtaataccagccgtttaagtagaggctccataagttctacctcagaggttcattcaccaccaaacgtaggactaagacgtagtggacaaattgaaggtgtacggcaaatgcacagcaacgcaccaagaagtgaaatagccacagagcgggatctggtagcttggagtcgaagggtggtagtacccgagctatcagctggtgtagccagtaggcaagaagaatggagaactgcaaagggagaagaagaaataaagacttacaggtcagaagagaaaagaaaacacttaactgttccaaaagagaataaaatacccactgtctcaaagaatcatgctcatgagcatttcctggatcttggagaatccaaaaagcaacagacaaatcaacacaattatcgtacaagatctgcattggaagagactcctagaccctcagaagagatagaaaatggcagtagttcttcagatgaaggcgaagtagttgctgtcagtggtggaacatccgaagaagaagagagagcatggcacagtgatggcagttctagtgactactccagtgattactctgactggacagcagatgcaggaattaatctgcagccaccaaagaaagttcctaagaataaaaccaagaaagcagaaagcagttcagatgaagaagaagaatctgaaaaacagaagcaaaaacagattaaaaaggaaaagaaaaaagtaaatgaagaaaaagatggaccaatatcaccaaagaaaaagaagcccaaagaaagaaaacaaaagagattggctgtgggagaactaactgaaaatggtttgacattagaagaatggttgccatcaacatggattacagataccattccccgaagatgtccatttgtgccacagatgggtgatgaggtttattatttccgacaaggacatgaagcctatgtcgaaatggcccggaaaaataaaatatatagtatcaatcccaaaaaacaaccatggcataaaatggagctacgggaacaagaacttatgaaaatagttggcataaagtatgaagtgggattacctaccctttgctgccttaaacttgcttttctagatcctgatactggtaaactgactggcggatcatttaccatgaaataccatgatatgcctgacgttatagatttcctagtcttgagacaacaatttgatgatgcaaaatacaggcgatggaatataggtgaccgcttcaggtctgtcatagatgatgcctggtggtttggaacaatcgaaagccaggaacctcttcaacttgagtaccctgatagtctgtttcaatgctacaatgtttgctgggacaatggagatacagaaaagatgagtccttgggatatggagcttatacctaataatgctgtatttcctgaagaactaggtaccagtgttcctttaactgatggtgagtgcagatcactaatctataaacctcttgatggagaatggggtaccaatcccagggatgaagaatgtgaaagaattgtggcaggaataaaccagttgatgacactagatattgcctcagcatttgtggcccccgtggatctgcaagcctatcccatgtattgcacagtagtggcatatccaacggatctaagtacaattaaacaaagactggaaaacaggttttacaggcgggtttcttccctaatgtgggaagttcgatatatagagcataatacacgaacatttaatgagcctggaagccctattgtgaaatctgctaaattcgtgactgatcttcttctacattttataaaggatcagacttgttataacataattccactttataattcaatgaagaagaaagttttgtctgattctgaggatgaagagaaagatgctgatgtgccaggaacttctactcgaaaaaggaaggaccatcagcctagaagaagattacgtaatagagcccagtcttacgatattcaagcatggaagaaacagtgtgaagaattgttaaatctcatatttcaatgtgaagattcagagcctttccgtcagccggtagatctccttgaatatccagactacagagacatcattgacactccaatggattttgctaccgttagagaaactttagaggctgggaattatgagtcaccaatggagttatgtaaagatgtcagacttattttcagtaattccaaagcatatacaccaagcaaaagatcaaggatttacagcatgagtttgcgcctgtctgctttctttgaagaacacattagttcagttttatcagattataaatctgctcttcgttttcataaaagaaataccataaccaaaaggaggaagaaaagaaacagaagcagctctgtttccagtagtgctgcatcaagccctgaaaggaaaaaaaggatcttaaaaccccagctaaaatcagaaagctctacctctgcattctctacacctacacgatcaataccgccaagacacaatgctgctcagataaacggtaaaacagaatctagttctgtggttcgaaccagaagcaaccgagtggttgtagatccagttgtcactgagcaaccatctacttcttcagctgcaaagacttttattacaaaagctaatgcatctgcaataccagggaaaacaatactagagaattctgtgaaacattccaaagctttgaatactctttccagtcctggtcaatccagttttagtcatggcactaggaataattctgcaaaagaaaacatggaaaaggaaaagccagtcaaacgtaaaatgaagtcatctgtactcccaaaggcgtccactctttcaaagtcatcagctgtcattgagcaaggagattgtaagaacaacgctcttgtaccaggaaccattcaagtaaatggccatggaggacagccatcaaaacttgtgaagaggggacctggaaggaaacctaaagtagaagttaataccaatagtggtgaaattatacacaagaaaaggggtagaaagcccaaaaagctacagtatgcaaagccagaagatttagagcaaaataatgtgcatcccatcagagatgaagtacttccttcttcaacatgcaattttctttctgaaactaataatgtaaaggaagatttgttacagaaaaagaatcgtggaggtaggaagcccaaaaggaagatgaagacacaaaaattagatgcagatctcctagtccctgcaagtgtcaaagtgttaaggagaagtaaccgaaaaaagatagatgatcctatagatgaggaagaagagtttgaagaactcaaaggctctgaaccccacatgagaactagaaatcaaggtcgaaggacagctttctataatgaggatgactctgaagaggagcaaaggcagctgttgttcgaagacacctctttaacttttggaacttctagtagaggacgagtccgaaagttgactgaaaaagcaaaagctaatttaattggttggtaacttgtaccaaaatattttacttcaaaatctataaagcaggtacagttaaggaataagtagaactaaggcttctgcttccttgctgctgtggtggagtagggaatgttatgatttgatttgcaaaaaaaaaaaaaaaaaaaaaaacaa

SEQ ID NO: 22753 - DNA, 1896 bp, Homo sapiens
  source 1..1896: mol_type = unassigned DNA
tatatagagcataatacacgaacatttaatgagcctggaagccctattgtgaaatctgctaaattcgtgactgatcttcttctacattttataaaggatcagacttgttataacataattccactttataattcaatgaagaagaaagttttgtctgattctgaggatgaagagaaagatgctgatgtgccaggaacttctactcgaaaaaggaaggaccatcagcctagaagaagattacgtaatagagcccagtcttacgatattcaagcatggaagaaacagtgtgaagaattgttaaatctcatatttcaatgtgaagattcagagcctttccgtcagccggtagatctccttgaatatccagactacagagacatcattgacactccaatggattttgctaccgttagagaaactttagaggctgggaattatgagtcaccaatggagttatgtaaagatgtcagacttattttcagtaattccaaagcatatacaccaagcaaaagatcaaggatttacagcatgagtttgcgcctgtctgctttctttgaagaacacattagttcagttttatcagattataaatctgctcttcgttttcataaaagaaataccataaccaaaaggaggaagaaaagaaacagaagcagctctgtttccagtagtgctgcatcaagccctgaaaggaaaaaaaggatcttaaaaccccagctaaaatcagaaagctctacctctgcattctctacacctacacgatcaataccgccaagacacaatgctgctcagataaacggtaaaacagaatctagttctgtggttcgaaccagaagcaaccgagtggttgtagatccagttgtcactgagcaaccatctacttcttcagctgcaaagacttttattacaaaagctaatgcatctgcaataccagggaaaacaatactagagaattctgtgaaacattccaaagctttgaatactctttccagtcctggtcaatccagttttagtcatggcactaggaataattctgcaaaagaaaacatggaaaaggaaaagccagtcaaacgtaaaatgaagtcatctgtactcccaaaggcgtccactctttcaaagtcatcagctgtcattgagcaaggagattgtaagaacaacgctcttgtaccaggaaccattcaagtaaatggccatggaggacagccatcaaaacttgtgaagaggggacctggaaggaaacctaaagtagaagttaatatagtggtgaaattatacacaagaaaaggggtagaaagcccaaaaagctacagtatgcaaagccagaagatttagagcaaaataatgtgcatcccatcagagatgaagtacttccttcttcaacatgcaattttctttctgaaactaataatgtaaaggaagatttgttacagaaaaagaatcgtggaggtaggaagcccaaaaggaagatgaagacacaaaaattagatgcagatctcctagtccctgcaagtgtcaaagtgttaaggagaagtaaccgaaaaaagatagatgatcctatagatgaggaagaagagtttgaagaactcaaaggctctgaaccccacatgagaactagaaatcaaggtcgaaggacagctttctataatgaggatgactctgaagaggagcaaaggcagctgttgttcgaagacacctctttaacttttggaacttctagtagaggacgagtccgaaagttgactgaaaaagcaaaagctaatttaattggttggtaacttgtaccaaaatattttacttcaaaatctataaagcaggtacagttaaggaataagtagaactaaggcttctgcttccttgctgctgtggtggagtagggaatgttatgatttgatttgc

SEQ ID NO: 22754 - DNA, 8069 bp, Homo sapiens
  source 1..8069: mol_type = unassigned DNA
tttttttttttaagttattttctgtaatgcattttctgtgaatttattgtcttaaaaattggcaaatatggccattttgacatatttgccaaatatgagcatatggcaactatgctcttaatttgttaagtcaccaactgttggtggtaactgttgaaataacaagagcaaagttatcaccaatctacgggatccttacactactgatattttcaataatgcaccgtagtcagacattgtagacttaacctctgagctgctcacaaaattactaaatcattctgaaatacgtaactgcaaattctgggctttaaagtctctagttaaatgggtgattttgaaaattggtggctgttcagacattttcaaatgagaatagaatgcatttgtttcagactgataaactgcagaaggttagataacaccaaacacatttgagtttctcctaagaaaatgacttgggcctccagattacatctcattttttttttttttaccctatcaagtttgtttttccatatgaaatgtctttcccaactacacctgcccttggagactgtgaataacagacttaaaggaagtatcctttccagatgagctgaagaatgtcatcctcttaaaagaatgaacagctggtcatgtagaaattctctggaatgctcacttgtcctacaaaggcaggggagcagaaaacatgtagtttttttgttattggtatacataattgtaaatcttcgagataattttactagaagtccacataattttaataattgcctttctcctgaaaagattgctaataaattaacaatgtgaaggctagaaagctggccaagcataatccggtgggactcaggattgctggctggattgtcccgtttgatcagacattgtttcttagatgaatattcaggacgccctcgtgtataaaagttgtcctttgttctgactaccttggtattaagttcgaatttcttaccatgacacacaaaggattcgattcttgcttagctctctaagctcctctcactttctcttcccctcttgaattctttgctcttgccacacaactagcagatgaactaatctatctgttccaacgtgggcacagtagcagccgtaactcttaccttggcccactctgacttgtccagccctggttgaattcttcgtatccccgtgagggtccgcacgtagttggggctgtttactaaacggatgaacttccctaccgggaggctaggtctcggttatgccttacttcccaggaagcggcttctataggcattgtttaaatgtaggagtaggagggagctgggggtattgcattccccaggtcacagataaatgagattccaaaaccaagatctggctaggccttggaaagagggacctgcgaggccgaccagacgtttggaactgcgccttgcagtgtgggatctcagcaccggatattaccccggtttgtagagagttgagttactgttttaagagacgttgcaaaccgtacgggtcaagaagaaagccgaagacgggttagcgcctgcggtcggggtcgagaaaagcaggcgagatgcgacctgacgtgggtccgcctctctccacccgtggcaagcccgacagtcgcactattgctttaacaatcgccctctttccaagaagagctacttagtgaccgtgagcgaatatgcgtgggaagacacgatgtcctctcggcctctgtgcgctcagttgtttacctaggcgtccgggggaggcacactcgcgggactcgcgggactcggccccggcctcccagctcgcccaggacacgacgctggttctgcgggctctcggagcccagcgcgaatcccccgggctaattcccaagaaccgagaggcagcactgcctggaggctgcccccgcctccgcgcccccgtcctcactttctgaggctgttagcagagagtcccgcgggccggggagaagcgggacgcgggggatggcctcgcagcgccctgtgagcgtcggcagtagtcaggcagccagggctccttgggcgatcgccctgggtagaggagaggagtttccggggctcgggtccgggtcgccttccaggggaacgagcgcggaagcaagtgggcggcgagaggcggagcaagagacgctggagggcgtggacgcagcgggctttggaaaggccccaagttaatgaggcgtgcgccggctgccgagcgcctcttggagctgggctttcccccgcggtgcgggcgccaggagccgccttttccgctgggtgtcactcgggggtggggaagatggcccattcaaaagcgccgcgagggggcccggccagtgcccttcagtgagcgctcgcaagaggacggcagaggcccggcagctcggagctccgggaccttgtggcgcatcaggacgcggctgtccctctgccgggacccagagccgccgccgccgctctgcctcctgcgtgttagcctcctctgcgcgctccgggcaggcggccgtgggagccgctggggcgaggacggcgcgaggctgctgctgctgcccccggcccgcgcggctggaaacggagaggccgagccaagcggcggcccctcttatgctgggaggatgctggagagtagcggctgcaaagcgctgaaggagggcgtgctggagaagcgcagcgacgggttgttgcagctctggaagaaaaagtgttgcatcctcaccgaggaagggctgctgcttatcccgcccaagcagctgcaacaccagcagcagcagcagcaacagcagcagcagcagcagcaacaacagcccgggcaggggccggccgagccgtcccaacccagtggccccgctgtcgccagcctcgagccgccggtcaagctcaaggaactgcacttctccaacatgaagaccgtggactgtgtggagcgcaagggcaagtacatgtacttcactgtggtgatggcagagggcaaggagatcgactttcggtgcccgcaagaccagggctggaacgccgagatcacgctgcagatggtgcagtacaagaatcgtcaggccatcctggcggtcaaatccacgcggcagaagcagcagcacctggtccagcagcagcccccctcgcagccgcagccgcagccgcagctccagccccaaccccagcctcagcctcagccgcaaccccagccccaatcacaaccccagcctcagccccaacccaagcctcagccccagcagctccacccgtatccgcatccacatccacatccacactctcatcctcactcgcacccacaccctcacccgcacccgcatccgcaccaaataccgcacccacacccacagccgcactcgcagccgcacgggcaccggcttctccgcagcacctccaactctgcctgaaaggggcagctcccgggcaagacaaggttttgaggacttgaggaagtgggacgagcacatttctattgtcttcacttggatcaaaagcaaaacagtctctccgccccgcaccagatcaagtagtttggacatcaccctactgaaaacttgcgattcttcttagttttctgcatacttttcatcacgatgcaggaaacgatttcgagtcaagaagacttttatttatgaacctttgaaaggatcgtcttgtatggtgaattttctaggagcgatgatgtactgtaattttattttaatgtattttgatttatgattatttattagtttttttttaaatgcttgttctaagacatttctgaatgtagaccattttccaaaaaggaaactttattttcaaaaacctaatccgtagtaattcctaatcttggagaataaaaaagggcggtggaggggaaaacattaagaatttattcattatttctcgagtactttcagaaagtctgacactttcattgttgtgccagctggttgaaattaaaactctgatattactttttttgaggatttttatttttgtttttgcttaaacatatagtttgtctagaagtttaaaaagctaaaagttaaaaatggtgtaattatgaaaatctaacactcaagatagtttctaaaaggaaatcagtagttaaggatacctgatttcaaaatatttaaagcataacctaactgatggtaggatgattgtatcttgaatatgtggtagggccacatctattgtaggaaaaccttgcttttatcatctgtgtgtaaagggcttaataaggagaagaggccttttgactgatttgtgagtataaatgcatttgctgtttcatttcaaaaatgttgtggaggaaaagagtacatttaacttgtataagagaatatttgtactcctgtccaggctgcaggacctttcttcgagagctttgcacacttgacttgaaccacattttctgatccctttactttgttttagaagcacactgaaaaatctcgttgtttaaagtacaatttgtaaatatttcaaaggtctaggagtcataacttttgttttcatactgaaaatgatgttgatcagagaaaccaactgttttgcttttcattgctctgtgagaaatttgaggattctgttttgctgttaggtaagctaaactcagaaattgaaaaggaaaagactggataaacacaggattttcagtaagaaaacaaccccagtcttgtcttagaagccacttgttgaggagtctgttgggggaaaaaagaggatatgcttttaaaggtagaacaaaccttcttctgtgttaaatcaaaaggatgttcaaaatccaccaggacagatgctacttgggtttaaatggagccatagatgatacaaagtcctcttggggctgaaaatcacttcctatttgcatggctttactaactggtttctgttttccattatctttttcacagaaagtcttggtcagtatttttccagcatttaaattgaaacggtcagtattagaccactgctaggttatgtagtcaagaaataaaaatagaattacatgctacagatgtctttattctccttccatctagaaaggagttccaaggtcaaattactttttagtgcaatagttaaatgacattttgagatcataactcatatccaaaaagttgcagggaaaattaaaatagctttcccctattaagctaatggcaaacaaaacttaagtggacccccacttccagtggttgtttaggttgcagttgtgaaaatatgctgccaacatttaaaaacttgtttcatatgtatatatgtatacacatatatgaatatgtatgtatatatacatatatgagaacatgtgtgtacacatatatgaatatgtatatatgtgtatgtatgtatatatgtatatgaaatgagagccacatctaaagatttcttaaatcaagtttggttcagcttccttagaactgtggctgtactttttgaggagtacctcatagtactatatttttaatgcatgcaaatcataatagctccaaatgaaccacagttttttcccaatggaggatttttttttaattcttgtactaaaaaaaaaaaatccataccaaatatttttacaaattaagattgatgtaggttttaaaaaaggcatttgtatgttgttagcttacatatggggctaggtaatttcattgcttaaaaagatgcgcctaggctccctcttggtggctggatttctttttcttcgcccgtggtggccatggttcttaatagggccaccggaatcatggtttctttttttttttttttttttgagatggagtctcgccctgtgacccaggctggagtgcagtggcacgatctcggctcactgcaacctctgcctcctgggttcacgccattctcctgtctcagcctcctgagtagctgggactacaggtgaatgccaccacgcccggctgatttttgtatttttagtagagatggggtttcaccatagtggtcaggctgttctcgaactcctgacctcaggtgatccacctgccttggcctcccaaagtgctaggattacaggtgtgagccaccacacccggccccagaataatggtttcttgactttctgtagcccttgttccttagtctgctgtgatatttatgttgacctttatcattttctattctgaacccctcttagcatttaatgtgaaatctaagaaattagaagtagaatggcttttattgttttgacacctttgaaattattattaataatttttccagagcaaaaaagcaaacacgctcaataagactaaacaaaacaaaatataaatgtacatcatttaatgtcccagtggctctattctacctgtaagaaaatgatacaaaaccacctaagatattttgaagcctgacaaatcagcttcatggaaaaaggtaaaaaatgcatttttcaaccgaaagggcagatccaatagaagacccgctccttaaataaacataaaatgtaaaaagttggaaaattaagagtaatgttccatctggaaactgaacttttgtccttgaacttgtgttggcaccaagcctcatacacagtgagctcaataactgttgggacaaaggaaggaaggacaaaatgtgtaacttcccagcatctgggagatgctgtctcttgcctcactgagtgttccttttctttgctctcatgtcattccctgagaacaatgaattctgggacaggctaaacatcatgatgaagtttcttaaacagactttcttagtggaaatccatttagatctgggtgtgctctatggggagtgctgacgtcaaagagcaaatgtctataaggggcccttttaaaatgaacattttcctcattgagcaagctgggattctctaatgtagaaatcaagccatctttataatttcacttcagatgtttatgtttttgttttttttgtctccaatgatggtaaaaataaaaactacgcattacttaaaggagtttccctcacatgtaaacactgttaggaagtctggattaagttgaaagtcctgttttaactttttttctctcatataccaaacactctgtatttctcttaaagaagccctttaagagaaagccctaattttatatctgacagtaaagtttgctgcaagtgtatgagttcaaacacatcccttgttttctgtccctaggggaaaagtcatgtagttttagcttggctccagtgttaatattatattcagtagcagccttagaagagtggtctaagacttgaacctggagcaattttatagcacagaatcctacgaagataggactgtgaacatttgttttctttttcgtgtgtgtcaaactaactggtttttgctttaccaataaaatgtcctcggcagagtaaattttaaacgtgaaaattatagatcttgatattgaatccatcagtgattcaagagatacacctatttgcctaaaacaacctaagatgtattggttatggaatcatgtgttggataggttcttaagacctgtttcctcaaatcttgacacagttttcaagggtggcttattgacttgcacggttgggcagataatccagatttacctaagattgggtaaaaaagtcatctgtgactttgctggcagggcatttgctaagtggagtacaggatctaaaagggttttcttagaaagggcaatattgtccaatgaagtaagcagaaggactctgggttagaagcatctgcacaaaaactggtgagacctactctccactgctctgcagctggatggctgatggcaggctgagcagtggggaagcaggttttaacaacagggagtccttccaggtcactgtatattgagaagaaacataaaactattgtctgttacattccgaggtcagccttcttcttaacgttttataatatgcaaatgccagcttctggaaagcaagtatcatcatgtaccaaatgctttatacaccatcacattcatgaattttttagcatggtcagaacttgtgtaaatatgtctcttagatgattttggggagatgtgatttatttttcatattttcaaaatgcatttcatttcaaataaagttatctattgagacaaccga

SEQ ID NO: 22755 - DNA, 1522 bp, Homo sapiens
  source 1..1522: mol_type = unassigned DNA
ctcttggagctgggctttcccccgcggtgcgggcgccaggagccgccttttccgctgggtgtcactcgggggtggggaagatggcccattcaaaagcgccgcgagggggcccggccagtgcccttcagtgagcgctcgcaagaggacggcagaggcccggcagctcggagctccgggaccttgtggcgcatcaggacgcggctgtccctctgccgggacccagagccgccgccgccgctctgcctcctgcgtgttagcctcctctgcgcgctccgggcaggcggccgtgggagccgctggggcgaggacggcgcgaggctgctgctgctgcccccggcccgcgcggctggaaacggagaggccgagccaagcggcggcccctcttatgctgggaggatgctggagagtagcggctgcaaagcgctgaaggagggcgtgctggagaagcgcagcgacgggttgttgcagctctggaagaaaaagtgttgcatcctcaccgaggaagggctgctgcttatcccgcccaagcagctgcaacaccagcagcagcagcagcaacagcagcagcagcagcagcaacaacagcccgggcaggggccggccgagccgtcccaacccagtggccccgctgtcgccagcctcgagccgccggtcaagctcaaggaactgcacttctccaacatgaagaccgtggactgtgtggagcgcaagggcaagtacatgtacttcactgtggtgatggcagagggcaaggagatcgactttcggtgcccgcaagaccagggctggaacgccgagatcacgctgcagatggtgcagtacaagaatcgtcaggccatcctggcggtcaaatccacgcggcagaagcagcagcacctggtccagcagcagctccacccgtatccgcatccacatccacatccacactctcatcctcactcgcacccacaccctcacccgcacccgcatccgcaccaaataccgcacccacacccacagccgcactcgcagccgcacgggcaccggcttctccgcagcacctccaactctgcctgaaaggggcagctcccgggcaagacaaggttttgaggacttgaggaagtgggacgagcacatttctattgtcttcacttggatcaaaagcaaaacagtctctccgccccgcaccagatcaagtagtttggacatcaccctactgaaaacttgcgattcttcttagttttctgcatacttttcatcacgatgcaggaaacgatttcgagtcaagaagacttttatttatgaacctttgaaaggatcgtcttgtatggtgaattttctaggagcgatgatgtactgtaattttattttaatgtattttgatttatgattatttattagtttttttttaaatgcttgttctaagacatttctgaatgtagaccattttccaaaaaggaaactttattttcaaaaacctaatccgtagtaattcctaatcttggagaataaaaaagggcggtggaggggaaaacattaagaa

SEQ ID NO: 22756 - DNA, 955 bp, Homo sapiens
  source 1..955: mol_type = unassigned DNA
gcagctataaaggccgcgccggggccacgaggagcagagccggcgccgtcaccgcccgcattgccgctcccagtcccgcgctcggcacgacatgaaatcccccgacgaggtgctacgcgagggcgagttggagaagcgcagcgacagcctcttccagctatggaagaagaagcgcggggtgctcacctccgaccgcctgagcctgttccccgccagcccccgcgcgcgccccaaggagctgcgcttccactccatcctcaaggtggactgcgtggagcgcacgggcaagtacgtgtacttcaccatcgtcaccaccgaccacaaggagatcgacttccgctgcgcgggcgagagctgctggaacgcggccatcgcgctggcgctcatcgatttccagaaccgccgcgccctgcaggactttcgcagccgccaggaacgcaccgcacccgccgcacccgccgaggacgccgtggctgccgcggccgccgcaccctccgagccctcggagccctccaggccatccccgcagcccaaaccccgcacgccatgagcccgccgcgggccatacgctggacgagtcggaccgaggctaggacgtggccggcgctctccagccctgcagcagaagaacttcccgtgcgcgcggatcctcgctccgttgcacgggcgccttaagttattggactatctaatatctatgtatttatttcgctggttctttgtagtcacatattttatagtcttaatatcttgtttttgcatcactgtgcccattgcaaataaatcacttggccagtttgcttttctaccatccggctgtggctcagtgagactcctgctgggagggtggaggcccaggaatgggcgggcaggacaccctcatccagtcctgcggggctggtgtgaaaggcgctgggaaccggctttgaatgaataaatgaatcgtgtcatctgc

SEQ ID NO: 22757 - DNA, 5240 bp, Homo sapiens
  source 1..5240: mol_type = unassigned DNA
gaccgagccgagccaggctaagggaccagtgtctccctgccccccccccacctctaggagctctggagccttaggaccatggacgctctcaataggaaccaaataggccctggatgccagacccagaccatggtgcagaaaggacccttggacctgatcgagacaggcaaagggctgaaagtgcaaacggacaaaccccacctggtgagcctgggcagtgggcgactcagcacagccatcaccctcctgccgctggaggaagggaggacggtgattggctctgcagccagagacatctcactacagggcccaggcctggctccagagcactgctacatcgagaacctgcggggcaccctcaccctctacccctgtggcaatgcctgcactattgatgggctccctgtccggcagcctacccggctcactcagggctgcatgttgtgcctgggtcagtccaccttccttcgctttaaccacccggctgaagccaagtggatgaaaagcatgattccagcagggggccgagcccctgggcccccctacagccctgttcctgcagaatcagaaagtctggtaaatgggaaccacaccccacagactgcaacacggggaccctctgcctgtgccagccacagttccctggtgagctctattgagaaggacctgcaagagatcatggactcactggtgctagaggagcctggagctgctggcaagaagcctgccgcaacctctccactgtcaccgatggctaatggtgggcgctacctgctgtctcccccaaccagccccggcgccatgtctgtgggctccagctatgagaacacctctccagccttctctccactctcttcaccagccagcagtggaagctgtgccagtcactcacccagtgggcaagagccaggaccttctgtgcccccgctggtacctgcccgttcctccagctaccatctggccctacagcccccacagtcccgcccaagtggtgctcgctccgagagtcctcggctgagcaggaaagggggccatgagaggcctcccagccctggcctccggggtctgctgacagacagccctgcagctactgtcttggcggaggcccggagagccactgagagcccccggctgggtgggcagctgcctgtggtggccatcagcctgagtgaatacccagcttctggtgctctcagtcaacccaccagcattcctggcagccccaagtttcagcctccagtccctgctccccgaaacaagattggcacactccaggaccgccctcccagccctttccgtgagcctccaggcagtgagcgggtgctaacaaccagcccctcacgccaactggtgggccgaacattttcagatgggttagccacccgtaccctgcagcctcctgagagtccccgcctgggccggcggggcctggacagtatgcgagaactaccccccttaagtccatctctgtcccggcgagctctctccccgctgcccacccggaccaccccagatcccaagctaaacagggaagtggcagagagtcctcggccccggcgctgggcagcccatggggcttcaccagaggacttctccctgacgctgggggcacggggccgtaggacacggagcccctcacccacactgggtgagtctctggcaccccacaagggcagcttcagtggcaggctgagcccagcctacagtctgggctctcttactggggcttcaccctgccagagtccctgtgtccagaggaagctctccagcggggacttgcgggtgcctgtcacaagggagcggaaaaatagcatcacagagatcagtgacaatgaggacgacctcctggagtaccaccggcgacagcgccaagagcggctccgggagcaggagatggagaggctggaacgccagcgcctggagaccatcctgaacctgtgtgccgaatacagccgggctgatgggggacctgaggctggggagcttcccagcattggggaggccaccgcagcattggcactggcaggccggaggccctcacgaggccttgcaggggcctctgggcggagcagcgaggagcctggcgttgccacccaacgcctatgggagagtatggagcgctcagatgaggaaaatctcaaggaggagtgcagcagcactgagagcacccagcaggagcacgaagatgcacctagcaccaagctccagggagaggtgctagccctggaagaagagcgggctcaggtgctggggcacgtggagcagctcaaggtccgtgtgaaggagctagagcagcagctgcaggagtcagcccgagaggccgaaatggagcgggcactgctgcagggagagagggaggcagagcgggcactgctgcagaaggagcagaaggcagtggatcagctgcaggagaagctggtggccttggagacaggcatccagaaggagagggacaaggaggcagaggccctggagactgagacaaagctctttgaggacttggagttccagcagttggagcgggagagccgcgtggaggaggagcgcgagctggccggccaggggctgctccggagcaaggctgagctgctccgcagcatcgccaagaggaaggagcgcctggccatcctggacagtcaggctgggcagatccgggctcaggccgtgcaggaatcagaacgcctggcccgggacaagaatgcctccttacagctgctgcaaaaggagaaggagaagctgactgtgctggaaaggagataccactcactcacagggggcaggcctttcccgaagaccacatcgaccctcaaagaggtttaccgctccaagatggatggcgaggccaccagcccccttccccggacccgcagcggccccctcccctcctcctctggctcttcctcctcctcctcccagctcagcgtggctaccctggggcgtagcccctccccaaagagcgctctactcacccagaatggcacgggcagccttcctcgcaacctggcagccacactgcaggacatcgagaccaagcgccaactagctctgcagcagaagggacaacaagtgattgaagagcagcggcggcgactggctgagctgaagcagaaagcggcagctgaggcacagtgccagtgggatgcccttcacggggcagcacccttcccagcgggcccctcgggcttcccccctctcatgcaccactctatcctacaccacctgcctgcggggcgggagcgtggggaggagggtgagcacgcctatgatacgctgagtctggagagctctgacagcatggagaccagcatctccaccgggggcaactcggcctgctcccctgacaacatgtccagcgcgagtggtctggacatggggaagatcgaggagatggagaagatgctgaaagaggctcatgcagagaagaaccggctcatggagtcgagggagcgggagatggagctgcggcggcaggccctggaggaggagcggcggaggcgtgagcaggtagaacggaggctgcagagtgagagtgcccggaggcagcagctggtcgagaaggaggtcaagatgcgggagaaacaattttcccaggcacgacccctgacccgctacctgccaatccggaaggaggactttgacctgaagacacatattgagtcatcgggccatggtgttgatacctgcctgcacgtggtgctcagcagcaaggtctgccgtggctacttggtcaagatgggcggcaagattaaatcatggaagaagcgctggtttgtcttcgaccggctcaagcgcaccctttcctattatgtggacaagcatgagacgaagctgaagggagtcatctatttccaggccattgaggaagtgtactacgaccacctgcgcagtgcagccaagagcccgaacccagccctcaccttctgcgtaaagacccatgaccggctgtactacatggtggccccatctgcagaggccatgcgtatctggatggatgtcattgtcacaggggctgagggctacactcagttcatgaactaactgccgtgggcctcctggcagagcacaactggggcttttgtataagaagactttaatattctgtaaggagcttggtcctgtgagtttctgggctctggcctcctgaagaaccagccagaagaagaaaagtagaggtggctttgctgcctcctgggagcccagaacttgcagtaaccctttagggtcctgccccaggcccagccagggctgaggagctgtcacagagagggcctcagctctgacctgacacctgctctccccagcctgttttctcttttctaaaagacaaattatggtaccataagctgccaaagatcccctcctgcctcagacccctttgccaggggctttgggggctgagcagagccacatccagagtggggtaatagctcaggcggcccgcttcccatttctcaaaccccgctctgccccattgttctcctttcccttatactttttattaccttgctcaagggccagagatctcaagtgtcaaccttgaggtcccagctccatcccctagttgcagactcatcaccatggttaccatagtgactgcttcattgccatggttacatactaattgctgcagctctgtggcccagcccactgcttcagctgtgggccatctgagggtacgtgccatcatctctccagcccaggcccctgggcatctcatgctggggggaagggactgaatacctttttccttccccctgcctgtgtcttcagccctgatgcacaggctgccagccccccagtccagccctctcccttccactggtgccttgcttagagccagaagggatgaagccgggggatctatggaacagaggaggagcgatgcagttgggagaggaagctagaagggttatggttggagttctgtacagtgttgagtttccgacagggaaagaggattcctccaatgctcctagagagaaagcctgagcaggagatgatgcagcagaggggaagggccctgtggtgccgccgcccttccttcagcctccgaagggtgatggaaatggagagtggaggaccaggcctccagctgtctggcctcgcccttcacgccttaacactaagcccacctcccctgctctccttcccagcattgagcccttggttgcctgggcccaggctgggggttttcagtatttgtaagcatttcagcagaacaataaagcctttggactacg

SEQ ID NO: 22758 - DNA, 5565 bp, Homo sapiens
  source 1..5565: mol_type = unassigned DNA
agcgagctcccggggaaaagcaacggtgtcctcctaagcctgaggccaccgcgaccgagccgagccaggctaagggaccagtgtctccctgccccccccccacctctaggagctctggagccttaggaccatggacgctctcaataggaaccaaataggccctggatgccagacccagaccatggtgcagaaaggacccttggacctgatcgagacaggcaaagggctgaaagtgcaaacggacaaaccccacctggtgagcctgggcagtgggcgactcagcacagccatcaccctcctgccgctggaggaagggaggacggtgattggctctgcagccagagacatctcactacagggcccaggcctggctccagagcactgctacatcgagaacctgcggggcaccctcaccctctacccctgtggcaatgcctgcactattgatgggctccctgtccggcagcctacccggctcactcagggctgcatgttgtgcctgggtcagtccaccttccttcgctttaaccacccggctgaagccaagtggatgaaaagcatgattccagcagggggccgagcccctgggcccccctacagccctgttcctgcagaatcagaaagtctggtaaatgggaaccacaccccacagactgcaacacggggaccctctgcctgtgccagccacagttccctggtgagctctattgagaaggacctgcaagagatcatggactcactggtgctagaggagcctggagctgctggcaagaagcctgccgcaacctctccactgtcaccgatggctaatggtgggcgctacctgctgtctcccccaaccagccccggcgccatgtctgtgggctccagctatgagaacacctctccagccttctctccactctcttcaccagccagcagtggaagctgtgccagtcactcacccagtgggcaagagccaggaccttctgtgcccccgctggtacctgcccgttcctccagctaccatctggccctacagcccccacagtcccgcccaagtggtgctcgctccgagagtcctcggctgagcaggaaagggggccatgagaggcctcccagccctggcctccggggtctgctgacagacagccctgcagctactgtcttggcggaggcccggagagccactgagagcccccggctgggtgggcagctgcctgtggtggccatcagcctgagtgaatacccagcttctggtgctctcagtcaacccaccagcattcctggcagccccaagtttcagcctccagtccctgctccccgaaacaagattggcacactccaggaccgccctcccagccctttccgtgagcctccaggcagtgagcgggtgctaacaaccagcccctcacgccaactggtgggccgaacattttcagatgggttagccacccgtaccctgcagcctcctgagagtccccgcctgggccggcggggcctggacagtatgcgagaactaccccccttaagtccatctctgtcccggcgagctctctccccgctgcccacccggaccaccccagatcccaagctaaacagggaagtggcagagagtcctcggccccggcgctgggcagcccatggggcttcaccagaggacttctccctgacgctgggggcacggggccgtaggacacggagcccctcacccacactgggtgagtctctggcaccccacaagggcagcttcagtggcaggctgagcccagcctacagtctgggctctcttactggggcttcaccctgccagagtccctgtgtccagaggaagctctccagcggggacttgcgggtgcctgtcacaagggagcggaaaaatagcatcacagagatcagtgacaatgaggacgacctcctggagtaccaccggcgacagcgccaagagcggctccgggagcaggagatggagaggctggaacgccagcgcctggagaccatcctgaacctgtgtgccgaatacagccgggctgatgggggacctgaggctggggagcttcccagcattggggaggccaccgcagcattggcactggcaggccggaggccctcacgaggccttgcaggggcctctgggcggagcagcgaggagcctggcgttgccacccaacgcctatgggagagtatggagcgctcagatgaggaaaatctcaaggaggagtgcagcagcactgagagcacccagcaggagcacgaagatgcacctagcaccaagctccagggagaggtgctagccctggaagaagagcgggctcaggtgctggggcacgtggagcagctcaaggtccgtgtgaaggagctagagcagcagctgcaggagtcagcccgagaggccgaaatggagcgggcactgctgcagggagagagggaggcagagcgggcactgctgcagaaggagcagaaggcagtggatcagctgcaggagaagctggtggccttggagacaggcatccagaaggagagggacaaggagagggcggagctggccgcgggacggaggcacctggcccgccaggcgctctacgccgagctccagacgcagctcgataactgccccgagtcagtgcgggaacagttacaggagcagctgagaagggaggcagaggccctggagactgagacaaagctctttgaggacttggagttccagcagttggagcgggagagccgcgtggaggaggagcgcgagctggccggccaggggctgctccggagcaaggctgagctgctccgcagcatcgccaagaggaaggagcgcctggccatcctggacagtcaggctgggcagatccgggctcaggccgtgcaggaatcagaacgcctggcccgggacaagaatgcctccttacagctgctgcaaaaggagaaggagaagctgactgtgctggaaaggagataccactcactcacagggggcaggcctttcccgaagaccacatcgaccctcaaagagatggagaagctgctgctccctgctgtagacttagagcagtggtaccaggagctgatggccgggctggggactggccccgctgcagcctcccctcactcttctcccccgcctctgcccgccaaagcttcccgtcagctgcaggtttaccgctccaagatggatggcgaggccaccagcccccttccccggacccgcagcggccccctcccctcctcctctggctcttcctcctcctcctcccagctcagcgtggctaccctggggcgtagcccctccccaaagagcgctctactcacccagaatggcacgggcagccttcctcgcaacctggcagccacactgcaggacatcgagaccaagcgccaactagctctgcagcagaagggacaacaagtgattgaagagcagcggcggcgactggctgagctgaagcagaaagcggcagctgaggcacagtgccagtgggatgcccttcacggggcagcacccttcccagcgggcccctcgggcttcccccctctcatgcaccactctatcctacaccacctgcctgcggggcgggagcgtggggaggagggtgagcacgcctatgatacgctgagtctggagagctctgacagcatggagaccagcatctccaccgggggcaactcggcctgctcccctgacaacatgtccagcgcgagtggtctggacatggggaagatcgaggagatggagaagatgctgaaagaggctcatgcagagaagaaccggctcatggagtcgagggagcgggagatggagctgcggcggcaggccctggaggaggagcggcggaggcgtgagcaggtagaacggaggctgcagagtgagagtgcccggaggcagcagctggtcgagaaggaggtcaagatgcgggagaaacaattttcccaggcacgacccctgacccgctacctgccaatccggaaggaggactttgacctgaagacacatattgagtcatcgggccatggtgttgatacctgcctgcacgtggtgctcagcagcaaggtctgccgtggctacttggtcaagatgggcggcaagattaaatcatggaagaagcgctggtttgtcttcgaccggctcaagcgcaccctttcctattatgtggacaagcatgagacgaagctgaagggagtcatctatttccaggccattgaggaagtgtactacgaccacctgcgcagtgcagccaagagcccgaacccagccctcaccttctgcgtaaagacccatgaccggctgtactacatggtggccccatctgcagaggccatgcgtatctggatggatgtcattgtcacaggggctgagggctacactcagttcatgaactaactgccgtgggcctcctggcagagcacaactggggcttttgtataagaagactttaatattctgtaaggagcttggtcctgtgagtttctgggctctggcctcctgaagaaccagccagaagaagaaaagtagaggtggctttgctgcctcctgggagcccagaacttgcagtaaccctttagggtcctgccccaggcccagccagggctgaggagctgtcacagagagggcctcagctctgacctgacacctgctctccccagcctgttttctcttttctaaaagacaaattatggtaccataagctgccaaagatcccctcctgcctcagacccctttgccaggggctttgggggctgagcagagccacatccagagtggggtaatagctcaggcggcccgcttcccatttctcaaaccccgctctgccccattgttctcctttcccttatactttttattaccttgctcaagggccagagatctcaagtgtcaaccttgaggtcccagctccatcccctagttgcagactcatcaccatggttaccatagtgactgcttcattgccatggttacatactaattgctgcagctctgtggcccagcccactgcttcagctgtgggccatctgagggtacgtgccatcatctctccagcccaggcccctgggcatctcatgctggggggaagggactgaatacctttttccttccccctgcctgtgtcttcagccctgatgcacaggctgccagccccccagtccagccctctcccttccactggtgccttgcttagagccagaagggatgaagccgggggatctatggaacagaggaggagcgatgcagttgggagaggaagctagaagggttatggttggagttctgtacagtgttgagtttccgacagggaaagaggattcctccaatgctcctagagagaaagcctgagcaggagatgatgcagcagaggggaagggccctgtggtgccgccgcccttccttcagcctccgaagggtgatggaaatggagagtggaggaccaggcctccagctgtctggcctcgcccttcacgccttaacactaagcccacctcccctgctctccttcccagcattgagcccttggttgcctgggcccaggctgggggttttcagtatttgtaagcatttcagcagaacaataaagcctttggactacggaagtg

SEQ ID NO: 22759 - DNA, 5753 bp, Homo sapiens
  source 1..5753: mol_type = unassigned DNA
actaaactcattgaattagaacagcacttgtccatctcaaagaggataaattattttttgctatccaccccagctggaatttagaccagacttacaggctttctgctccttccttcagtgaagaagagtctccagggtccctctagtgcaggtcaaagaagtccagtccagctgagttcagctccctagggcctccccagccagtctcctggaccaagagctggctttgcaagaaaacatcctactaaagccctgggaaaagagacaaatggtgaagaggagaatgaaaggttgcaggagggagctcctgttttagccctgccacctacctgggggccctctggctaccagtgtccttggaggggcttccttgctgcttctcccactaaggagctctggagccttaggaccatggacgctctcaataggaaccaaataggccctggatgccagacccagaccatggtgcagaaaggacccttggacctgatcgagacaggcaaagggctgaaagtgcaaacggacaaaccccacctggtgagcctgggcagtgggcgactcagcacagccatcaccctcctgccgctggaggaagggaggacggtgattggctctgcagccagagacatctcactacagggcccaggcctggctccagagcactgctacatcgagaacctgcggggcaccctcaccctctacccctgtggcaatgcctgcactattgatgggctccctgtccggcagcctacccggctcactcagggctgcatgttgtgcctgggtcagtccaccttccttcgctttaaccacccggctgaagccaagtggatgaaaagcatgattccagcagggggccgagcccctgggcccccctacagccctgttcctgcagaatcagaaagtctggtaaatgggaaccacaccccacagactgcaacacggggaccctctgcctgtgccagccacagttccctggtgagctctattgagaaggacctgcaagagatcatggactcactggtgctagaggagcctggagctgctggcaagaagcctgccgcaacctctccactgtcaccgatggctaatggtgggcgctacctgctgtctcccccaaccagccccggcgccatgtctgtgggctccagctatgagaacacctctccagccttctctccactctcttcaccagccagcagtggaagctgtgccagtcactcacccagtgggcaagagccaggaccttctgtgcccccgctggtacctgcccgttcctccagctaccatctggccctacagcccccacagtcccgcccaagtggtgctcgctccgagagtcctcggctgagcaggaaagggggccatgagaggcctcccagccctggcctccggggtctgctgacagacagccctgcagctactgtcttggcggaggcccggagagccactgagagcccccggctgggtgggcagctgcctgtggtggccatcagcctgagtgaatacccagcttctggtgctctcagtcaacccaccagcattcctggcagccccaagtttcagcctccagtccctgctccccgaaacaagattggcacactccaggaccgccctcccagccctttccgtgagcctccaggcagtgagcgggtgctaacaaccagcccctcacgccaactggtgggccgaacattttcagatgggttagccacccgtaccctgcagcctcctgagagtccccgcctgggccggcggggcctggacagtatgcgagaactaccccccttaagtccatctctgtcccggcgagctctctccccgctgcccacccggaccaccccagatcccaagctaaacagggaagtggcagagagtcctcggccccggcgctgggcagcccatggggcttcaccagaggacttctccctgacgctgggggcacggggccgtaggacacggagcccctcacccacactgggtgagtctctggcaccccacaagggcagcttcagtggcaggctgagcccagcctacagtctgggctctcttactggggcttcaccctgccagagtccctgtgtccagaggaagctctccagcggggacttgcgggtgcctgtcacaagggagcggaaaaatagcatcacagagatcagtgacaatgaggacgacctcctggagtaccaccggcgacagcgccaagagcggctccgggagcaggagatggagaggctggaacgccagcgcctggagaccatcctgaacctgtgtgccgaatacagccgggctgatgggggacctgaggctggggagcttcccagcattggggaggccaccgcagcattggcactggcaggccggaggccctcacgaggccttgcaggggcctctgggcggagcagcgaggagcctggcgttgccacccaacgcctatgggagagtatggagcgctcagatgaggaaaatctcaaggaggagtgcagcagcactgagagcacccagcaggagcacgaagatgcacctagcaccaagctccagggagaggtgctagccctggaagaagagcgggctcaggtgctggggcacgtggagcagctcaaggtccgtgtgaaggagctagagcagcagctgcaggagtcagcccgagaggccgaaatggagcgggcactgctgcagggagagagggaggcagagcgggcactgctgcagaaggagcagaaggcagtggatcagctgcaggagaagctggtggccttggagacaggcatccagaaggagagggacaaggaggcagaggccctggagactgagacaaagctctttgaggacttggagttccagcagttggagcgggagagccgcgtggaggaggagcgcgagctggccggccaggggctgctccggagcaaggctgagctgctccgcagcatcgccaagaggaaggagcgcctggccatcctggacagtcaggctgggcagatccgggctcaggccgtgcaggaatcagaacgcctggcccgggacaagaatgcctccttacagctgctgcaaaaggagaaggagaagctgactgtgctggaaaggagataccactcactcacagggggcaggcctttcccgaagaccacatcgaccctcaaagagatggagaagctgctgctccctgctgtagacttagagcagtggtaccaggagctgatggccgggctggggactggccccgctgcagcctcccctcactcttctcccccgcctctgcccgccaaagcttcccgtcagctgcaggtttaccgctccaagatggatggcgaggccaccagcccccttccccggacccgcagcggccccctcccctcctcctctggctcttcctcctcctcctcccagctcagcgtggctaccctggggcgtagcccctccccaaagagcgctctactcacccagaatggcacgggcagccttcctcgcaacctggcagccacactgcaggacatcgagaccaagcgccaactagctctgcagcagaagggacaacaagtgattgaagagcagcggcggcgactggctgagctgaagcagaaagcggcagctgaggcacagtgccagtgggatgcccttcacggggcagcacccttcccagcgggcccctcgggcttcccccctctcatgcaccactctatcctacaccacctgcctgcggggcgggagcgtggggaggagggtgagcacgcctatgatacgctgagtctggagagctctgacagcatggagaccagcatctccaccgggggcaactcggcctgctcccctgacaacatgtccagcgcgagtggtctggacatggggaagatcgaggagatggagaagatgctgaaagaggctcatgcagagaagaaccggctcatggagtcgagggagcgggagatggagctgcggcggcaggccctggaggaggagcggcggaggcgtgagcaggtagaacggaggctgcagagtgagagtgcccggaggcagcagctggtcgagaaggaggtcaagatgcgggagaaacaattttcccaggcacgacccctgacccgctacctgccaatccggaaggaggactttgacctgaagacacatattgagtcatcgggccatggtgttgatacctgcctgcacgtggtgctcagcagcaaggtctgccgtggctacttggtcaagatgggcggcaagattaaatcatggaagaagcgctggtttgtcttcgaccggctcaagcgcaccctttcctattatgtggacaagcatgagacgaagctgaagggagtcatctatttccaggccattgaggaagtgtactacgaccacctgcgcagtgcagccaagaagaggtttttccgcttcactatggtgactgagagcccgaacccagccctcaccttctgcgtaaagacccatgaccggctgtactacatggtggccccatctgcagaggccatgcgtatctggatggatgtcattgtcacaggggctgagggctacactcagttcatgaactaactgccgtgggcctcctggcagagcacaactggggcttttgtataagaagactttaatattctgtaaggagcttggtcctgtgagtttctgggctctggcctcctgaagaaccagccagaagaagaaaagtagaggtggctttgctgcctcctgggagcccagaacttgcagtaaccctttagggtcctgccccaggcccagccagggctgaggagctgtcacagagagggcctcagctctgacctgacacctgctctccccagcctgttttctcttttctaaaagacaaattatggtaccataagctgccaaagatcccctcctgcctcagacccctttgccaggggctttgggggctgagcagagccacatccagagtggggtaatagctcaggcggcccgcttcccatttctcaaaccccgctctgccccattgttctcctttcccttatactttttattaccttgctcaagggccagagatctcaagtgtcaaccttgaggtcccagctccatcccctagttgcagactcatcaccatggttaccatagtgactgcttcattgccatggttacatactaattgctgcagctctgtggcccagcccactgcttcagctgtgggccatctgagggtacgtgccatcatctctccagcccaggcccctgggcatctcatgctggggggaagggactgaatacctttttccttccccctgcctgtgtcttcagccctgatgcacaggctgccagccccccagtccagccctctcccttccactggtgccttgcttagagccagaagggatgaagccgggggatctatggaacagaggaggagcgatgcagttgggagaggaagctagaagggttatggttggagttctgtacagtgttgagtttccgacagggaaagaggattcctccaatgctcctagagagaaagcctgagcaggagatgatgcagcagaggggaagggccctgtggtgccgccgcccttccttcagcctccgaagggtgatggaaatggagagtggaggaccaggcctccagctgtctggcctcgcccttcacgccttaacactaagcccacctcccctgctctccttcccagcattgagcccttggttgcctgggcccaggctgggggttttcagtatttgtaagcatttcagcagaacaataaagcctttggactacggaagtg

SEQ ID NO: 22760 - DNA, 5484 bp, Homo sapiens
  source 1..5484: mol_type = unassigned DNA
agcgagctcccggggaaaagcaacggtgtcctcctaagcctgaggccaccgcgaccgagccgagccaggctaagggaccagtgtctccctgccccccccccacctctaggagctctggagccttaggaccatggacgctctcaataggaaccaaataggccctggatgccagacccagaccatggtgcagaaaggacccttggacctgatcgagacaggcaaagggctgaaagtgcaaacggacaaaccccacctggtgagcctgggcagtgggcgactcagcacagccatcaccctcctgccgctggaggaagggaggacggtgattggctctgcagccagagacatctcactacagggcccaggcctggctccagagcactgctacatcgagaacctgcggggcaccctcaccctctacccctgtggcaatgcctgcactattgatgggctccctgtccggcagcctacccggctcactcagggctgcatgttgtgcctgggtcagtccaccttccttcgctttaaccacccggctgaagccaagtggatgaaaagcatgattccagcagggggccgagcccctgggcccccctacagccctgttcctgcagaatcagaaagtctggtaaatgggaaccacaccccacagactgcaacacggggaccctctgcctgtgccagccacagttccctggtgagctctattgagaaggacctgcaagagatcatggactcactggtgctagaggagcctggagctgctggcaagaagcctgccgcaacctctccactgtcaccgatggctaatggtgggcgctacctgctgtctcccccaaccagccccggcgccatgtctgtgggctccagctatgagaacacctctccagccttctctccactctcttcaccagccagcagtggaagctgtgccagtcactcacccagtgggcaagagccaggaccttctgtgcccccgctggtacctgcccgttcctccagctaccatctggccctacagcccccacagtcccgcccaagtggtgctcgctccgagagtcctcggctgagcaggaaagggggccatgagaggcctcccagccctggcctccggggtctgctgacagacagccctgcagctactgtcttggcggaggcccggagagccactgagagcccccggctgggtgggcagctgcctgtggtggccatcagcctgagtgaatacccagcttctggtgctctcagtcaacccaccagcattcctggcagccccaagtttcagcctccagtccctgctccccgaaacaagattggcacactccaggaccgccctcccagccctttccgtgagcctccaggcagtgagcgggtgctaacaaccagcccctcacgccaactggtgggccgaacattttcagatgggttagccacccgtaccctgcagcctcctgagagtccccgcctgggccggcggggcctggacagtatgcgagaactaccccccttaagtccatctctgtcccggcgagctctctccccgctgcccacccggaccaccccagatcccaagctaaacagggaagtggcagagagtcctcggccccggcgctgggcagcccatggggcttcaccagaggacttctccctgacgctgggggcacggggccgtaggacacggagcccctcacccacactgggtgagtctctggcaccccacaagggcagcttcagtggcaggctgagcccagcctacagtctgggctctcttactggggcttcaccctgccagagtccctgtgtccagaggaagctctccagcggggacttgcgggtgcctgtcacaagggagcggaaaaatagcatcacagagatcagtgacaatgaggacgacctcctggagtaccaccggcgacagcgccaagagcggctccgggagcaggagatggagaggctggaacgccagcgcctggagaccatcctgaacctgtgtgccgaatacagccgggctgatgggggacctgaggctggggagcttcccagcattggggaggccaccgcagcattggcactggcaggccggaggccctcacgaggccttgcaggggcctctgggcggagcagcgaggagcctggcgttgccacccaacgcctatgggagagtatggagcgctcagatgaggaaaatctcaaggaggagtgcagcagcactgagagcacccagcaggagcacgaagatgcacctagcaccaagctccagggagaggtgctagccctggaagaagagcgggctcaggtgctggggcacgtggagcagctcaaggtccgtgtgaaggagctagagcagcagctgcaggagtcagcccgagaggccgaaatggagcgggcactgctgcagggagagagggaggcagagcgggcactgctgcagaaggagcagaaggcagtggatcagctgcaggagaagctggtggccttggagacaggcatccagaaggagagggacaaggaggcagaggccctggagactgagacaaagctctttgaggacttggagttccagcagttggagcgggagagccgcgtggaggaggagcgcgagctggccggccaggggctgctccggagcaaggctgagctgctccgcagcatcgccaagaggaaggagcgcctggccatcctggacagtcaggctgggcagatccgggctcaggccgtgcaggaatcagaacgcctggcccgggacaagaatgcctccttacagctgctgcaaaaggagaaggagaagctgactgtgctggaaaggagataccactcactcacagggggcaggcctttcccgaagaccacatcgaccctcaaagagatggagaagctgctgctccctgctgtagacttagagcagtggtaccaggagctgatggccgggctggggactggccccgctgcagcctcccctcactcttctcccccgcctctgcccgccaaagcttcccgtcagctgcaggtttaccgctccaagatggatggcgaggccaccagcccccttccccggacccgcagcggccccctcccctcctcctctggctcttcctcctcctcctcccagctcagcgtggctaccctggggcgtagcccctccccaaagagcgctctactcacccagaatggcacgggcagccttcctcgcaacctggcagccacactgcaggacatcgagaccaagcgccaactagctctgcagcagaaggtcgagtcgcttcccgccgagcccctcccaaccgacgacccagcaggacaacaagtgattgaagagcagcggcggcgactggctgagctgaagcagaaagcggcagctgaggcacagtgccagtgggatgcccttcacggggcagcacccttcccagcgggcccctcgggcttcccccctctcatgcaccactctatcctacaccacctgcctgcggggcgggagcgtggggaggagggtgagcacgcctatgatacgctgagtctggagagctctgacagcatggagaccagcatctccaccgggggcaactcggcctgctcccctgacaacatgtccagcgcgagtggtctggacatggggaagatcgaggagatggagaagatgctgaaagaggctcatgcagagaagaaccggctcatggagtcgagggagcgggagatggagctgcggcggcaggccctggaggaggagcggcggaggcgtgagcaggtagaacggaggctgcagagtgagagtgcccggaggcagcagctggtcgagaaggaggtcaagatgcgggagaaacaattttcccaggcacgacccctgacccgctacctgccaatccggaaggaggactttgacctgaagacacatattgagtcatcgggccatggtgttgatacctgcctgcacgtggtgctcagcagcaaggtctgccgtggctacttggtcaagatgggcggcaagattaaatcatggaagaagcgctggtttgtcttcgaccggctcaagcgcaccctttcctattatgtggacaagcatgagacgaagctgaagggagtcatctatttccaggccattgaggaagtgtactacgaccacctgcgcagtgcagccaagagcccgaacccagccctcaccttctgcgtaaagacccatgaccggctgtactacatggtggccccatctgcagaggccatgcgtatctggatggatgtcattgtcacaggggctgagggctacactcagttcatgaactaactgccgtgggcctcctggcagagcacaactggggcttttgtataagaagactttaatattctgtaaggagcttggtcctgtgagtttctgggctctggcctcctgaagaaccagccagaagaagaaaagtagaggtggctttgctgcctcctgggagcccagaacttgcagtaaccctttagggtcctgccccaggcccagccagggctgaggagctgtcacagagagggcctcagctctgacctgacacctgctctccccagcctgttttctcttttctaaaagacaaattatggtaccataagctgccaaagatcccctcctgcctcagacccctttgccaggggctttgggggctgagcagagccacatccagagtggggtaatagctcaggcggcccgcttcccatttctcaaaccccgctctgccccattgttctcctttcccttatactttttattaccttgctcaagggccagagatctcaagtgtcaaccttgaggtcccagctccatcccctagttgcagactcatcaccatggttaccatagtgactgcttcattgccatggttacatactaattgctgcagctctgtggcccagcccactgcttcagctgtgggccatctgagggtacgtgccatcatctctccagcccaggcccctgggcatctcatgctggggggaagggactgaatacctttttccttccccctgcctgtgtcttcagccctgatgcacaggctgccagccccccagtccagccctctcccttccactggtgccttgcttagagccagaagggatgaagccgggggatctatggaacagaggaggagcgatgcagttgggagaggaagctagaagggttatggttggagttctgtacagtgttgagtttccgacagggaaagaggattcctccaatgctcctagagagaaagcctgagcaggagatgatgcagcagaggggaagggccctgtggtgccgccgcccttccttcagcctccgaagggtgatggaaatggagagtggaggaccaggcctccagctgtctggcctcgcccttcacgccttaacactaagcccacctcccctgctctccttcccagcattgagcccttggttgcctgggcccaggctgggggttttcagtatttgtaagcatttcagcagaacaataaagcctttggactacggaagtg

SEQ ID NO: 22761 - DNA, 1940 bp, Homo sapiens
  source 1..1940: mol_type = unassigned DNA
ctgagagcacccagcaggagcacgaagatgcacctagcaccaagctccagggagaggtgctagccctggaagaagagcgggctcaggtgctggggcacgtggagcagctcaaggtccgtgtgaaggagctagagcagcagctgcaggagtcagcccgagaggccgaaatggagcgggcactgctgcagggagagagggaggcagagcgggcactgctgcagaaggagcagaaggcagtggatcagctggtcgagaaggaggtcaagatgcgggagaaacaattttcccaggcacgacccctgacccgctacctgccaatccggaaggaggactttgacctgaagacacatattgagtcatcgggccatggtgttgatacctgcctgcacgtggtgctcagcagcaaggtctgccgtggctacttggtcaagatgggcggcaagattaaatcatggaagaagcgctggtttgtcttcgaccggctcaagcgcaccctttcctattatgtggacaagcatgagacgaagctgaagggagtcatctatttccaggccattgaggaagtgtactacgaccacctgcgcagtgcagccaagagcccgaacccagccctcaccttctgcgtaaagacccatgaccggctgtactacatggtggccccatctgcagaggccatgcgtatctggatggatgtcattgtcacaggggctgagggctacactcagttcatgaactaactgccgtgggcctcctggcagagcacaactggggcttttgtataagaagactttaatattctgtaaggagcttggtcctgtgagtttctgggctctggcctcctgaagaaccagccagaagaagaaaagtagaggtggctttgctgcctcctgggagcccagaacttgcagtaaccctttagggtcctgccccaggcccagccagggctgaggagctgtcacagagagggcctcagctctgacctgacacctgctctccccagcctgttttctcttttctaaaagacaaattatggtaccataagctgccaaagatcccctcctgcctcagacccctttgccaggggctttgggggctgagcagagccacatccagagtggggtaatagctcaggcggcccgcttcccatttctcaaaccccgctctgccccattgttctcctttcccttatactttttattaccttgctcaagggccagagatctcaagtgtcaaccttgaggtcccagctccatcccctagttgcagactcatcaccatggttaccatagtgactgcttcattgccatggttacatactaattgctgcagctctgtggcccagcccactgcttcagctgtgggccatctgagggtacgtgccatcatctctccagcccaggcccctgggcatctcatgctggggggaagggactgaatacctttttccttccccctgcctgtgtcttcagccctgatgcacaggctgccagccccccagtccagccctctcccttccactggtgccttgcttagagccagaagggatgaagccgggggatctatggaacagaggaggagcgatgcagttgggagaggaagctagaagggttatggttggagttctgtacagtgttgagtttccgacagggaaagaggattcctccaatgctcctagagagaaagcctgagcaggagatgatgcagcagaggggaagggccctgtggtgccgccgcccttccttcagcctccgaagggtgatggaaatggagagtggaggaccaggcctccagctgtctggcctcgcccttcacgccttaacactaagcccacctcccctgctctccttcccagcattgagcccttggttgcctgggcccaggctgggggttttcagtatttgtaagcatttcagcagaacaataaagcctttggactacgg

SEQ ID NO: 22762 - DNA, 1315 bp, Homo sapiens
  source 1..1315: mol_type = unassigned DNA
aggccaccgcgaccgagccgagccaggctaagggaccagtgtctccctgccccccccccacctctaggagctctggagccttaggaccatggacgctctcaataggaaccaaataggccctggatgccagacccagaccatggtgcagaaaggacccttggacctgatcgagacaggcaaagggctgaaagtgcaaacggacaaaccccacctggtgagcctgggcagtgggcgactcagcacagccatcaccctcctgccgctggaggaagggaggacggtgattggctctgcagccagagacatctcactacagggcccaggcctggctccagagcactgctacatcgagaacctgcggggcaccctcaccctctacccctgtggcaatgcctgcactattgatgggctccctgtccggcagcctacccggctcactcagggctgcatgttgtgcctgggtcagtccaccttccttcgctttaaccacccggctgaagccaagtggatgaaaagcatgattccagcagggggccgagcccctgggcccccctacagccctgttcctgaatcagaaagtctggtaaatgggaaccacaccccacagactgcaacacggggaccctctgcctgtgccagccacagttccctggtgagctctattgagaaggacctgcaagagatcatggactcactggtgctagaggagcctggagctgctggcaagaagcctgccgcaacctctccactgtcaccgatggctaatggtgggcgctacctgctgtctcccccaaccagccccggcgccatgtctgtgggctccagctatgagaacacctctccagccttctctccactctcttcaccagccagcagtggaagctgtgccagtcactcacccagtgggcaagagccaggaccttctgtgcccccgctggtacctgcccgttcctccagctaccatctggccctacagcccccacagtcccgcccaagtggtgctcgctccgagagtcctcggctgagcaggaaagggggccatgagaggcctcccagccctggcctccggggtctgctgacagacagccctgcagctactgtcttggcggaggcccggagagccactgagagcccccggctgggtgggcagctgcctgtggtggccatcagcctgagtgaatacccagcagcacgaagatgcacctagcaccaagctccagggagaggtgctagccctggaagaagagcgggctcaggtgctggggcacgtggagcagctcaaggtccgtgtgaaggagctagagcagcagctgca

SEQ ID NO: 22763 - DNA, 4783 bp, Homo sapiens
  source 1..4783: mol_type = unassigned DNA
aggccaccgcgaccgagccgagccaggctaagggaccagtgtctccctgccccccccccacctctaggagctctggagccttaggaccatggacgctctcaataggaaccaaataggccctggatgccagacccagaccatggtgcagaaaggacccttggacctgatcgagacaggcaaagggctgaaagtgcaaacggacaaaccccacctggtgagcctgggcagtgggcgactcagcacagccatcaccctcctgccgctggaggaagggaggacggtgattggctctgcagccagagacatctcactacagggcccaggcctggctccagagcactgctacatcgagaacctgcggggcaccctcaccctctacccctgtggcaatgcctgcactattgatgggctccctgtccggcagcctacccggctcactcagggctgcatgttgtgcctgggtcagtccaccttccttcgctttaaccacccggctgaagccaagtggatgaaaagcatgattccagcagggggccgagcccctgggcccccctacagccctgttcctgcagaatcagaaagtctggtaaatgggaaccacaccccacagactgcaacacggggaccctctgcctgtgccagccacagttccctggtgagctctattgagaaggacctgcaagagatcatggactcactggtgctagaggagcctggagctgctggcaagaagcctgccgcaacctctccactgtcaccgatggctaatggtgggcgctacctgctgtctcccccaaccagccccggccatgtctgtgggctccagctatgagaacacctctccagccttctctccactctcttcaccagccagcagtggaagctgtgccagtcactcacccagtgggcaagagccaggaccttctgtgcccccgctggtacctgcccgttcctccagctaccatctggccctacagcccccacagtcccgcccaagtggtgctcgctccgagagtcctcggctgagcaggaaagggggccatgagaggcctcccagccctggcctccggggtctgctgacagacagccctgcagctactgtcttggcggaggcccggagagccactgagagcccccggctgggtgggcagctgcctgtggtggccatcagcctgagtgaatacccagcttctggtgctctcagtcaacccaccagcattcctggcagccccaagtttcagcctccagtccctgctccccgaaacaagattggcacactccaggaccgccctcccagccctttccgtgagcctccaggcagtgagcgggtgctaacaaccagcccctcacgccaactggtgggccgaacattttcagatgggttagccacccgtaccctgcagcctcctgagagtccccgcctgggccggcggggcctggacagtatgcgagaactaccccccttaagtccatctctgtcccggcgagctctctccccgctgcccacccggaccaccccagatcccaagctaaacagggaagtggcagagagtcctcggccccggcgctgggcagcccatggggcttcaccagaggacttctccctgacgctgggggcacggggccgtaggacacggagcccctcacccacactgggtgagtctctggcaccccacaagggcagcttcagtggcaggctgagcccagcctacagtctgggctctcttactggggcttcaccctgccagagtccctgtgtccagaggaagctctccagcggggacttgcgggtgcctgtcacaagggagcggaaaaatagcatcacagagatcagtgacaatgaggacgacctcctggagtaccaccggcgacagcgccaagagcggctccgggagcaggagatggagaggctggaacgccagcgcctggagaccatcctgaacctgtgtgccgaatacagccgggctgatgggggacctgaggctggggagcttcccagcattggggaggccaccgcagcattggcactggcaggccggaggccctcacgaggccttgcaggggcctctgggcggagcagcgaggagcctggcgttgccacccaacgcctatgggagagtatggagcgctcagatgaggaaaatctcaaggaggagtgcagcagcactgagagcacccagcaggagcacgaagatgcacctagcaccaagctccagggagaggtgctagccctggaagaagagcgggctcaggtgctggggcacgtggagcagctcaaggtccgtgtgaaggagctagagcagcagctgcaggagtcagcccgagaggccgaaatggagcgggcactgctgcagggagagagggaggcagagcgggcactgctgcagaaggagcagaaggcagtggatcagctgcaggagaagctggtggccttggagacaggcatccagaaggagagggacaaggaggcagaggccctggagactgagacaaagctctttgaggacttggagttccagcagttggagcgggagagccgcgtggaggaggagcgcgagctggccggccaggggctgctccggagcaaggctgagctgctccgcagcatcgccaagaggaaggagcgcctggccatcctggacagtcaggctgggcagatccgggctcaggccgtgcaggaatcagaacgcctggcccgggacaagaatgcctccttacagctgctgcaaaaggagaaggagaagctgactgtgctggaaaggagataccactcactcacagggggcaggcctttcccgaagaccacatcgaccctcaaagaggtttaccgctccaagatggatggcgaggccaccagcccccttccccggacccgcagcggccccctcccctcctcctctggctcttcctcctcctcctcccagctcagcgtggctaccctggggcgtagcccctccccaaagagcgctctactcacccagaatggcacgggcagccttcctcgcaacctggcagccacactgcaggacatcgagaccaagcgccaactagctctgcagcagaagggacaacaagtgattgaagagcagctggtcgagaaggaggtcaagatgcgggagaaacaattttcccaggcacgacccctgacccgctacctgccaatccggaaggaggactttgacctgaagacacatattgagtcatcgggccatggtgttgatacctgcctgcacgtggtgctcagcagcaaggtctgccgtggctacttggtcaagatgggcggcaagattaaatcatggaagaagcgctggtttgtcttcgaccggctcaagcgcaccctttcctattatgtggacaagcatgagacgaagctgaagggagtcatctatttccaggccattgaggaagtgtactacgaccacctgcgcagtgcagccaagagcccgaacccagccctcaccttctgcgtaaagacccatgaccggctgtactacatggtggccccatctgcagaggccatgcgtatctggatggatgtcattgtcacaggggctgagggctacactcagttcatgaactaactgccgtgggcctcctggcagagcacaactggggcttttgtataagaagactttaatattctgtaaggagcttggtcctgtgagtttctgggctctggcctcctgaagaaccagccagaagaagaaaagtagaggtggctttgctgcctcctgggagcccagaacttgcagtaaccctttagggtcctgccccaggcccagccagggctgaggagctgtcacagagagggcctcagctctgacctgacacctgctctccccagcctgttttctcttttctaaaagacaaattatggtaccataagctgccaaagatcccctcctgcctcagacccctttgccaggggctttgggggctgagcagagccacatccagagtggggtaatagctcaggcggcccgcttcccatttctcaaaccccgctctgccccattgttctcctttcccttatactttttattaccttgctcaagggccagagatctcaagtgtcaaccttgaggtcccagctccatcccctagttgcagactcatcaccatggttaccatagtgactgcttcattgccatggttacatactaattgctgcagctctgtggcccagcccactgcttcagctgtgggccatctgagggtacgtgccatcatctctccagcccaggcccctgggcatctcatgctggggggaagggactgaatacctttttccttccccctgcctgtgtcttcagccctgatgcacaggctgccagccccccagtccagccctctcccttccactggtgccttgcttagagccagaagggatgaagccgggggatctatggaacagaggaggagcgatgcagttgggagaggaagctagaagggttatggttggagttctgtacagtgttgagtttccgacagggaaagaggattcctccaatgctcctagagagaaagcctgagcaggagatgatgcagcagaggggaagggccctgtggtgccgccgcccttccttcagcctccgaagggtgatggaaatggagagtggaggaccaggcctccagctgtctggcctcgcccttcacgccttaacactaagcccacctcccctgctctccttcccagcattgagcccttggttgcctgggcccaggctgggggttttcagtatttgtaagcatttcagcagaacaataaagcctttggactacg

SEQ ID NO: 22764 - DNA, 15249 bp, Homo sapiens
  source 1..15249: mol_type = unassigned DNA
gagcccgcgccctcacgctcagcaccccagcctgcctgcccgcccgcctgccctgccgctgcccgctgtcacaccctgtagcgcgggagcttctcgcagcgccccgggccttctcgtggtaccctgcctgctgcctttgcccccgcactgactgcccggctccagcagccatggtggccggcatgctcatgccacgggaccagctgcgggccatctatgaggtgctcttccgcgagggcgtgatggtggccaagaaggaccggcggccccgcagcttgcacccccatgtgcccggcgtcaccaacctgcaggtcatgcgtgccatggcgtccctgcgggcacggggcctggtccgcgagacctttgcctggtgccacttttactggtacctcaccaatgaaggcatcgcccacctccgccagtacctgcacctgccgccagagatcgtgcccgcctctctgcagcgcgtgcgccgccccgtcgccatggtgatgcccgcacgccgcaccccccacgtgcaggctgtgcagggtcccctgggctccccacccaagcgggggccgctgccgacggaggagcagcgggtctaccgtcggaaggagcttgaggaggtgtcacctgagacccctgtggtgcctgctaccacccagcggaccctggccaggccaggcccggagcctgccccagccacagatgagcgggatcgtgtgcagaagaaaaccttcaccaagtgggtcaacaagcacctcatcaaggcccagaggcacatcagtgacctgtatgaagacctccgcgatggccacaacctcatctccctgctggaggtcctctcgggggacagcctgccccgggagaaggggaggatgcgtttccacaagctgcagaatgtccagattgccctggactacctccggcaccgccaggtgaagctggtgaacatcaggaatgatgacatcgctgacggcaaccccaagctgacccttggcctcatctggacaatcattctgcacttccagatctcagatatccaggtgagtgggcagtcggaggacatgacggccaaggagaagctgctgctgtggtcgcagcgaatggtggaggggtaccagggcctgcgatgcgacaacttcacctccagctggagagacggccgcctcttcaatgccatcatccaccggcacaagcccctgctcatcgacatgaacaaggtgtaccggcagaccaacctggagaacctggaccaggccttctctgtggcggagcgggacctgggagtgacgcggctcctggaccctgaggacgtggatgtccctcagcccgacgagaagtccatcatcacctacgtctcgtcgctgtatgacgccatgccccgcgtgccggacgtgcaggatggggtgagggccaacgagctgcagctgcgctggcaggagtaccgggagctggtgctgctgctgcttcagtggatgcgacaccacacggccgcctttgaggaacgcaggttcccctccagcttcgaggagattgagatcctgtggtctcagttcctgaagtttaaggagatggagctaccagccaaggaggccgacaagaacaggtccaagggcatctaccaatccctggagggagcggtgcaagcaggccagctcaaggtgccccctggctaccacccgctggatgtggagaaggagtggggcaagctgcacgtggccatcctggagcgggagaagcagctccgcagcgagtttgagaggctggagtgtcttcagcgcatcgtgaccaagctgcagatggaggcggggctgtgtgaggagcagctgaaccaggccgacgccctgctgcagtcggatgtccggctgctggctgcaggcaaagtgccacagcgggcgggggaggtggaacgggacttggacaaggcggatagcatgatccggctgctcttcaacgacgtgcagaccctcaaggatggacggcacccgcagggcgagcagatgtaccgcagggtgtaccgtctgcacgagcgcctggtagccatccgcaccgagtacaacctacggctgaaggcaggcgtggcggcccctgcaacccaggtggcccaggtgactctgcagagtgtgcagaggcgccccgagctggaggactccactctgcgctacctgcaggacctgctggcctgggtggaggagaaccagcaccgtgtggatggcgctgagtggggtgtggacctgcccagcgtggaggcgcagctgggcagccaccgaggcctgcaccagtccatcgaagaattccgggccaagatcgagcgggcacggagtgacgagggccagctctcccccgccacccggggtgcctaccgtgactgcctgggtcggctggacctgcagtacgccaagctgctgaactcctccaaggcccgcctcaggtccctggagagcttgcacagctttgtggcagccgccactaaggagctaatgtggctgaatgagaaggaggaggaggaggtgggcttcgactggagcgaccgcaacaccaacatgaccgccaagaaggagagctactcggcgctgatgcgggagctggagctgaaggagaagaagatcaaggagctccaaaatgctggggaccggctgctgcgggaggaccacccggcccggcccacggtggagtccttccaggcggccctgcagacgcagtggagctggatgctacagctgtgctgctgtatcgaggcacacctgaaggagaacgctgcctactttcagttcttctcagatgtgcgggaggccgaggggcagttgcagaagctgcaggaggcactgcgtaggaaatacagttgtgatcgctccgccaccgtcacccggctggaggacctgctgcaggatgcccaggacgagaaggaacagctgaacgagtacaagggccacctctcaggcctggccaagcgggccaaggccgtcgtgcagctgaagccccgccacccagcccaccccatgcggggccgcctgcccctgctggccgtgtgcgactataagcaggtggaggtgactgtgcacaagggtgacgagtgccagctggtgggccctgcacagccgtcccactggaaggtgctcagcagctccggcagcgaggccgccgtgccctccgtgtgcttcctggtgcccccgcccaaccaggaggcccaggaggccgtcaccaggctggaggcccagcaccaggccctggtcacgctgtggcaccagttgcacgtggacatgaagagccttctggcctggcagagccttcgccgcgacgtgcagctcatccgctcctggtccctggccacgttccgcaccctgaagccagaggagcagcgccaagccctgcacagcctggagctgcactaccaggccttcctgcgggacagccaggacgcgggcggcttcggacccgaggaccggctgatggctgagcgcgagtacggctcctgcagccaccactaccagcagctgctgcagagcctggaacagggtgcacaggaagagtctcgctgccagcgctgcatctccgagctcaaagacatccggctgcagctggaggcctgtgagacgcgcaccgtgcaccgcctgcggctgccgctggacaaagagccggcacgggagtgtgcccagcgcatcgccgagcagcagaaggcacaggcagaggtggaggggctgggcaagggggtcgcccggctctctgccgaggccgagaaggtcttggccctaccagagccatcgcctgcggcccccacgctgcgctcggagctggagctgacgctgggcaagctggagcaggtccgcagcctgtctgccatctacctggagaagctcaagaccatcagcctggtgatccgcggcacgcagggggccgaggaggtgctcagggcccacgaggagcagctcaaggaggcccaggccgtgccggccaccctcccggagctcgaggccaccaaggcctctctgaagaagctgcgggcccaggccgaggcacagcagcccacgttcgacgccctgcgggatgagctgcggggggcacaggaggtgggggagcgactgcagcagcggcacggggagcgggacgtggaggtggagcgctggcgggagcgggtcgcccagttgcttgagcgctggcaggctgtgctggcccagaccgacgtgcggcagcgcgagctcgagcaactgggccgccagctgcgttactaccgcgagagtgcagaccccttgggcgcctggctgcaggacgccaggcggcggcaggagcagatccaggccatgccgctggccgacagccaggctgtgcgggagcagctgcggcaggagcaggccctgctggaggagatcgagcgccacggcgagaaggtcgaggagtgccagaggtttgcgaaacagtacatcaacgccatcaaggactatgaactccagctggtgacgtacaaggcgcagcttgagccggtggcctccccggccaagaagcccaaggtccagtcgggatcagagagtgtcatccaggagtacgtggacctgcgtacgcactacagcgagctgaccacactgacgagccagtacatcaagttcatcagcgagactctgcggcgcatggaggaggaggagaggctggctgagcagcagcgggcagaggagcgcgagcggctggccgaggtggaggccgcgctggagaagcagcggcagctggccgaggcgcacgcccaggcaaaggcacaggcggagcgggaggcgaaggagctgcagcagcgcatgcaggaggaggtggtgcggcgggaggaggcggcggtggacgcgcagcagcagaagcgcagcattcaggaggagctgcagcagctgcggcagagctcggaggcggagatccaggccaaggcccggcaggcagaggcggctgagcgcagccggctgcgcatcgaggaggagatccgcgtggtgcgcctgcagttggaggccaccgagcgccagcgtggcggggctgagggggagctgcaggcactgcgtgcacgggcggaggaggctgaggcacaaaagcgacaggcgcaggaggaggccgagcgcttgcggaggcaggtgcaggacgagagccagcgtaagcggcaggcggaggtggagctggcctcgcgcgtgaaggccgaggccgaggcggcgcgcgagaagcagcgggccctgcaggccctggaggagctgcggctgcaggcggaggaggcggagcggcgcctgcggcaggccgaggtggagcgagcgcggcaggtacaggtggccctggagacggcgcagcgcagtgcagaggcggagctgcagagcaaacgcgcctccttcgccgagaagacggcacagctggagcgctccctgcaggaggaacacgtggctgtggcacagctgcgggaggaggctgagcggcgggcacagcagcaggccgaggccgagcgggcgcgcgaggaggcagagcgggagctggagcgctggcagctcaaggccaacgaggcgctacggctgcggctgcaggcggaggaggtggcgcagcagaagagcctggcgcaggccgaggctgagaagcagaaggaggaggcggagcgcgaggcgcggcggcgcggcaaggcggaggagcaggccgtccggcagcgggagctggctgaacaagagctggagaagcagcggcagctggcggaaggcaccgcgcagcagcgcctggccgcggagcaggagttgatccggctgcgggccgagacggagcagggggagcagcagcggcagctgctggaggaggagctggcccggctgcagcgtgaggcggctgcagccacgcagaaacggcaggagctggaagccgagctggccaaggtgcgggccgagatggaggtgctgctggccagcaaggcgagggctgaggaggagtcgcgctccaccagcgagaagtccaagcagaggctggaggccgaggccggccggttccgcgagctggccgaggaggccgcccgcctgcgtgccctggcggaagaggccaagcggcagcggcagctggccgaggaagacgcggcgcggcagcgggccgaggcggagcgggtgcttgcggagaagctggccgccatcggcgaggccacgcggctcaagacggaggcggagatcgcgctcaaggagaaggaggcggagaacgagcgcctgcggcggctggcggaggacgaggccttccagcggcggcggctggaggagcaggccgcgcaacacaaggctgacatcgaggagcgcctggcccagctgcgcaaggcatcggacagcgagctggagcggcagaaggggctggtggaggacacgctgaggcagcggcggcaggtggaggaggagatcctggcgctgaaggcgagcttcgagaaggcggccgctggcaaggcggagctggagctggagctgggacgcatccgcagcaacgcggaggacacgctgcgcagcaaggagcaggccgagctggaggctgcgaggcagcggcagctggcggcggaggaggagcggcggcgccgtgaggctgaggagcgcgtgcagaagagcctggcggccgaggaggaggccgcacggcagcggaaggcggcgctggaggaagtcgagcggctgaaagccaaggtggaggaggcgcggcgcctgcgggagcgagcggagcaggagtcggcgcggcagctgcagctggcccaggaggccgcccagaagcggctgcaggcggaagagaaggcacacgccttcgcggtgcagcagaaggagcaggagctacagcagacgctgcagcaggagcagagcgtgctggaccagctgcgcggcgaggcggaggcggcccggcgggcggctgaggaggcggaggaggcccgggtgcaggcggagcgtgaggcggcgcagtcccggcggcaggtggaagaggccgagcggctgaagcagtcggcagaggagcaggcacaggcccgggctcaggcacaggcggctgcagagaagctgcgcaaggaggccgagcaagaggcggcgcggcgggcacaggcggagcaggcggccctgcggcagaagcaggcagctgacgcggagatggagaagcataagaaattcgccgagcagacgctgcggcagaaggcgcaggtggagcaggagctgacaacactgcggctgcagctggaggagaccgaccaccagaagaacctgctggacgaggagctgcagcggctgaaggcggaggccacggaggccgcacgccagcgcagccaggtggaggaggagctcttctcggtgcgcgtgcagatggaggagctgagcaagctcaaggcacgcatcgaggctgagaaccgcgcactcatcttgcgtgacaaggacaatacgcagcgcttcctgcaggaggaggctgagaagatgaagcaggtggcggaggaggccgcgcggctgagtgtggcggcccaagaggctgcgcgactgcggcagctggcagaggaggacctggcacagcagcgggccttggcagagaagatgctcaaggagaagatgcaggcggtgcaggaggccacgcgactcaaggctgaggcggaactgctgcagcagcagaaggagcttgcgcaggagcaggcgcggcggctgcaggaggacaaggagcagatggcgcagcagctggcggaggagacgcagggcttccagcggacgctggaggccgagcggcagcggcagctggagatgagcgctgaggctgagcgcctcaagctgcgtgtggccgagatgagccgagcccaggcccgcgctgaggaggacgcccagcgcttccggaagcaggcggaggagatcggtgagaagctgcaccgcacggagctcgccacccaggagaaggtgaccctggtgcagacactggagatccagcgacagcagagtgaccatgatgccgagcgcctgcgggaggccatcgctgagctggagcgtgagaaggagaagctccaacaggaggccaaactgctgcagctcaagtctgaggagatgcagacggtgcagcaggagcagctgctgcaggagacgcaggccctgcagcaaagcttcctctctgaaaaggacagcctgctacagcgggagcgcttcatcgagcaggagaaggccaagctggagcagctcttccaggacgaggtggccaaggcacagcagctgcgtgaggagcagcagcggcagcagcagcagatggagcaggaacggcagcggctggtggccagcatggaggaggcgcggcggcggcagcatgaggccgaggagggcgtgcggcgcaagcaggaggagctgcagcagctggagcagcagcggcggcagcaggaggagctgctggctgaggagaaccagaggctgcgtgagcagctgcagctcctggaggagcagcaccgggccgcgctggcgcactcagaggaggtcactgcctcgcaggtggctgccacaaagaccctgcccaatggccgggatgcacttgatggccccgcggcagaggcagagccggagcacagcttcgatggcctgcggcggaaggtgtcagctcagaggctgcaggaggccggcatcctgagtgcggaggagctgcagcggttggcgcagggccacaccacggtggacgagctcgcacggcgggaagacgtgcgccactacctgcagggccgcagcagtatcgcagggctgttgctgaaggccaccaatgagaagctgagtgtttacgccgccctgcagaggcagctgctgagtcccggcacggccctcatcctgctggaggcgcaggcggcctcaggcttcctgctggaccctgtgcggaaccggcggctgaccgtcaacgaggctgtgaaggagggtgtggtgggccccgagctgcaccacaagctgctgtcggccgagcgcgccgtcactggctacaaggacccctacactggccagcagatctctctcttccaagccatgcagaagggcctcatcgtccgggagcacggcatccgcctgctggaggcccagatcgccacgggcggcgttatcgaccccgtgcacagccaccgcgtgcccgtggacgtggcctaccggcgcggctacttcgacgaggagatgaaccgcgtcctggcggaccccagcgacgacaccaagggcttctttgaccccaacacgcacgagaacctcacgtacctgcagctactggagcgctgcgtggaggaccccgagacgggcctgtgccttctgccactcacggataaggctgccaagggcggggagctggtctacactgactccgaggcccgggacgtctttgagaaggccaccgtgtctgcgccgttcggcaagttccagggcaagacggtgaccatttgggagatcatcaactcggaatacttcacggcagagcagcggcgggacctgctgcggcagttccgcacgggccggatcacagtggagaagatcatcaagatcatcatcacggtggtggaggagcaggagcagaagggccggctttgctttgagggcctgcgcagcctggtgccagccgccgagctgctggagagcagggtcatcgaccgcgagctctaccagcagctgcagcgaggtgagcgctctgtgcgagacgtagccgaggtggacactgtgcggcgggctctccggggtgccaacgtcatcgcgggtgtatggctggaggaggcggggcagaagctgagtatctacaatgccctgaagaaagacctgctgccatccgacatggccgtggccctgttggaagcccaggccggcaccgggcacatcatcgaccccgccaccagcgcccggctgaccgtggacgaggcagtgcgtgctggcctggtgggccccgagtttcatgagaagctgctatcagccgagaaggctgtgacagggtacagggacccctacacagggcagagcgtctccctgttccaggccctgaagaagggcctcattccccgggagcagggcctgcgcctgttggacgcccagctgtccacgggcggcatcgtggaccccagcaagagccaccgcgtgcccctggatgtcgcctgcgcccgaggctgcctggatgaggagaccagcagggccctgtcggcaccaagggccgacgccaaggcctacagtgaccccagcacaggggagccggccacctacggcgagctccagcagcggtgccggcccgaccagctgaccgggctgagcctgctgccgctctcagaaaaggctgctcgggcccggcaggaggagctctactcagagctgcaggcccgtgagacctttgaaaagaccccggttgaggtccccgtgggtggcttcaagggcaggacggtgacggtgtgggagctcatcagctctgagtacttcactgcggagcagcggcaggagctgttgcgtcagttccgcacgggcaaggtcaccgtggagaaggtcatcaagattctcattaccatcgtggaggaggtggagaccctgcggcaggagaggctgtccttcagcggcctccgtgcccctgtgccagccagcgagctcctggcttccggggtcctcagcagagcccagtttgagcagctcaaggacggcaagacgacggtcaaggacctttcggagctgggctccgtgcggacgctgctgcagggcagtggctgcctcgccggcatctacctggaggacaccaaggagaaggtgtccatctacgaggccatgcgccggggcctgctgagagccacaacggctgcgctcctgctggaggcgcaggcggccactggcttcctggtggaccccgtgcggaaccagcgcctgtatgtccacgaggccgtgaaggcgggcgtggtgggccccgagcttcacgagcagctgctgtctgccgagaaggccgtcaccggctacagagacccctactcgggcagcaccatctccctcttccaggccatgcagaagggcctggttctccggcagcacggcatccgcctgctggaggcccagatcgccacgggcggcatcatcgaccccgtgcacagccaccgcgtgcctgtggacgtggcctaccagcgcggctacttcagtgaggagatgaaccgcgtcctggcggaccccagcgacgacaccaagggcttctttgaccccaacacgcatgagaacctcacgtacaggcagctgctggagcggtgcgtggaggaccccgagacgggcttgcgccttctgccactgaaaggggcggagaaggctgaggtggtggagaccacgcaggtgtacactgaggaggagacaagaagggcatttgaagagacacagatcgacattcccggcggcggcagccacggcggctccaccatgtccctgtgggaggtgatgcagtcggacctgatccccgaggagcagcgggcccagctgatggctgacttccaggccggccgggtgaccaaggaacgcatgatcatcatcatcatcgagatcattgagaagacagagatcatccgccagcagggtctggcctcctacgactacgtgcgccgccgcctcacggctgaggacctgttcgaggctcggatcatctctctcgagacctacaacctgctccgggagggcaccaggagcctccgtgaggctctcgaggcggagtccgcctggtgctacctctatggcacgggctccgtggctggtgtctacctgcccggttccaggcagacactgagcatctaccaggctctcaagaaagggctgctgagtgccgaggtggcccgcctgctgctggaggcacaggcagccacaggcttcctgctggacccggtgaagggggagcggctgactgtggatgaggctgtgcggaagggcctcgtggggcccgagctgcacgaccgcctgctctcggctgagcgggcggtcaccggctaccgtgacccctacaccgagcagaccatctcgctcttccaggccatgaagaaggagctgatccctactgaggaggccctgcggctgctggatgcccagctggccaccggcggcatcgtggacccccgcctgggcttccaccttcccctggaggtggcttaccagcgtggctacctcaacaaggacacgcacgaccagctgtcagagcccagcgaggtgcgcagctacgtggacccgtccaccgacgagcgcctcagctacacgcagctgctcaggcggtgccgtcgtgacgacggcaccggccagctgctcctgccactgtcggacgcccgcaagctgaccttccgtggcctgcggaagcagatcaccatggaggagctggtgcgctcgcaggtcatggacgaggccacggcgctgcagctgcgggagggcctgacctccatcgaggaggtcaccaagaacttgcagaagttcctggaaggcaccagctgcatcgctggtgtcttcgtggacgccaccaaggaacggctctcggtgtaccaggccatgaagaagggcatcatccgccccggcacagcctttgagctcctggaggcgcaggcggccaccggttacgtcatcgaccccatcaagggactgaagctgacggtggaggaggctgtgcgtatgggcattgtgggccccgagttcaaggacaagctgctgtcggccgagcgcgccgtcactgggtacaaggacccctactctgggaagctcatctccctcttccaggccatgaagaagggcctgatcctgaaggaccatggcatccgcctgctggaggcccagatcgccacgggcggcatcatcgaccctgaggagagccaccggctgcccgtggaggtggcctacaagcgcggcctcttcgatgaggagatgaacgagatcctgaccgacccctcggacgacaccaagggcttctttgaccctaacacggaggagaacctcacctacctgcagctgatggagcgttgtatcactgacccccagacgggcctgtgtctcttgccgctgaaggagaagaagcgggagcggaagacgtcctccaagtcctccgtgcgcaagcgccgagtggtcatcgtggaccccgagacgggcaaggagatgtcagtgtacgaggcctaccgcaagggcctgattgaccaccagacgtacctggagctgtccgagcaggagtgcgagtgggaggagatcaccatctcctcctcggacggcgtggtcaagtccatgatcatcgaccgccgctccgggcgccagtacgacatcgatgatgccatcgccaagaacctcatcgaccgctcggcactggaccagtaccgcgccggcacgctctccatcaccgagttcgccgacatgctctcgggcaacgccggtggtttccgctcccgttcctcctcggtgggatcctcctcctcctaccccatcagccccgccgtctccaggacccagctggcctcctggtcagaccccactgaggagacgggccccgtggctggcatcctggacacggagacgctggagaaggtgtccatcaccgaggccatgcaccggaacctggtggataacatcacggggcagcggctgctggaggcgcaggcctgcaccgggggcatcatcgaccccagcaccggtgagcgcttccctgtcaccgacgccgtcaacaagggcctggtggacaagatcatggtggaccgcatcaacctggcccagaaggccttctgcggcttcgaggacccacgcaccaagaccaagatgtcggccgcccaggccctgaagaagggctggctctactacgaggccggccagcgcttcctggaggtgcagtacctgaccggcggcttgatcgagcccgacacgccgggccgcgtgcccctggacgaggccctgcagcgcggcacggtggacgcccgcaccgcacagaagctgcgtgacgtgggcgcctactccaagtacctcacctgccctaagaccaagctcaagatctcctataaggacgcgctggaccgcagcatggtggaggagggcacggggctgcggctgctggaggctgccgcgcagtccaccaagggctactacagcccctacagcgtcagcggctccggctctaccgctggctcccgcaccggctcgcgcaccggctcccgggccggctcccgccgcggcagctttgacgccaccggctccggcttctccatgaccttctcttcatcctcctactcctcctcgggctacggccgccgctacgcctcggggtcctcggcctccctggggggccctgagtctgccgtggcctgaggctgcctgcgcccaccccgctctgcatgcggcccagcccggctcccaccgaggcgcgggggccgttttcaacgcttaaaggtgtcttcctcccaagtggtgcctaaagtttaaccaaaaagaccagactaatatattaatatatatctgctgtccagacagcctgtatcttgggggacagggctggcccagccctgctggccgcctcaccccctcgggtctcctcactcccttctacctgccactcacacagccaggtgccttggagggtcccaagctgggccccagcccaccctcctgtcttcccagggtagcccgcctgccagtcctagctgcacagggcagctgggcccaaccctgtctgtagagggccctggtgtttctagcactggcctgcacggtgggccttgctggggacggggggccccagtcagcctctctcccagtctacccagagaagccccttccccatgggaagacgaggccctcgggcccagcccccacagtgctgtctgatctgtgctttccagctcaccccccacactcactcctgagacccctggcctccggcgtcagcctccagcctctgttcccctagtaagtgccttccatgtcggcctctaaccccaggccccgaggacccagacccagtggggaggcggacgttccagccggcatggctgggaactgcagacctgtcctcctggtgggtccaggggcccctccagcttgtggagccccacactggggtgccgcctgcccgtctctctcccatggagccccagccccctttgggcccagggacaccagccaggctctgtgctgaccctcctgttgcacccagccctggtctcagcagcgaccacccctgcctccaccctctgagctttgcatgttccactaaccccgggcgggtggcaggtggaggtgtcaggctgctggcgcctctgcaagggcagaacactaacctgaccgtgggcggggccttgcggtatccgcccccaataaaagcaattccaacctt

SEQ ID NO: 22765 - DNA, 14797 bp, Homo sapiens
  source 1..14797: mol_type = unassigned DNA
tgagctgagcctgtgccgagtgagcgtctcgtggggccgccagccttcagctgcctgtgtgccacacggggctgcccagagcaccgtgcctgaggccgagggtccgggcgacgaaggtgtgggggcagcatgtctcagcaccagctccgcgtgccgcagcccgagggcctgggccgaaagagaaccagctcggaggacaacctgtacctggctgtgctcagggcctctgagggcaagaaagatgagcgggatcgtgtgcagaagaaaaccttcaccaagtgggtcaacaagcacctcatcaaggcccagaggcacatcagtgacctgtatgaagacctccgcgatggccacaacctcatctccctgctggaggtcctctcgggggacagcctgccccgggagaaggggaggatgcgtttccacaagctgcagaatgtccagattgccctggactacctccggcaccgccaggtgaagctggtgaacatcaggaatgatgacatcgctgacggcaaccccaagctgacccttggcctcatctggacaatcattctgcacttccagatctcagatatccaggtgagtgggcagtcggaggacatgacggccaaggagaagctgctgctgtggtcgcagcgaatggtggaggggtaccagggcctgcgatgcgacaacttcacctccagctggagagacggccgcctcttcaatgccatcatccaccggcacaagcccctgctcatcgacatgaacaaggtgtaccggcagaccaacctggagaacctggaccaggccttctctgtggcggagcgggacctgggagtgacgcggctcctggaccctgaggacgtggatgtccctcagcccgacgagaagtccatcatcacctacgtctcgtcgctgtatgacgccatgccccgcgtgccggacgtgcaggatggggtgagggccaacgagctgcagctgcgctggcaggagtaccgggagctggtgctgctgctgcttcagtggatgcgacaccacacggccgcctttgaggaacgcaggttcccctccagcttcgaggagattgagatcctgtggtctcagttcctgaagtttaaggagatggagctaccagccaaggaggccgacaagaacaggtccaagggcatctaccaatccctggagggagcggtgcaagcaggccagctcaaggtgccccctggctaccacccgctggatgtggagaaggagtggggcaagctgcacgtggccatcctggagcgggagaagcagctccgcagcgagtttgagaggctggagtgtcttcagcgcatcgtgaccaagctgcagatggaggcggggctgtgtgaggagcagctgaaccaggccgacgccctgctgcagtcggatgtccggctgctggctgcaggcaaagtgccacagcgggcgggggaggtggaacgggacttggacaaggcggatagcatgatccggctgctcttcaacgacgtgcagaccctcaaggatggacggcacccgcagggcgagcagatgtaccgcagggtgtaccgtctgcacgagcgcctggtagccatccgcaccgagtacaacctacggctgaaggcaggcgtggcggcccctgcaacccaggtggcccaggtgactctgcagagtgtgcagaggcgccccgagctggaggactccactctgcgctacctgcaggacctgctggcctgggtggaggagaaccagcaccgtgtggatggcgctgagtggggtgtggacctgcccagcgtggaggcgcagctgggcagccaccgaggcctgcaccagtccatcgaagaattccgggccaagatcgagcgggcacggagtgacgagggccagctctcccccgccacccggggtgcctaccgtgactgcctgggtcggctggacctgcagtacgccaagctgctgaactcctccaaggcccgcctcaggtccctggagagcttgcacagctttgtggcagccgccactaaggagctaatgtggctgaatgagaaggaggaggaggaggtgggcttcgactggagcgaccgcaacaccaacatgaccgccaagaaggagagctactcggcgctgatgcgggagctggagctgaaggagaagaagatcaaggagctccaaaatgctggggaccggctgctgcgggaggaccacccggcccggcccacggtggagtccttccaggcggccctgcagacgcagtggagctggatgctacagctgtgctgctgtatcgaggcacacctgaaggagaacgctgcctactttcagttcttctcagatgtgcgggaggccgaggggcagttgcagaagctgcaggaggcactgcgtaggaaatacagttgtgatcgctccgccaccgtcacccggctggaggacctgctgcaggatgcccaggacgagaaggaacagctgaacgagtacaagggccacctctcaggcctggccaagcgggccaaggccgtcgtgcagctgaagccccgccacccagcccaccccatgcggggccgcctgcccctgctggccgtgtgcgactataagcaggtggaggtgactgtgcacaagggtgacgagtgccagctggtgggccctgcacagccgtcccactggaaggtgctcagcagctccggcagcgaggccgccgtgccctccgtgtgcttcctggtgcccccgcccaaccaggaggcccaggaggccgtcaccaggctggaggcccagcaccaggccctggtcacgctgtggcaccagttgcacgtggacatgaagagccttctggcctggcagagccttcgccgcgacgtgcagctcatccgctcctggtccctggccacgttccgcaccctgaagccagaggagcagcgccaagccctgcacagcctggagctgcactaccaggccttcctgcgggacagccaggacgcgggcggcttcggacccgaggaccggctgatggctgagcgcgagtacggctcctgcagccaccactaccagcagctgctgcagagcctggaacagggtgcacaggaagagtctcgctgccagcgctgcatctccgagctcaaagacatccggctgcagctggaggcctgtgagacgcgcaccgtgcaccgcctgcggctgccgctggacaaagagccggcacgggagtgtgcccagcgcatcgccgagcagcagaaggcacaggcagaggtggaggggctgggcaagggggtcgcccggctctctgccgaggccgagaaggtcttggccctaccagagccatcgcctgcggcccccacgctgcgctcggagctggagctgacgctgggcaagctggagcaggtccgcagcctgtctgccatctacctggagaagctcaagaccatcagcctggtgatccgcggcacgcagggggccgaggaggtgctcagggcccacgaggagcagctcaaggaggcccaggccgtgccggccaccctcccggagctcgaggccaccaaggcctctctgaagaagctgcgggcccaggccgaggcacagcagcccacgttcgacgccctgcgggatgagctgcggggggcacaggaggtgggggagcgactgcagcagcggcacggggagcgggacgtggaggtggagcgctggcgggagcgggtcgcccagttgcttgagcgctggcaggctgtgctggcccagaccgacgtgcggcagcgcgagctcgagcaactgggccgccagctgcgttactaccgcgagagtgcagaccccttgggcgcctggctgcaggacgccaggcggcggcaggagcagatccaggccatgccgctggccgacagccaggctgtgcgggagcagctgcggcaggagcaggccctgctggaggagatcgagcgccacggcgagaaggtcgaggagtgccagaggtttgcgaaacagtacatcaacgccatcaaggactatgaactccagctggtgacgtacaaggcgcagcttgagccggtggcctccccggccaagaagcccaaggtccagtcgggatcagagagtgtcatccaggagtacgtggacctgcgtacgcactacagcgagctgaccacactgacgagccagtacatcaagttcatcagcgagactctgcggcgcatggaggaggaggagaggctggctgagcagcagcgggcagaggagcgcgagcggctggccgaggtggaggccgcgctggagaagcagcggcagctggccgaggcgcacgcccaggcaaaggcacaggcggagcgggaggcgaaggagctgcagcagcgcatgcaggaggaggtggtgcggcgggaggaggcggcggtggacgcgcagcagcagaagcgcagcattcaggaggagctgcagcagctgcggcagagctcggaggcggagatccaggccaaggcccggcaggcagaggcggctgagcgcagccggctgcgcatcgaggaggagatccgcgtggtgcgcctgcagttggaggccaccgagcgccagcgtggcggggctgagggggagctgcaggcactgcgtgcacgggcggaggaggctgaggcacaaaagcgacaggcgcaggaggaggccgagcgcttgcggaggcaggtgcaggacgagagccagcgtaagcggcaggcggaggtggagctggcctcgcgcgtgaaggccgaggccgaggcggcgcgcgagaagcagcgggccctgcaggccctggaggagctgcggctgcaggcggaggaggcggagcggcgcctgcggcaggccgaggtggagcgagcgcggcaggtacaggtggccctggagacggcgcagcgcagtgcagaggcggagctgcagagcaaacgcgcctccttcgccgagaagacggcacagctggagcgctccctgcaggaggaacacgtggctgtggcacagctgcgggaggaggctgagcggcgggcacagcagcaggccgaggccgagcgggcgcgcgaggaggcagagcgggagctggagcgctggcagctcaaggccaacgaggcgctacggctgcggctgcaggcggaggaggtggcgcagcagaagagcctggcgcaggccgaggctgagaagcagaaggaggaggcggagcgcgaggcgcggcggcgcggcaaggcggaggagcaggccgtccggcagcgggagctggctgaacaagagctggagaagcagcggcagctggcggaaggcaccgcgcagcagcgcctggccgcggagcaggagttgatccggctgcgggccgagacggagcagggggagcagcagcggcagctgctggaggaggagctggcccggctgcagcgtgaggcggctgcagccacgcagaaacggcaggagctggaagccgagctggccaaggtgcgggccgagatggaggtgctgctggccagcaaggcgagggctgaggaggagtcgcgctccaccagcgagaagtccaagcagaggctggaggccgaggccggccggttccgcgagctggccgaggaggccgcccgcctgcgtgccctggcggaagaggccaagcggcagcggcagctggccgaggaagacgcggcgcggcagcgggccgaggcggagcgggtgcttgcggagaagctggccgccatcggcgaggccacgcggctcaagacggaggcggagatcgcgctcaaggagaaggaggcggagaacgagcgcctgcggcggctggcggaggacgaggccttccagcggcggcggctggaggagcaggccgcgcaacacaaggctgacatcgaggagcgcctggcccagctgcgcaaggcatcggacagcgagctggagcggcagaaggggctggtggaggacacgctgaggcagcggcggcaggtggaggaggagatcctggcgctgaaggcgagcttcgagaaggcggccgctggcaaggcggagctggagctggagctgggacgcatccgcagcaacgcggaggacacgctgcgcagcaaggagcaggccgagctggaggctgcgaggcagcggcagctggcggcggaggaggagcggcggcgccgtgaggctgaggagcgcgtgcagaagagcctggcggccgaggaggaggccgcacggcagcggaaggcggcgctggaggaagtcgagcggctgaaagccaaggtggaggaggcgcggcgcctgcgggagcgagcggagcaggagtcggcgcggcagctgcagctggcccaggaggccgcccagaagcggctgcaggcggaagagaaggcacacgccttcgcggtgcagcagaaggagcaggagctacagcagacgctgcagcaggagcagagcgtgctggaccagctgcgcggcgaggcggaggcggcccggcgggcggctgaggaggcggaggaggcccgggtgcaggcggagcgtgaggcggcgcagtcccggcggcaggtggaagaggccgagcggctgaagcagtcggcagaggagcaggcacaggcccgggctcaggcacaggcggctgcagagaagctgcgcaaggaggccgagcaagaggcggcgcggcgggcacaggcggagcaggcggccctgcggcagaagcaggcagctgacgcggagatggagaagcataagaaattcgccgagcagacgctgcggcagaaggcgcaggtggagcaggagctgacaacactgcggctgcagctggaggagaccgaccaccagaagaacctgctggacgaggagctgcagcggctgaaggcggaggccacggaggccgcacgccagcgcagccaggtggaggaggagctcttctcggtgcgcgtgcagatggaggagctgagcaagctcaaggcacgcatcgaggctgagaaccgcgcactcatcttgcgtgacaaggacaatacgcagcgcttcctgcaggaggaggctgagaagatgaagcaggtggcggaggaggccgcgcggctgagtgtggcggcccaagaggctgcgcgactgcggcagctggcagaggaggacctggcacagcagcgggccttggcagagaagatgctcaaggagaagatgcaggcggtgcaggaggccacgcgactcaaggctgaggcggaactgctgcagcagcagaaggagcttgcgcaggagcaggcgcggcggctgcaggaggacaaggagcagatggcgcagcagctggcggaggagacgcagggcttccagcggacgctggaggccgagcggcagcggcagctggagatgagcgctgaggctgagcgcctcaagctgcgtgtggccgagatgagccgagcccaggcccgcgctgaggaggacgcccagcgcttccggaagcaggcggaggagatcggtgagaagctgcaccgcacggagctcgccacccaggagaaggtgaccctggtgcagacactggagatccagcgacagcagagtgaccatgatgccgagcgcctgcgggaggccatcgctgagctggagcgtgagaaggagaagctccaacaggaggccaaactgctgcagctcaagtctgaggagatgcagacggtgcagcaggagcagctgctgcaggagacgcaggccctgcagcaaagcttcctctctgaaaaggacagcctgctacagcgggagcgcttcatcgagcaggagaaggccaagctggagcagctcttccaggacgaggtggccaaggcacagcagctgcgtgaggagcagcagcggcagcagcagcagatggagcaggaacggcagcggctggtggccagcatggaggaggcgcggcggcggcagcatgaggccgaggagggcgtgcggcgcaagcaggaggagctgcagcagctggagcagcagcggcggcagcaggaggagctgctggctgaggagaaccagaggctgcgtgagcagctgcagctcctggaggagcagcaccgggccgcgctggcgcactcagaggaggtcactgcctcgcaggtggctgccacaaagaccctgcccaatggccgggatgcacttgatggccccgcggcagaggcagagccggagcacagcttcgatggcctgcggcggaaggtgtcagctcagaggctgcaggaggccggcatcctgagtgcggaggagctgcagcggttggcgcagggccacaccacggtggacgagctcgcacggcgggaagacgtgcgccactacctgcagggccgcagcagtatcgcagggctgttgctgaaggccaccaatgagaagctgagtgtttacgccgccctgcagaggcagctgctgagtcccggcacggccctcatcctgctggaggcgcaggcggcctcaggcttcctgctggaccctgtgcggaaccggcggctgaccgtcaacgaggctgtgaaggagggtgtggtgggccccgagctgcaccacaagctgctgtcggccgagcgcgccgtcactggctacaaggacccctacactggccagcagatctctctcttccaagccatgcagaagggcctcatcgtccgggagcacggcatccgcctgctggaggcccagatcgccacgggcggcgttatcgaccccgtgcacagccaccgcgtgcccgtggacgtggcctaccggcgcggctacttcgacgaggagatgaaccgcgtcctggcggaccccagcgacgacaccaagggcttctttgaccccaacacgcacgagaacctcacgtacctgcagctactggagcgctgcgtggaggaccccgagacgggcctgtgccttctgccactcacggataaggctgccaagggcggggagctggtctacactgactccgaggcccgggacgtctttgagaaggccaccgtgtctgcgccgttcggcaagttccagggcaagacggtgaccatttgggagatcatcaactcggaatacttcacggcagagcagcggcgggacctgctgcggcagttccgcacgggccggatcacagtggagaagatcatcaagatcatcatcacggtggtggaggagcaggagcagaagggccggctttgctttgagggcctgcgcagcctggtgccagccgccgagctgctggagagcagggtcatcgaccgcgagctctaccagcagctgcagcgaggtgagcgctctgtgcgagacgtagccgaggtggacactgtgcggcgggctctccggggtgccaacgtcatcgcgggtgtatggctggaggaggcggggcagaagctgagtatctacaatgccctgaagaaagacctgctgccatccgacatggccgtggccctgttggaagcccaggccggcaccgggcacatcatcgaccccgccaccagcgcccggctgaccgtggacgaggcagtgcgtgctggcctggtgggccccgagtttcatgagaagctgctatcagccgagaaggctgtgacagggtacagggacccctacacagggcagagcgtctccctgttccaggccctgaagaagggcctcattccccgggagcagggcctgcgcctgttggacgcccagctgtccacgggcggcatcgtggaccccagcaagagccaccgcgtgcccctggatgtcgcctgcgcccgaggctgcctggatgaggagaccagcagggccctgtcggcaccaagggccgacgccaaggcctacagtgaccccagcacaggggagccggccacctacggcgagctccagcagcggtgccggcccgaccagctgaccgggctgagcctgctgccgctctcagaaaaggctgctcgggcccggcaggaggagctctactcagagctgcaggcccgtgagacctttgaaaagaccccggttgaggtccccgtgggtggcttcaagggcaggacggtgacggtgtgggagctcatcagctctgagtacttcactgcggagcagcggcaggagctgttgcgtcagttccgcacgggcaaggtcaccgtggagaaggtcatcaagattctcattaccatcgtggaggaggtggagaccctgcggcaggagaggctgtccttcagcggcctccgtgcccctgtgccagccagcgagctcctggcttccggggtcctcagcagagcccagtttgagcagctcaaggacggcaagacgacggtcaaggacctttcggagctgggctccgtgcggacgctgctgcagggcagtggctgcctcgccggcatctacctggaggacaccaaggagaaggtgtccatctacgaggccatgcgccggggcctgctgagagccacaacggctgcgctcctgctggaggcgcaggcggccactggcttcctggtggaccccgtgcggaaccagcgcctgtatgtccacgaggccgtgaaggcgggcgtggtgggccccgagcttcacgagcagctgctgtctgccgagaaggccgtcaccggctacagagacccctactcgggcagcaccatctccctcttccaggccatgcagaagggcctggttctccggcagcacggcatccgcctgctggaggcccagatcgccacgggcggcatcatcgaccccgtgcacagccaccgcgtgcctgtggacgtggcctaccagcgcggctacttcagtgaggagatgaaccgcgtcctggcggaccccagcgacgacaccaagggcttctttgaccccaacacgcatgagaacctcacgtacaggcagctgctggagcggtgcgtggaggaccccgagacgggcttgcgccttctgccactgaaaggggcggagaaggctgaggtggtggagaccacgcaggtgtacactgaggaggagacaagaagggcatttgaagagacacagatcgacattcccggcggcggcagccacggcggctccaccatgtccctgtgggaggtgatgcagtcggacctgatccccgaggagcagcgggcccagctgatggctgacttccaggccggccgggtgaccaaggaacgcatgatcatcatcatcatcgagatcattgagaagacagagatcatccgccagcagggtctggcctcctacgactacgtgcgccgccgcctcacggctgaggacctgttcgaggctcggatcatctctctcgagacctacaacctgctccgggagggcaccaggagcctccgtgaggctctcgaggcggagtccgcctggtgctacctctatggcacgggctccgtggctggtgtctacctgcccggttccaggcagacactgagcatctaccaggctctcaagaaagggctgctgagtgccgaggtggcccgcctgctgctggaggcacaggcagccacaggcttcctgctggacccggtgaagggggagcggctgactgtggatgaggctgtgcggaagggcctcgtggggcccgagctgcacgaccgcctgctctcggctgagcgggcggtcaccggctaccgtgacccctacaccgagcagaccatctcgctcttccaggccatgaagaaggagctgatccctactgaggaggccctgcggctgctggatgcccagctggccaccggcggcatcgtggacccccgcctgggcttccaccttcccctggaggtggcttaccagcgtggctacctcaacaaggacacgcacgaccagctgtcagagcccagcgaggtgcgcagctacgtggacccgtccaccgacgagcgcctcagctacacgcagctgctcaggcggtgccgtcgtgacgacggcaccggccagctgctcctgccactgtcggacgcccgcaagctgaccttccgtggcctgcggaagcagatcaccatggaggagctggtgcgctcgcaggtcatggacgaggccacggcgctgcagctgcgggagggcctgacctccatcgaggaggtcaccaagaacttgcagaagttcctggaaggcaccagctgcatcgctggtgtcttcgtggacgccaccaaggaacggctctcggtgtaccaggccatgaagaagggcatcatccgccccggcacagcctttgagctcctggaggcgcaggcggccaccggttacgtcatcgaccccatcaagggactgaagctgacggtggaggaggctgtgcgtatgggcattgtgggccccgagttcaaggacaagctgctgtcggccgagcgcgccgtcactgggtacaaggacccctactctgggaagctcatctccctcttccaggccatgaagaagggcctgatcctgaaggaccatggcatccgcctgctggaggcccagatcgccacgggcggcatcatcgaccctgaggagagccaccggctgcccgtggaggtggcctacaagcgcggcctcttcgatgaggagatgaacgagatcctgaccgacccctcggacgacaccaagggcttctttgaccctaacacggaggagaacctcacctacctgcagctgatggagcgttgtatcactgacccccagacgggcctgtgtctcttgccgctgaaggagaagaagcgggagcggaagacgtcctccaagtcctccgtgcgcaagcgccgagtggtcatcgtggaccccgagacgggcaaggagatgtcagtgtacgaggcctaccgcaagggcctgattgaccaccagacgtacctggagctgtccgagcaggagtgcgagtgggaggagatcaccatctcctcctcggacggcgtggtcaagtccatgatcatcgaccgccgctccgggcgccagtacgacatcgatgatgccatcgccaagaacctcatcgaccgctcggcactggaccagtaccgcgccggcacgctctccatcaccgagttcgccgacatgctctcgggcaacgccggtggtttccgctcccgttcctcctcggtgggatcctcctcctcctaccccatcagccccgccgtctccaggacccagctggcctcctggtcagaccccactgaggagacgggccccgtggctggcatcctggacacggagacgctggagaaggtgtccatcaccgaggccatgcaccggaacctggtggataacatcacggggcagcggctgctggaggcgcaggcctgcaccgggggcatcatcgaccccagcaccggtgagcgcttccctgtcaccgacgccgtcaacaagggcctggtggacaagatcatggtggaccgcatcaacctggcccagaaggccttctgcggcttcgaggacccacgcaccaagaccaagatgtcggccgcccaggccctgaagaagggctggctctactacgaggccggccagcgcttcctggaggtgcagtacctgaccggcggcttgatcgagcccgacacgccgggccgcgtgcccctggacgaggccctgcagcgcggcacggtggacgcccgcaccgcacagaagctgcgtgacgtgggcgcctactccaagtacctcacctgccctaagaccaagctcaagatctcctataaggacgcgctggaccgcagcatggtggaggagggcacggggctgcggctgctggaggctgccgcgcagtccaccaagggctactacagcccctacagcgtcagcggctccggctctaccgctggctcccgcaccggctcgcgcaccggctcccgggccggctcccgccgcggcagctttgacgccaccggctccggcttctccatgaccttctcttcatcctcctactcctcctcgggctacggccgccgctacgcctcggggtcctcggcctccctggggggccctgagtctgccgtggcctgaggctgcctgcgcccaccccgctctgcatgcggcccagcccggctcccaccgaggcgcgggggccgttttcaacgcttaaaggtgtcttcctcccaagtggtgcctaaagtttaaccaaaaagaccagactaatatattaatatatatctgctgtccagacagcctgtatcttgggggacagggctggcccagccctgctggccgcctcaccccctcgggtctcctcactcccttctacctgccactcacacagccaggtgccttggagggtcccaagctgggccccagcccaccctcctgtcttcccagggtagcccgcctgccagtcctagctgcacagggcagctgggcccaaccctgtctgtagagggccctggtgtttctagcactggcctgcacggtgggccttgctggggacggggggccccagtcagcctctctcccagtctacccagagaagccccttccccatgggaagacgaggccctcgggcccagcccccacagtgctgtctgatctgtgctttccagctcaccccccacactcactcctgagacccctggcctccggcgtcagcctccagcctctgttcccctagtaagtgccttccatgtcggcctctaaccccaggccccgaggacccagacccagtggggaggcggacgttccagccggcatggctgggaactgcagacctgtcctcctggtgggtccaggggcccctccagcttgtggagccccacactggggtgccgcctgcccgtctctctcccatggagccccagccccctttgggcccagggacaccagccaggctctgtgctgaccctcctgttgcacccagccctggtctcagcagcgaccacccctgcctccaccctctgagctttgcatgttccactaaccccgggcgggtggcaggtggaggtgtcaggctgctggcgcctctgcaagggcagaacactaacctgaccgtgggcggggccttgcggtatccgcccccaataaaagcaattccaacctt

SEQ ID NO: 22766 - DNA, 14736 bp, Homo sapiens
  source 1..14736: mol_type = unassigned DNA
gctgtctagcctggagcagccggttcccagcgcaggaagggcagccctggcggctccgcgtggcggctatggagccctcgggcagcctgtttccctccctggtggttgtgggtcacgttgtcaccctggccgctgtgtggcactggcgcaggggacgtcggtgggcgcaggacgagcaagatgagcgggatcgtgtgcagaagaaaaccttcaccaagtgggtcaacaagcacctcatcaaggcccagaggcacatcagtgacctgtatgaagacctccgcgatggccacaacctcatctccctgctggaggtcctctcgggggacagcctgccccgggagaaggggaggatgcgtttccacaagctgcagaatgtccagattgccctggactacctccggcaccgccaggtgaagctggtgaacatcaggaatgatgacatcgctgacggcaaccccaagctgacccttggcctcatctggacaatcattctgcacttccagatctcagatatccaggtgagtgggcagtcggaggacatgacggccaaggagaagctgctgctgtggtcgcagcgaatggtggaggggtaccagggcctgcgatgcgacaacttcacctccagctggagagacggccgcctcttcaatgccatcatccaccggcacaagcccctgctcatcgacatgaacaaggtgtaccggcagaccaacctggagaacctggaccaggccttctctgtggcggagcgggacctgggagtgacgcggctcctggaccctgaggacgtggatgtccctcagcccgacgagaagtccatcatcacctacgtctcgtcgctgtatgacgccatgccccgcgtgccggacgtgcaggatggggtgagggccaacgagctgcagctgcgctggcaggagtaccgggagctggtgctgctgctgcttcagtggatgcgacaccacacggccgcctttgaggaacgcaggttcccctccagcttcgaggagattgagatcctgtggtctcagttcctgaagtttaaggagatggagctaccagccaaggaggccgacaagaacaggtccaagggcatctaccaatccctggagggagcggtgcaagcaggccagctcaaggtgccccctggctaccacccgctggatgtggagaaggagtggggcaagctgcacgtggccatcctggagcgggagaagcagctccgcagcgagtttgagaggctggagtgtcttcagcgcatcgtgaccaagctgcagatggaggcggggctgtgtgaggagcagctgaaccaggccgacgccctgctgcagtcggatgtccggctgctggctgcaggcaaagtgccacagcgggcgggggaggtggaacgggacttggacaaggcggatagcatgatccggctgctcttcaacgacgtgcagaccctcaaggatggacggcacccgcagggcgagcagatgtaccgcagggtgtaccgtctgcacgagcgcctggtagccatccgcaccgagtacaacctacggctgaaggcaggcgtggcggcccctgcaacccaggtggcccaggtgactctgcagagtgtgcagaggcgccccgagctggaggactccactctgcgctacctgcaggacctgctggcctgggtggaggagaaccagcaccgtgtggatggcgctgagtggggtgtggacctgcccagcgtggaggcgcagctgggcagccaccgaggcctgcaccagtccatcgaagaattccgggccaagatcgagcgggcacggagtgacgagggccagctctcccccgccacccggggtgcctaccgtgactgcctgggtcggctggacctgcagtacgccaagctgctgaactcctccaaggcccgcctcaggtccctggagagcttgcacagctttgtggcagccgccactaaggagctaatgtggctgaatgagaaggaggaggaggaggtgggcttcgactggagcgaccgcaacaccaacatgaccgccaagaaggagagctactcggcgctgatgcgggagctggagctgaaggagaagaagatcaaggagctccaaaatgctggggaccggctgctgcgggaggaccacccggcccggcccacggtggagtccttccaggcggccctgcagacgcagtggagctggatgctacagctgtgctgctgtatcgaggcacacctgaaggagaacgctgcctactttcagttcttctcagatgtgcgggaggccgaggggcagttgcagaagctgcaggaggcactgcgtaggaaatacagttgtgatcgctccgccaccgtcacccggctggaggacctgctgcaggatgcccaggacgagaaggaacagctgaacgagtacaagggccacctctcaggcctggccaagcgggccaaggccgtcgtgcagctgaagccccgccacccagcccaccccatgcggggccgcctgcccctgctggccgtgtgcgactataagcaggtggaggtgactgtgcacaagggtgacgagtgccagctggtgggccctgcacagccgtcccactggaaggtgctcagcagctccggcagcgaggccgccgtgccctccgtgtgcttcctggtgcccccgcccaaccaggaggcccaggaggccgtcaccaggctggaggcccagcaccaggccctggtcacgctgtggcaccagttgcacgtggacatgaagagccttctggcctggcagagccttcgccgcgacgtgcagctcatccgctcctggtccctggccacgttccgcaccctgaagccagaggagcagcgccaagccctgcacagcctggagctgcactaccaggccttcctgcgggacagccaggacgcgggcggcttcggacccgaggaccggctgatggctgagcgcgagtacggctcctgcagccaccactaccagcagctgctgcagagcctggaacagggtgcacaggaagagtctcgctgccagcgctgcatctccgagctcaaagacatccggctgcagctggaggcctgtgagacgcgcaccgtgcaccgcctgcggctgccgctggacaaagagccggcacgggagtgtgcccagcgcatcgccgagcagcagaaggcacaggcagaggtggaggggctgggcaagggggtcgcccggctctctgccgaggccgagaaggtcttggccctaccagagccatcgcctgcggcccccacgctgcgctcggagctggagctgacgctgggcaagctggagcaggtccgcagcctgtctgccatctacctggagaagctcaagaccatcagcctggtgatccgcggcacgcagggggccgaggaggtgctcagggcccacgaggagcagctcaaggaggcccaggccgtgccggccaccctcccggagctcgaggccaccaaggcctctctgaagaagctgcgggcccaggccgaggcacagcagcccacgttcgacgccctgcgggatgagctgcggggggcacaggaggtgggggagcgactgcagcagcggcacggggagcgggacgtggaggtggagcgctggcgggagcgggtcgcccagttgcttgagcgctggcaggctgtgctggcccagaccgacgtgcggcagcgcgagctcgagcaactgggccgccagctgcgttactaccgcgagagtgcagaccccttgggcgcctggctgcaggacgccaggcggcggcaggagcagatccaggccatgccgctggccgacagccaggctgtgcgggagcagctgcggcaggagcaggccctgctggaggagatcgagcgccacggcgagaaggtcgaggagtgccagaggtttgcgaaacagtacatcaacgccatcaaggactatgaactccagctggtgacgtacaaggcgcagcttgagccggtggcctccccggccaagaagcccaaggtccagtcgggatcagagagtgtcatccaggagtacgtggacctgcgtacgcactacagcgagctgaccacactgacgagccagtacatcaagttcatcagcgagactctgcggcgcatggaggaggaggagaggctggctgagcagcagcgggcagaggagcgcgagcggctggccgaggtggaggccgcgctggagaagcagcggcagctggccgaggcgcacgcccaggcaaaggcacaggcggagcgggaggcgaaggagctgcagcagcgcatgcaggaggaggtggtgcggcgggaggaggcggcggtggacgcgcagcagcagaagcgcagcattcaggaggagctgcagcagctgcggcagagctcggaggcggagatccaggccaaggcccggcaggcagaggcggctgagcgcagccggctgcgcatcgaggaggagatccgcgtggtgcgcctgcagttggaggccaccgagcgccagcgtggcggggctgagggggagctgcaggcactgcgtgcacgggcggaggaggctgaggcacaaaagcgacaggcgcaggaggaggccgagcgcttgcggaggcaggtgcaggacgagagccagcgtaagcggcaggcggaggtggagctggcctcgcgcgtgaaggccgaggccgaggcggcgcgcgagaagcagcgggccctgcaggccctggaggagctgcggctgcaggcggaggaggcggagcggcgcctgcggcaggccgaggtggagcgagcgcggcaggtacaggtggccctggagacggcgcagcgcagtgcagaggcggagctgcagagcaaacgcgcctccttcgccgagaagacggcacagctggagcgctccctgcaggaggaacacgtggctgtggcacagctgcgggaggaggctgagcggcgggcacagcagcaggccgaggccgagcgggcgcgcgaggaggcagagcgggagctggagcgctggcagctcaaggccaacgaggcgctacggctgcggctgcaggcggaggaggtggcgcagcagaagagcctggcgcaggccgaggctgagaagcagaaggaggaggcggagcgcgaggcgcggcggcgcggcaaggcggaggagcaggccgtccggcagcgggagctggctgaacaagagctggagaagcagcggcagctggcggaaggcaccgcgcagcagcgcctggccgcggagcaggagttgatccggctgcgggccgagacggagcagggggagcagcagcggcagctgctggaggaggagctggcccggctgcagcgtgaggcggctgcagccacgcagaaacggcaggagctggaagccgagctggccaaggtgcgggccgagatggaggtgctgctggccagcaaggcgagggctgaggaggagtcgcgctccaccagcgagaagtccaagcagaggctggaggccgaggccggccggttccgcgagctggccgaggaggccgcccgcctgcgtgccctggcggaagaggccaagcggcagcggcagctggccgaggaagacgcggcgcggcagcgggccgaggcggagcgggtgcttgcggagaagctggccgccatcggcgaggccacgcggctcaagacggaggcggagatcgcgctcaaggagaaggaggcggagaacgagcgcctgcggcggctggcggaggacgaggccttccagcggcggcggctggaggagcaggccgcgcaacacaaggctgacatcgaggagcgcctggcccagctgcgcaaggcatcggacagcgagctggagcggcagaaggggctggtggaggacacgctgaggcagcggcggcaggtggaggaggagatcctggcgctgaaggcgagcttcgagaaggcggccgctggcaaggcggagctggagctggagctgggacgcatccgcagcaacgcggaggacacgctgcgcagcaaggagcaggccgagctggaggctgcgaggcagcggcagctggcggcggaggaggagcggcggcgccgtgaggctgaggagcgcgtgcagaagagcctggcggccgaggaggaggccgcacggcagcggaaggcggcgctggaggaagtcgagcggctgaaagccaaggtggaggaggcgcggcgcctgcgggagcgagcggagcaggagtcggcgcggcagctgcagctggcccaggaggccgcccagaagcggctgcaggcggaagagaaggcacacgccttcgcggtgcagcagaaggagcaggagctacagcagacgctgcagcaggagcagagcgtgctggaccagctgcgcggcgaggcggaggcggcccggcgggcggctgaggaggcggaggaggcccgggtgcaggcggagcgtgaggcggcgcagtcccggcggcaggtggaagaggccgagcggctgaagcagtcggcagaggagcaggcacaggcccgggctcaggcacaggcggctgcagagaagctgcgcaaggaggccgagcaagaggcggcgcggcgggcacaggcggagcaggcggccctgcggcagaagcaggcagctgacgcggagatggagaagcataagaaattcgccgagcagacgctgcggcagaaggcgcaggtggagcaggagctgacaacactgcggctgcagctggaggagaccgaccaccagaagaacctgctggacgaggagctgcagcggctgaaggcggaggccacggaggccgcacgccagcgcagccaggtggaggaggagctcttctcggtgcgcgtgcagatggaggagctgagcaagctcaaggcacgcatcgaggctgagaaccgcgcactcatcttgcgtgacaaggacaatacgcagcgcttcctgcaggaggaggctgagaagatgaagcaggtggcggaggaggccgcgcggctgagtgtggcggcccaagaggctgcgcgactgcggcagctggcagaggaggacctggcacagcagcgggccttggcagagaagatgctcaaggagaagatgcaggcggtgcaggaggccacgcgactcaaggctgaggcggaactgctgcagcagcagaaggagcttgcgcaggagcaggcgcggcggctgcaggaggacaaggagcagatggcgcagcagctggcggaggagacgcagggcttccagcggacgctggaggccgagcggcagcggcagctggagatgagcgctgaggctgagcgcctcaagctgcgtgtggccgagatgagccgagcccaggcccgcgctgaggaggacgcccagcgcttccggaagcaggcggaggagatcggtgagaagctgcaccgcacggagctcgccacccaggagaaggtgaccctggtgcagacactggagatccagcgacagcagagtgaccatgatgccgagcgcctgcgggaggccatcgctgagctggagcgtgagaaggagaagctccaacaggaggccaaactgctgcagctcaagtctgaggagatgcagacggtgcagcaggagcagctgctgcaggagacgcaggccctgcagcaaagcttcctctctgaaaaggacagcctgctacagcgggagcgcttcatcgagcaggagaaggccaagctggagcagctcttccaggacgaggtggccaaggcacagcagctgcgtgaggagcagcagcggcagcagcagcagatggagcaggaacggcagcggctggtggccagcatggaggaggcgcggcggcggcagcatgaggccgaggagggcgtgcggcgcaagcaggaggagctgcagcagctggagcagcagcggcggcagcaggaggagctgctggctgaggagaaccagaggctgcgtgagcagctgcagctcctggaggagcagcaccgggccgcgctggcgcactcagaggaggtcactgcctcgcaggtggctgccacaaagaccctgcccaatggccgggatgcacttgatggccccgcggcagaggcagagccggagcacagcttcgatggcctgcggcggaaggtgtcagctcagaggctgcaggaggccggcatcctgagtgcggaggagctgcagcggttggcgcagggccacaccacggtggacgagctcgcacggcgggaagacgtgcgccactacctgcagggccgcagcagtatcgcagggctgttgctgaaggccaccaatgagaagctgagtgtttacgccgccctgcagaggcagctgctgagtcccggcacggccctcatcctgctggaggcgcaggcggcctcaggcttcctgctggaccctgtgcggaaccggcggctgaccgtcaacgaggctgtgaaggagggtgtggtgggccccgagctgcaccacaagctgctgtcggccgagcgcgccgtcactggctacaaggacccctacactggccagcagatctctctcttccaagccatgcagaagggcctcatcgtccgggagcacggcatccgcctgctggaggcccagatcgccacgggcggcgttatcgaccccgtgcacagccaccgcgtgcccgtggacgtggcctaccggcgcggctacttcgacgaggagatgaaccgcgtcctggcggaccccagcgacgacaccaagggcttctttgaccccaacacgcacgagaacctcacgtacctgcagctactggagcgctgcgtggaggaccccgagacgggcctgtgccttctgccactcacggataaggctgccaagggcggggagctggtctacactgactccgaggcccgggacgtctttgagaaggccaccgtgtctgcgccgttcggcaagttccagggcaagacggtgaccatttgggagatcatcaactcggaatacttcacggcagagcagcggcgggacctgctgcggcagttccgcacgggccggatcacagtggagaagatcatcaagatcatcatcacggtggtggaggagcaggagcagaagggccggctttgctttgagggcctgcgcagcctggtgccagccgccgagctgctggagagcagggtcatcgaccgcgagctctaccagcagctgcagcgaggtgagcgctctgtgcgagacgtagccgaggtggacactgtgcggcgggctctccggggtgccaacgtcatcgcgggtgtatggctggaggaggcggggcagaagctgagtatctacaatgccctgaagaaagacctgctgccatccgacatggccgtggccctgttggaagcccaggccggcaccgggcacatcatcgaccccgccaccagcgcccggctgaccgtggacgaggcagtgcgtgctggcctggtgggccccgagtttcatgagaagctgctatcagccgagaaggctgtgacagggtacagggacccctacacagggcagagcgtctccctgttccaggccctgaagaagggcctcattccccgggagcagggcctgcgcctgttggacgcccagctgtccacgggcggcatcgtggaccccagcaagagccaccgcgtgcccctggatgtcgcctgcgcccgaggctgcctggatgaggagaccagcagggccctgtcggcaccaagggccgacgccaaggcctacagtgaccccagcacaggggagccggccacctacggcgagctccagcagcggtgccggcccgaccagctgaccgggctgagcctgctgccgctctcagaaaaggctgctcgggcccggcaggaggagctctactcagagctgcaggcccgtgagacctttgaaaagaccccggttgaggtccccgtgggtggcttcaagggcaggacggtgacggtgtgggagctcatcagctctgagtacttcactgcggagcagcggcaggagctgttgcgtcagttccgcacgggcaaggtcaccgtggagaaggtcatcaagattctcattaccatcgtggaggaggtggagaccctgcggcaggagaggctgtccttcagcggcctccgtgcccctgtgccagccagcgagctcctggcttccggggtcctcagcagagcccagtttgagcagctcaaggacggcaagacgacggtcaaggacctttcggagctgggctccgtgcggacgctgctgcagggcagtggctgcctcgccggcatctacctggaggacaccaaggagaaggtgtccatctacgaggccatgcgccggggcctgctgagagccacaacggctgcgctcctgctggaggcgcaggcggccactggcttcctggtggaccccgtgcggaaccagcgcctgtatgtccacgaggccgtgaaggcgggcgtggtgggccccgagcttcacgagcagctgctgtctgccgagaaggccgtcaccggctacagagacccctactcgggcagcaccatctccctcttccaggccatgcagaagggcctggttctccggcagcacggcatccgcctgctggaggcccagatcgccacgggcggcatcatcgaccccgtgcacagccaccgcgtgcctgtggacgtggcctaccagcgcggctacttcagtgaggagatgaaccgcgtcctggcggaccccagcgacgacaccaagggcttctttgaccccaacacgcatgagaacctcacgtacaggcagctgctggagcggtgcgtggaggaccccgagacgggcttgcgccttctgccactgaaaggggcggagaaggctgaggtggtggagaccacgcaggtgtacactgaggaggagacaagaagggcatttgaagagacacagatcgacattcccggcggcggcagccacggcggctccaccatgtccctgtgggaggtgatgcagtcggacctgatccccgaggagcagcgggcccagctgatggctgacttccaggccggccgggtgaccaaggaacgcatgatcatcatcatcatcgagatcattgagaagacagagatcatccgccagcagggtctggcctcctacgactacgtgcgccgccgcctcacggctgaggacctgttcgaggctcggatcatctctctcgagacctacaacctgctccgggagggcaccaggagcctccgtgaggctctcgaggcggagtccgcctggtgctacctctatggcacgggctccgtggctggtgtctacctgcccggttccaggcagacactgagcatctaccaggctctcaagaaagggctgctgagtgccgaggtggcccgcctgctgctggaggcacaggcagccacaggcttcctgctggacccggtgaagggggagcggctgactgtggatgaggctgtgcggaagggcctcgtggggcccgagctgcacgaccgcctgctctcggctgagcgggcggtcaccggctaccgtgacccctacaccgagcagaccatctcgctcttccaggccatgaagaaggagctgatccctactgaggaggccctgcggctgctggatgcccagctggccaccggcggcatcgtggacccccgcctgggcttccaccttcccctggaggtggcttaccagcgtggctacctcaacaaggacacgcacgaccagctgtcagagcccagcgaggtgcgcagctacgtggacccgtccaccgacgagcgcctcagctacacgcagctgctcaggcggtgccgtcgtgacgacggcaccggccagctgctcctgccactgtcggacgcccgcaagctgaccttccgtggcctgcggaagcagatcaccatggaggagctggtgcgctcgcaggtcatggacgaggccacggcgctgcagctgcgggagggcctgacctccatcgaggaggtcaccaagaacttgcagaagttcctggaaggcaccagctgcatcgctggtgtcttcgtggacgccaccaaggaacggctctcggtgtaccaggccatgaagaagggcatcatccgccccggcacagcctttgagctcctggaggcgcaggcggccaccggttacgtcatcgaccccatcaagggactgaagctgacggtggaggaggctgtgcgtatgggcattgtgggccccgagttcaaggacaagctgctgtcggccgagcgcgccgtcactgggtacaaggacccctactctgggaagctcatctccctcttccaggccatgaagaagggcctgatcctgaaggaccatggcatccgcctgctggaggcccagatcgccacgggcggcatcatcgaccctgaggagagccaccggctgcccgtggaggtggcctacaagcgcggcctcttcgatgaggagatgaacgagatcctgaccgacccctcggacgacaccaagggcttctttgaccctaacacggaggagaacctcacctacctgcagctgatggagcgttgtatcactgacccccagacgggcctgtgtctcttgccgctgaaggagaagaagcgggagcggaagacgtcctccaagtcctccgtgcgcaagcgccgagtggtcatcgtggaccccgagacgggcaaggagatgtcagtgtacgaggcctaccgcaagggcctgattgaccaccagacgtacctggagctgtccgagcaggagtgcgagtgggaggagatcaccatctcctcctcggacggcgtggtcaagtccatgatcatcgaccgccgctccgggcgccagtacgacatcgatgatgccatcgccaagaacctcatcgaccgctcggcactggaccagtaccgcgccggcacgctctccatcaccgagttcgccgacatgctctcgggcaacgccggtggtttccgctcccgttcctcctcggtgggatcctcctcctcctaccccatcagccccgccgtctccaggacccagctggcctcctggtcagaccccactgaggagacgggccccgtggctggcatcctggacacggagacgctggagaaggtgtccatcaccgaggccatgcaccggaacctggtggataacatcacggggcagcggctgctggaggcgcaggcctgcaccgggggcatcatcgaccccagcaccggtgagcgcttccctgtcaccgacgccgtcaacaagggcctggtggacaagatcatggtggaccgcatcaacctggcccagaaggccttctgcggcttcgaggacccacgcaccaagaccaagatgtcggccgcccaggccctgaagaagggctggctctactacgaggccggccagcgcttcctggaggtgcagtacctgaccggcggcttgatcgagcccgacacgccgggccgcgtgcccctggacgaggccctgcagcgcggcacggtggacgcccgcaccgcacagaagctgcgtgacgtgggcgcctactccaagtacctcacctgccctaagaccaagctcaagatctcctataaggacgcgctggaccgcagcatggtggaggagggcacggggctgcggctgctggaggctgccgcgcagtccaccaagggctactacagcccctacagcgtcagcggctccggctctaccgctggctcccgcaccggctcgcgcaccggctcccgggccggctcccgccgcggcagctttgacgccaccggctccggcttctccatgaccttctcttcatcctcctactcctcctcgggctacggccgccgctacgcctcggggtcctcggcctccctggggggccctgagtctgccgtggcctgaggctgcctgcgcccaccccgctctgcatgcggcccagcccggctcccaccgaggcgcgggggccgttttcaacgcttaaaggtgtcttcctcccaagtggtgcctaaagtttaaccaaaaagaccagactaatatattaatatatatctgctgtccagacagcctgtatcttgggggacagggctggcccagccctgctggccgcctcaccccctcgggtctcctcactcccttctacctgccactcacacagccaggtgccttggagggtcccaagctgggccccagcccaccctcctgtcttcccagggtagcccgcctgccagtcctagctgcacagggcagctgggcccaaccctgtctgtagagggccctggtgtttctagcactggcctgcacggtgggccttgctggggacggggggccccagtcagcctctctcccagtctacccagagaagccccttccccatgggaagacgaggccctcgggcccagcccccacagtgctgtctgatctgtgctttccagctcaccccccacactcactcctgagacccctggcctccggcgtcagcctccagcctctgttcccctagtaagtgccttccatgtcggcctctaaccccaggccccgaggacccagacccagtggggaggcggacgttccagccggcatggctgggaactgcagacctgtcctcctggtgggtccaggggcccctccagcttgtggagccccacactggggtgccgcctgcccgtctctctcccatggagccccagccccctttgggcccagggacaccagccaggctctgtgctgaccctcctgttgcacccagccctggtctcagcagcgaccacccctgcctccaccctctgagctttgcatgttccactaaccccgggcgggtggcaggtggaggtgtcaggctgctggcgcctctgcaagggcagaacactaacctgaccgtgggcggggccttgcggtatccgcccccaataaaagcaattccaacctt

SEQ ID NO: 22767 - DNA, 14751 bp, Homo sapiens
  source 1..14751: mol_type = unassigned DNA
attgatcagctgaagccccgcccctggccggcaagccctgccccggacctccgggctcctcccccggctgcggcgctggcctgggcagtgcggtgcggggctggactctgcctggtggtggcacagccgccctcagccccggcgcagacatggacccctcgcgagccatccagaacgagatcagctccctcaaagatgagcgggatcgtgtgcagaagaaaaccttcaccaagtgggtcaacaagcacctcatcaaggcccagaggcacatcagtgacctgtatgaagacctccgcgatggccacaacctcatctccctgctggaggtcctctcgggggacagcctgccccgggagaaggggaggatgcgtttccacaagctgcagaatgtccagattgccctggactacctccggcaccgccaggtgaagctggtgaacatcaggaatgatgacatcgctgacggcaaccccaagctgacccttggcctcatctggacaatcattctgcacttccagatctcagatatccaggtgagtgggcagtcggaggacatgacggccaaggagaagctgctgctgtggtcgcagcgaatggtggaggggtaccagggcctgcgatgcgacaacttcacctccagctggagagacggccgcctcttcaatgccatcatccaccggcacaagcccctgctcatcgacatgaacaaggtgtaccggcagaccaacctggagaacctggaccaggccttctctgtggcggagcgggacctgggagtgacgcggctcctggaccctgaggacgtggatgtccctcagcccgacgagaagtccatcatcacctacgtctcgtcgctgtatgacgccatgccccgcgtgccggacgtgcaggatggggtgagggccaacgagctgcagctgcgctggcaggagtaccgggagctggtgctgctgctgcttcagtggatgcgacaccacacggccgcctttgaggaacgcaggttcccctccagcttcgaggagattgagatcctgtggtctcagttcctgaagtttaaggagatggagctaccagccaaggaggccgacaagaacaggtccaagggcatctaccaatccctggagggagcggtgcaagcaggccagctcaaggtgccccctggctaccacccgctggatgtggagaaggagtggggcaagctgcacgtggccatcctggagcgggagaagcagctccgcagcgagtttgagaggctggagtgtcttcagcgcatcgtgaccaagctgcagatggaggcggggctgtgtgaggagcagctgaaccaggccgacgccctgctgcagtcggatgtccggctgctggctgcaggcaaagtgccacagcgggcgggggaggtggaacgggacttggacaaggcggatagcatgatccggctgctcttcaacgacgtgcagaccctcaaggatggacggcacccgcagggcgagcagatgtaccgcagggtgtaccgtctgcacgagcgcctggtagccatccgcaccgagtacaacctacggctgaaggcaggcgtggcggcccctgcaacccaggtggcccaggtgactctgcagagtgtgcagaggcgccccgagctggaggactccactctgcgctacctgcaggacctgctggcctgggtggaggagaaccagcaccgtgtggatggcgctgagtggggtgtggacctgcccagcgtggaggcgcagctgggcagccaccgaggcctgcaccagtccatcgaagaattccgggccaagatcgagcgggcacggagtgacgagggccagctctcccccgccacccggggtgcctaccgtgactgcctgggtcggctggacctgcagtacgccaagctgctgaactcctccaaggcccgcctcaggtccctggagagcttgcacagctttgtggcagccgccactaaggagctaatgtggctgaatgagaaggaggaggaggaggtgggcttcgactggagcgaccgcaacaccaacatgaccgccaagaaggagagctactcggcgctgatgcgggagctggagctgaaggagaagaagatcaaggagctccaaaatgctggggaccggctgctgcgggaggaccacccggcccggcccacggtggagtccttccaggcggccctgcagacgcagtggagctggatgctacagctgtgctgctgtatcgaggcacacctgaaggagaacgctgcctactttcagttcttctcagatgtgcgggaggccgaggggcagttgcagaagctgcaggaggcactgcgtaggaaatacagttgtgatcgctccgccaccgtcacccggctggaggacctgctgcaggatgcccaggacgagaaggaacagctgaacgagtacaagggccacctctcaggcctggccaagcgggccaaggccgtcgtgcagctgaagccccgccacccagcccaccccatgcggggccgcctgcccctgctggccgtgtgcgactataagcaggtggaggtgactgtgcacaagggtgacgagtgccagctggtgggccctgcacagccgtcccactggaaggtgctcagcagctccggcagcgaggccgccgtgccctccgtgtgcttcctggtgcccccgcccaaccaggaggcccaggaggccgtcaccaggctggaggcccagcaccaggccctggtcacgctgtggcaccagttgcacgtggacatgaagagccttctggcctggcagagccttcgccgcgacgtgcagctcatccgctcctggtccctggccacgttccgcaccctgaagccagaggagcagcgccaagccctgcacagcctggagctgcactaccaggccttcctgcgggacagccaggacgcgggcggcttcggacccgaggaccggctgatggctgagcgcgagtacggctcctgcagccaccactaccagcagctgctgcagagcctggaacagggtgcacaggaagagtctcgctgccagcgctgcatctccgagctcaaagacatccggctgcagctggaggcctgtgagacgcgcaccgtgcaccgcctgcggctgccgctggacaaagagccggcacgggagtgtgcccagcgcatcgccgagcagcagaaggcacaggcagaggtggaggggctgggcaagggggtcgcccggctctctgccgaggccgagaaggtcttggccctaccagagccatcgcctgcggcccccacgctgcgctcggagctggagctgacgctgggcaagctggagcaggtccgcagcctgtctgccatctacctggagaagctcaagaccatcagcctggtgatccgcggcacgcagggggccgaggaggtgctcagggcccacgaggagcagctcaaggaggcccaggccgtgccggccaccctcccggagctcgaggccaccaaggcctctctgaagaagctgcgggcccaggccgaggcacagcagcccacgttcgacgccctgcgggatgagctgcggggggcacaggaggtgggggagcgactgcagcagcggcacggggagcgggacgtggaggtggagcgctggcgggagcgggtcgcccagttgcttgagcgctggcaggctgtgctggcccagaccgacgtgcggcagcgcgagctcgagcaactgggccgccagctgcgttactaccgcgagagtgcagaccccttgggcgcctggctgcaggacgccaggcggcggcaggagcagatccaggccatgccgctggccgacagccaggctgtgcgggagcagctgcggcaggagcaggccctgctggaggagatcgagcgccacggcgagaaggtcgaggagtgccagaggtttgcgaaacagtacatcaacgccatcaaggactatgaactccagctggtgacgtacaaggcgcagcttgagccggtggcctccccggccaagaagcccaaggtccagtcgggatcagagagtgtcatccaggagtacgtggacctgcgtacgcactacagcgagctgaccacactgacgagccagtacatcaagttcatcagcgagactctgcggcgcatggaggaggaggagaggctggctgagcagcagcgggcagaggagcgcgagcggctggccgaggtggaggccgcgctggagaagcagcggcagctggccgaggcgcacgcccaggcaaaggcacaggcggagcgggaggcgaaggagctgcagcagcgcatgcaggaggaggtggtgcggcgggaggaggcggcggtggacgcgcagcagcagaagcgcagcattcaggaggagctgcagcagctgcggcagagctcggaggcggagatccaggccaaggcccggcaggcagaggcggctgagcgcagccggctgcgcatcgaggaggagatccgcgtggtgcgcctgcagttggaggccaccgagcgccagcgtggcggggctgagggggagctgcaggcactgcgtgcacgggcggaggaggctgaggcacaaaagcgacaggcgcaggaggaggccgagcgcttgcggaggcaggtgcaggacgagagccagcgtaagcggcaggcggaggtggagctggcctcgcgcgtgaaggccgaggccgaggcggcgcgcgagaagcagcgggccctgcaggccctggaggagctgcggctgcaggcggaggaggcggagcggcgcctgcggcaggccgaggtggagcgagcgcggcaggtacaggtggccctggagacggcgcagcgcagtgcagaggcggagctgcagagcaaacgcgcctccttcgccgagaagacggcacagctggagcgctccctgcaggaggaacacgtggctgtggcacagctgcgggaggaggctgagcggcgggcacagcagcaggccgaggccgagcgggcgcgcgaggaggcagagcgggagctggagcgctggcagctcaaggccaacgaggcgctacggctgcggctgcaggcggaggaggtggcgcagcagaagagcctggcgcaggccgaggctgagaagcagaaggaggaggcggagcgcgaggcgcggcggcgcggcaaggcggaggagcaggccgtccggcagcgggagctggctgaacaagagctggagaagcagcggcagctggcggaaggcaccgcgcagcagcgcctggccgcggagcaggagttgatccggctgcgggccgagacggagcagggggagcagcagcggcagctgctggaggaggagctggcccggctgcagcgtgaggcggctgcagccacgcagaaacggcaggagctggaagccgagctggccaaggtgcgggccgagatggaggtgctgctggccagcaaggcgagggctgaggaggagtcgcgctccaccagcgagaagtccaagcagaggctggaggccgaggccggccggttccgcgagctggccgaggaggccgcccgcctgcgtgccctggcggaagaggccaagcggcagcggcagctggccgaggaagacgcggcgcggcagcgggccgaggcggagcgggtgcttgcggagaagctggccgccatcggcgaggccacgcggctcaagacggaggcggagatcgcgctcaaggagaaggaggcggagaacgagcgcctgcggcggctggcggaggacgaggccttccagcggcggcggctggaggagcaggccgcgcaacacaaggctgacatcgaggagcgcctggcccagctgcgcaaggcatcggacagcgagctggagcggcagaaggggctggtggaggacacgctgaggcagcggcggcaggtggaggaggagatcctggcgctgaaggcgagcttcgagaaggcggccgctggcaaggcggagctggagctggagctgggacgcatccgcagcaacgcggaggacacgctgcgcagcaaggagcaggccgagctggaggctgcgaggcagcggcagctggcggcggaggaggagcggcggcgccgtgaggctgaggagcgcgtgcagaagagcctggcggccgaggaggaggccgcacggcagcggaaggcggcgctggaggaagtcgagcggctgaaagccaaggtggaggaggcgcggcgcctgcgggagcgagcggagcaggagtcggcgcggcagctgcagctggcccaggaggccgcccagaagcggctgcaggcggaagagaaggcacacgccttcgcggtgcagcagaaggagcaggagctacagcagacgctgcagcaggagcagagcgtgctggaccagctgcgcggcgaggcggaggcggcccggcgggcggctgaggaggcggaggaggcccgggtgcaggcggagcgtgaggcggcgcagtcccggcggcaggtggaagaggccgagcggctgaagcagtcggcagaggagcaggcacaggcccgggctcaggcacaggcggctgcagagaagctgcgcaaggaggccgagcaagaggcggcgcggcgggcacaggcggagcaggcggccctgcggcagaagcaggcagctgacgcggagatggagaagcataagaaattcgccgagcagacgctgcggcagaaggcgcaggtggagcaggagctgacaacactgcggctgcagctggaggagaccgaccaccagaagaacctgctggacgaggagctgcagcggctgaaggcggaggccacggaggccgcacgccagcgcagccaggtggaggaggagctcttctcggtgcgcgtgcagatggaggagctgagcaagctcaaggcacgcatcgaggctgagaaccgcgcactcatcttgcgtgacaaggacaatacgcagcgcttcctgcaggaggaggctgagaagatgaagcaggtggcggaggaggccgcgcggctgagtgtggcggcccaagaggctgcgcgactgcggcagctggcagaggaggacctggcacagcagcgggccttggcagagaagatgctcaaggagaagatgcaggcggtgcaggaggccacgcgactcaaggctgaggcggaactgctgcagcagcagaaggagcttgcgcaggagcaggcgcggcggctgcaggaggacaaggagcagatggcgcagcagctggcggaggagacgcagggcttccagcggacgctggaggccgagcggcagcggcagctggagatgagcgctgaggctgagcgcctcaagctgcgtgtggccgagatgagccgagcccaggcccgcgctgaggaggacgcccagcgcttccggaagcaggcggaggagatcggtgagaagctgcaccgcacggagctcgccacccaggagaaggtgaccctggtgcagacactggagatccagcgacagcagagtgaccatgatgccgagcgcctgcgggaggccatcgctgagctggagcgtgagaaggagaagctccaacaggaggccaaactgctgcagctcaagtctgaggagatgcagacggtgcagcaggagcagctgctgcaggagacgcaggccctgcagcaaagcttcctctctgaaaaggacagcctgctacagcgggagcgcttcatcgagcaggagaaggccaagctggagcagctcttccaggacgaggtggccaaggcacagcagctgcgtgaggagcagcagcggcagcagcagcagatggagcaggaacggcagcggctggtggccagcatggaggaggcgcggcggcggcagcatgaggccgaggagggcgtgcggcgcaagcaggaggagctgcagcagctggagcagcagcggcggcagcaggaggagctgctggctgaggagaaccagaggctgcgtgagcagctgcagctcctggaggagcagcaccgggccgcgctggcgcactcagaggaggtcactgcctcgcaggtggctgccacaaagaccctgcccaatggccgggatgcacttgatggccccgcggcagaggcagagccggagcacagcttcgatggcctgcggcggaaggtgtcagctcagaggctgcaggaggccggcatcctgagtgcggaggagctgcagcggttggcgcagggccacaccacggtggacgagctcgcacggcgggaagacgtgcgccactacctgcagggccgcagcagtatcgcagggctgttgctgaaggccaccaatgagaagctgagtgtttacgccgccctgcagaggcagctgctgagtcccggcacggccctcatcctgctggaggcgcaggcggcctcaggcttcctgctggaccctgtgcggaaccggcggctgaccgtcaacgaggctgtgaaggagggtgtggtgggccccgagctgcaccacaagctgctgtcggccgagcgcgccgtcactggctacaaggacccctacactggccagcagatctctctcttccaagccatgcagaagggcctcatcgtccgggagcacggcatccgcctgctggaggcccagatcgccacgggcggcgttatcgaccccgtgcacagccaccgcgtgcccgtggacgtggcctaccggcgcggctacttcgacgaggagatgaaccgcgtcctggcggaccccagcgacgacaccaagggcttctttgaccccaacacgcacgagaacctcacgtacctgcagctactggagcgctgcgtggaggaccccgagacgggcctgtgccttctgccactcacggataaggctgccaagggcggggagctggtctacactgactccgaggcccgggacgtctttgagaaggccaccgtgtctgcgccgttcggcaagttccagggcaagacggtgaccatttgggagatcatcaactcggaatacttcacggcagagcagcggcgggacctgctgcggcagttccgcacgggccggatcacagtggagaagatcatcaagatcatcatcacggtggtggaggagcaggagcagaagggccggctttgctttgagggcctgcgcagcctggtgccagccgccgagctgctggagagcagggtcatcgaccgcgagctctaccagcagctgcagcgaggtgagcgctctgtgcgagacgtagccgaggtggacactgtgcggcgggctctccggggtgccaacgtcatcgcgggtgtatggctggaggaggcggggcagaagctgagtatctacaatgccctgaagaaagacctgctgccatccgacatggccgtggccctgttggaagcccaggccggcaccgggcacatcatcgaccccgccaccagcgcccggctgaccgtggacgaggcagtgcgtgctggcctggtgggccccgagtttcatgagaagctgctatcagccgagaaggctgtgacagggtacagggacccctacacagggcagagcgtctccctgttccaggccctgaagaagggcctcattccccgggagcagggcctgcgcctgttggacgcccagctgtccacgggcggcatcgtggaccccagcaagagccaccgcgtgcccctggatgtcgcctgcgcccgaggctgcctggatgaggagaccagcagggccctgtcggcaccaagggccgacgccaaggcctacagtgaccccagcacaggggagccggccacctacggcgagctccagcagcggtgccggcccgaccagctgaccgggctgagcctgctgccgctctcagaaaaggctgctcgggcccggcaggaggagctctactcagagctgcaggcccgtgagacctttgaaaagaccccggttgaggtccccgtgggtggcttcaagggcaggacggtgacggtgtgggagctcatcagctctgagtacttcactgcggagcagcggcaggagctgttgcgtcagttccgcacgggcaaggtcaccgtggagaaggtcatcaagattctcattaccatcgtggaggaggtggagaccctgcggcaggagaggctgtccttcagcggcctccgtgcccctgtgccagccagcgagctcctggcttccggggtcctcagcagagcccagtttgagcagctcaaggacggcaagacgacggtcaaggacctttcggagctgggctccgtgcggacgctgctgcagggcagtggctgcctcgccggcatctacctggaggacaccaaggagaaggtgtccatctacgaggccatgcgccggggcctgctgagagccacaacggctgcgctcctgctggaggcgcaggcggccactggcttcctggtggaccccgtgcggaaccagcgcctgtatgtccacgaggccgtgaaggcgggcgtggtgggccccgagcttcacgagcagctgctgtctgccgagaaggccgtcaccggctacagagacccctactcgggcagcaccatctccctcttccaggccatgcagaagggcctggttctccggcagcacggcatccgcctgctggaggcccagatcgccacgggcggcatcatcgaccccgtgcacagccaccgcgtgcctgtggacgtggcctaccagcgcggctacttcagtgaggagatgaaccgcgtcctggcggaccccagcgacgacaccaagggcttctttgaccccaacacgcatgagaacctcacgtacaggcagctgctggagcggtgcgtggaggaccccgagacgggcttgcgccttctgccactgaaaggggcggagaaggctgaggtggtggagaccacgcaggtgtacactgaggaggagacaagaagggcatttgaagagacacagatcgacattcccggcggcggcagccacggcggctccaccatgtccctgtgggaggtgatgcagtcggacctgatccccgaggagcagcgggcccagctgatggctgacttccaggccggccgggtgaccaaggaacgcatgatcatcatcatcatcgagatcattgagaagacagagatcatccgccagcagggtctggcctcctacgactacgtgcgccgccgcctcacggctgaggacctgttcgaggctcggatcatctctctcgagacctacaacctgctccgggagggcaccaggagcctccgtgaggctctcgaggcggagtccgcctggtgctacctctatggcacgggctccgtggctggtgtctacctgcccggttccaggcagacactgagcatctaccaggctctcaagaaagggctgctgagtgccgaggtggcccgcctgctgctggaggcacaggcagccacaggcttcctgctggacccggtgaagggggagcggctgactgtggatgaggctgtgcggaagggcctcgtggggcccgagctgcacgaccgcctgctctcggctgagcgggcggtcaccggctaccgtgacccctacaccgagcagaccatctcgctcttccaggccatgaagaaggagctgatccctactgaggaggccctgcggctgctggatgcccagctggccaccggcggcatcgtggacccccgcctgggcttccaccttcccctggaggtggcttaccagcgtggctacctcaacaaggacacgcacgaccagctgtcagagcccagcgaggtgcgcagctacgtggacccgtccaccgacgagcgcctcagctacacgcagctgctcaggcggtgccgtcgtgacgacggcaccggccagctgctcctgccactgtcggacgcccgcaagctgaccttccgtggcctgcggaagcagatcaccatggaggagctggtgcgctcgcaggtcatggacgaggccacggcgctgcagctgcgggagggcctgacctccatcgaggaggtcaccaagaacttgcagaagttcctggaaggcaccagctgcatcgctggtgtcttcgtggacgccaccaaggaacggctctcggtgtaccaggccatgaagaagggcatcatccgccccggcacagcctttgagctcctggaggcgcaggcggccaccggttacgtcatcgaccccatcaagggactgaagctgacggtggaggaggctgtgcgtatgggcattgtgggccccgagttcaaggacaagctgctgtcggccgagcgcgccgtcactgggtacaaggacccctactctgggaagctcatctccctcttccaggccatgaagaagggcctgatcctgaaggaccatggcatccgcctgctggaggcccagatcgccacgggcggcatcatcgaccctgaggagagccaccggctgcccgtggaggtggcctacaagcgcggcctcttcgatgaggagatgaacgagatcctgaccgacccctcggacgacaccaagggcttctttgaccctaacacggaggagaacctcacctacctgcagctgatggagcgttgtatcactgacccccagacgggcctgtgtctcttgccgctgaaggagaagaagcgggagcggaagacgtcctccaagtcctccgtgcgcaagcgccgagtggtcatcgtggaccccgagacgggcaaggagatgtcagtgtacgaggcctaccgcaagggcctgattgaccaccagacgtacctggagctgtccgagcaggagtgcgagtgggaggagatcaccatctcctcctcggacggcgtggtcaagtccatgatcatcgaccgccgctccgggcgccagtacgacatcgatgatgccatcgccaagaacctcatcgaccgctcggcactggaccagtaccgcgccggcacgctctccatcaccgagttcgccgacatgctctcgggcaacgccggtggtttccgctcccgttcctcctcggtgggatcctcctcctcctaccccatcagccccgccgtctccaggacccagctggcctcctggtcagaccccactgaggagacgggccccgtggctggcatcctggacacggagacgctggagaaggtgtccatcaccgaggccatgcaccggaacctggtggataacatcacggggcagcggctgctggaggcgcaggcctgcaccgggggcatcatcgaccccagcaccggtgagcgcttccctgtcaccgacgccgtcaacaagggcctggtggacaagatcatggtggaccgcatcaacctggcccagaaggccttctgcggcttcgaggacccacgcaccaagaccaagatgtcggccgcccaggccctgaagaagggctggctctactacgaggccggccagcgcttcctggaggtgcagtacctgaccggcggcttgatcgagcccgacacgccgggccgcgtgcccctggacgaggccctgcagcgcggcacggtggacgcccgcaccgcacagaagctgcgtgacgtgggcgcctactccaagtacctcacctgccctaagaccaagctcaagatctcctataaggacgcgctggaccgcagcatggtggaggagggcacggggctgcggctgctggaggctgccgcgcagtccaccaagggctactacagcccctacagcgtcagcggctccggctctaccgctggctcccgcaccggctcgcgcaccggctcccgggccggctcccgccgcggcagctttgacgccaccggctccggcttctccatgaccttctcttcatcctcctactcctcctcgggctacggccgccgctacgcctcggggtcctcggcctccctggggggccctgagtctgccgtggcctgaggctgcctgcgcccaccccgctctgcatgcggcccagcccggctcccaccgaggcgcgggggccgttttcaacgcttaaaggtgtcttcctcccaagtggtgcctaaagtttaaccaaaaagaccagactaatatattaatatatatctgctgtccagacagcctgtatcttgggggacagggctggcccagccctgctggccgcctcaccccctcgggtctcctcactcccttctacctgccactcacacagccaggtgccttggagggtcccaagctgggccccagcccaccctcctgtcttcccagggtagcccgcctgccagtcctagctgcacagggcagctgggcccaaccctgtctgtagagggccctggtgtttctagcactggcctgcacggtgggccttgctggggacggggggccccagtcagcctctctcccagtctacccagagaagccccttccccatgggaagacgaggccctcgggcccagcccccacagtgctgtctgatctgtgctttccagctcaccccccacactcactcctgagacccctggcctccggcgtcagcctccagcctctgttcccctagtaagtgccttccatgtcggcctctaaccccaggccccgaggacccagacccagtggggaggcggacgttccagccggcatggctgggaactgcagacctgtcctcctggtgggtccaggggcccctccagcttgtggagccccacactggggtgccgcctgcccgtctctctcccatggagccccagccccctttgggcccagggacaccagccaggctctgtgctgaccctcctgttgcacccagccctggtctcagcagcgaccacccctgcctccaccctctgagctttgcatgttccactaaccccgggcgggtggcaggtggaggtgtcaggctgctggcgcctctgcaagggcagaacactaacctgaccgtgggcggggccttgcggtatccgcccccaataaaagcaattccaacctt

SEQ ID NO: 22768 - DNA, 14683 bp, Homo sapiens
  source 1..14683: mol_type = unassigned DNA
agagtggccgccgggtgctggaggctccgctgcaccccgcgccccgcgcccgccggcatggccggcccgctgcccgacgagcaggacttcatccaggcctacgaggaggtgcgcgagaagtacaaagatgagcgggatcgtgtgcagaagaaaaccttcaccaagtgggtcaacaagcacctcatcaaggcccagaggcacatcagtgacctgtatgaagacctccgcgatggccacaacctcatctccctgctggaggtcctctcgggggacagcctgccccgggagaaggggaggatgcgtttccacaagctgcagaatgtccagattgccctggactacctccggcaccgccaggtgaagctggtgaacatcaggaatgatgacatcgctgacggcaaccccaagctgacccttggcctcatctggacaatcattctgcacttccagatctcagatatccaggtgagtgggcagtcggaggacatgacggccaaggagaagctgctgctgtggtcgcagcgaatggtggaggggtaccagggcctgcgatgcgacaacttcacctccagctggagagacggccgcctcttcaatgccatcatccaccggcacaagcccctgctcatcgacatgaacaaggtgtaccggcagaccaacctggagaacctggaccaggccttctctgtggcggagcgggacctgggagtgacgcggctcctggaccctgaggacgtggatgtccctcagcccgacgagaagtccatcatcacctacgtctcgtcgctgtatgacgccatgccccgcgtgccggacgtgcaggatggggtgagggccaacgagctgcagctgcgctggcaggagtaccgggagctggtgctgctgctgcttcagtggatgcgacaccacacggccgcctttgaggaacgcaggttcccctccagcttcgaggagattgagatcctgtggtctcagttcctgaagtttaaggagatggagctaccagccaaggaggccgacaagaacaggtccaagggcatctaccaatccctggagggagcggtgcaagcaggccagctcaaggtgccccctggctaccacccgctggatgtggagaaggagtggggcaagctgcacgtggccatcctggagcgggagaagcagctccgcagcgagtttgagaggctggagtgtcttcagcgcatcgtgaccaagctgcagatggaggcggggctgtgtgaggagcagctgaaccaggccgacgccctgctgcagtcggatgtccggctgctggctgcaggcaaagtgccacagcgggcgggggaggtggaacgggacttggacaaggcggatagcatgatccggctgctcttcaacgacgtgcagaccctcaaggatggacggcacccgcagggcgagcagatgtaccgcagggtgtaccgtctgcacgagcgcctggtagccatccgcaccgagtacaacctacggctgaaggcaggcgtggcggcccctgcaacccaggtggcccaggtgactctgcagagtgtgcagaggcgccccgagctggaggactccactctgcgctacctgcaggacctgctggcctgggtggaggagaaccagcaccgtgtggatggcgctgagtggggtgtggacctgcccagcgtggaggcgcagctgggcagccaccgaggcctgcaccagtccatcgaagaattccgggccaagatcgagcgggcacggagtgacgagggccagctctcccccgccacccggggtgcctaccgtgactgcctgggtcggctggacctgcagtacgccaagctgctgaactcctccaaggcccgcctcaggtccctggagagcttgcacagctttgtggcagccgccactaaggagctaatgtggctgaatgagaaggaggaggaggaggtgggcttcgactggagcgaccgcaacaccaacatgaccgccaagaaggagagctactcggcgctgatgcgggagctggagctgaaggagaagaagatcaaggagctccaaaatgctggggaccggctgctgcgggaggaccacccggcccggcccacggtggagtccttccaggcggccctgcagacgcagtggagctggatgctacagctgtgctgctgtatcgaggcacacctgaaggagaacgctgcctactttcagttcttctcagatgtgcgggaggccgaggggcagttgcagaagctgcaggaggcactgcgtaggaaatacagttgtgatcgctccgccaccgtcacccggctggaggacctgctgcaggatgcccaggacgagaaggaacagctgaacgagtacaagggccacctctcaggcctggccaagcgggccaaggccgtcgtgcagctgaagccccgccacccagcccaccccatgcggggccgcctgcccctgctggccgtgtgcgactataagcaggtggaggtgactgtgcacaagggtgacgagtgccagctggtgggccctgcacagccgtcccactggaaggtgctcagcagctccggcagcgaggccgccgtgccctccgtgtgcttcctggtgcccccgcccaaccaggaggcccaggaggccgtcaccaggctggaggcccagcaccaggccctggtcacgctgtggcaccagttgcacgtggacatgaagagccttctggcctggcagagccttcgccgcgacgtgcagctcatccgctcctggtccctggccacgttccgcaccctgaagccagaggagcagcgccaagccctgcacagcctggagctgcactaccaggccttcctgcgggacagccaggacgcgggcggcttcggacccgaggaccggctgatggctgagcgcgagtacggctcctgcagccaccactaccagcagctgctgcagagcctggaacagggtgcacaggaagagtctcgctgccagcgctgcatctccgagctcaaagacatccggctgcagctggaggcctgtgagacgcgcaccgtgcaccgcctgcggctgccgctggacaaagagccggcacgggagtgtgcccagcgcatcgccgagcagcagaaggcacaggcagaggtggaggggctgggcaagggggtcgcccggctctctgccgaggccgagaaggtcttggccctaccagagccatcgcctgcggcccccacgctgcgctcggagctggagctgacgctgggcaagctggagcaggtccgcagcctgtctgccatctacctggagaagctcaagaccatcagcctggtgatccgcggcacgcagggggccgaggaggtgctcagggcccacgaggagcagctcaaggaggcccaggccgtgccggccaccctcccggagctcgaggccaccaaggcctctctgaagaagctgcgggcccaggccgaggcacagcagcccacgttcgacgccctgcgggatgagctgcggggggcacaggaggtgggggagcgactgcagcagcggcacggggagcgggacgtggaggtggagcgctggcgggagcgggtcgcccagttgcttgagcgctggcaggctgtgctggcccagaccgacgtgcggcagcgcgagctcgagcaactgggccgccagctgcgttactaccgcgagagtgcagaccccttgggcgcctggctgcaggacgccaggcggcggcaggagcagatccaggccatgccgctggccgacagccaggctgtgcgggagcagctgcggcaggagcaggccctgctggaggagatcgagcgccacggcgagaaggtcgaggagtgccagaggtttgcgaaacagtacatcaacgccatcaaggactatgaactccagctggtgacgtacaaggcgcagcttgagccggtggcctccccggccaagaagcccaaggtccagtcgggatcagagagtgtcatccaggagtacgtggacctgcgtacgcactacagcgagctgaccacactgacgagccagtacatcaagttcatcagcgagactctgcggcgcatggaggaggaggagaggctggctgagcagcagcgggcagaggagcgcgagcggctggccgaggtggaggccgcgctggagaagcagcggcagctggccgaggcgcacgcccaggcaaaggcacaggcggagcgggaggcgaaggagctgcagcagcgcatgcaggaggaggtggtgcggcgggaggaggcggcggtggacgcgcagcagcagaagcgcagcattcaggaggagctgcagcagctgcggcagagctcggaggcggagatccaggccaaggcccggcaggcagaggcggctgagcgcagccggctgcgcatcgaggaggagatccgcgtggtgcgcctgcagttggaggccaccgagcgccagcgtggcggggctgagggggagctgcaggcactgcgtgcacgggcggaggaggctgaggcacaaaagcgacaggcgcaggaggaggccgagcgcttgcggaggcaggtgcaggacgagagccagcgtaagcggcaggcggaggtggagctggcctcgcgcgtgaaggccgaggccgaggcggcgcgcgagaagcagcgggccctgcaggccctggaggagctgcggctgcaggcggaggaggcggagcggcgcctgcggcaggccgaggtggagcgagcgcggcaggtacaggtggccctggagacggcgcagcgcagtgcagaggcggagctgcagagcaaacgcgcctccttcgccgagaagacggcacagctggagcgctccctgcaggaggaacacgtggctgtggcacagctgcgggaggaggctgagcggcgggcacagcagcaggccgaggccgagcgggcgcgcgaggaggcagagcgggagctggagcgctggcagctcaaggccaacgaggcgctacggctgcggctgcaggcggaggaggtggcgcagcagaagagcctggcgcaggccgaggctgagaagcagaaggaggaggcggagcgcgaggcgcggcggcgcggcaaggcggaggagcaggccgtccggcagcgggagctggctgaacaagagctggagaagcagcggcagctggcggaaggcaccgcgcagcagcgcctggccgcggagcaggagttgatccggctgcgggccgagacggagcagggggagcagcagcggcagctgctggaggaggagctggcccggctgcagcgtgaggcggctgcagccacgcagaaacggcaggagctggaagccgagctggccaaggtgcgggccgagatggaggtgctgctggccagcaaggcgagggctgaggaggagtcgcgctccaccagcgagaagtccaagcagaggctggaggccgaggccggccggttccgcgagctggccgaggaggccgcccgcctgcgtgccctggcggaagaggccaagcggcagcggcagctggccgaggaagacgcggcgcggcagcgggccgaggcggagcgggtgcttgcggagaagctggccgccatcggcgaggccacgcggctcaagacggaggcggagatcgcgctcaaggagaaggaggcggagaacgagcgcctgcggcggctggcggaggacgaggccttccagcggcggcggctggaggagcaggccgcgcaacacaaggctgacatcgaggagcgcctggcccagctgcgcaaggcatcggacagcgagctggagcggcagaaggggctggtggaggacacgctgaggcagcggcggcaggtggaggaggagatcctggcgctgaaggcgagcttcgagaaggcggccgctggcaaggcggagctggagctggagctgggacgcatccgcagcaacgcggaggacacgctgcgcagcaaggagcaggccgagctggaggctgcgaggcagcggcagctggcggcggaggaggagcggcggcgccgtgaggctgaggagcgcgtgcagaagagcctggcggccgaggaggaggccgcacggcagcggaaggcggcgctggaggaagtcgagcggctgaaagccaaggtggaggaggcgcggcgcctgcgggagcgagcggagcaggagtcggcgcggcagctgcagctggcccaggaggccgcccagaagcggctgcaggcggaagagaaggcacacgccttcgcggtgcagcagaaggagcaggagctacagcagacgctgcagcaggagcagagcgtgctggaccagctgcgcggcgaggcggaggcggcccggcgggcggctgaggaggcggaggaggcccgggtgcaggcggagcgtgaggcggcgcagtcccggcggcaggtggaagaggccgagcggctgaagcagtcggcagaggagcaggcacaggcccgggctcaggcacaggcggctgcagagaagctgcgcaaggaggccgagcaagaggcggcgcggcgggcacaggcggagcaggcggccctgcggcagaagcaggcagctgacgcggagatggagaagcataagaaattcgccgagcagacgctgcggcagaaggcgcaggtggagcaggagctgacaacactgcggctgcagctggaggagaccgaccaccagaagaacctgctggacgaggagctgcagcggctgaaggcggaggccacggaggccgcacgccagcgcagccaggtggaggaggagctcttctcggtgcgcgtgcagatggaggagctgagcaagctcaaggcacgcatcgaggctgagaaccgcgcactcatcttgcgtgacaaggacaatacgcagcgcttcctgcaggaggaggctgagaagatgaagcaggtggcggaggaggccgcgcggctgagtgtggcggcccaagaggctgcgcgactgcggcagctggcagaggaggacctggcacagcagcgggccttggcagagaagatgctcaaggagaagatgcaggcggtgcaggaggccacgcgactcaaggctgaggcggaactgctgcagcagcagaaggagcttgcgcaggagcaggcgcggcggctgcaggaggacaaggagcagatggcgcagcagctggcggaggagacgcagggcttccagcggacgctggaggccgagcggcagcggcagctggagatgagcgctgaggctgagcgcctcaagctgcgtgtggccgagatgagccgagcccaggcccgcgctgaggaggacgcccagcgcttccggaagcaggcggaggagatcggtgagaagctgcaccgcacggagctcgccacccaggagaaggtgaccctggtgcagacactggagatccagcgacagcagagtgaccatgatgccgagcgcctgcgggaggccatcgctgagctggagcgtgagaaggagaagctccaacaggaggccaaactgctgcagctcaagtctgaggagatgcagacggtgcagcaggagcagctgctgcaggagacgcaggccctgcagcaaagcttcctctctgaaaaggacagcctgctacagcgggagcgcttcatcgagcaggagaaggccaagctggagcagctcttccaggacgaggtggccaaggcacagcagctgcgtgaggagcagcagcggcagcagcagcagatggagcaggaacggcagcggctggtggccagcatggaggaggcgcggcggcggcagcatgaggccgaggagggcgtgcggcgcaagcaggaggagctgcagcagctggagcagcagcggcggcagcaggaggagctgctggctgaggagaaccagaggctgcgtgagcagctgcagctcctggaggagcagcaccgggccgcgctggcgcactcagaggaggtcactgcctcgcaggtggctgccacaaagaccctgcccaatggccgggatgcacttgatggccccgcggcagaggcagagccggagcacagcttcgatggcctgcggcggaaggtgtcagctcagaggctgcaggaggccggcatcctgagtgcggaggagctgcagcggttggcgcagggccacaccacggtggacgagctcgcacggcgggaagacgtgcgccactacctgcagggccgcagcagtatcgcagggctgttgctgaaggccaccaatgagaagctgagtgtttacgccgccctgcagaggcagctgctgagtcccggcacggccctcatcctgctggaggcgcaggcggcctcaggcttcctgctggaccctgtgcggaaccggcggctgaccgtcaacgaggctgtgaaggagggtgtggtgggccccgagctgcaccacaagctgctgtcggccgagcgcgccgtcactggctacaaggacccctacactggccagcagatctctctcttccaagccatgcagaagggcctcatcgtccgggagcacggcatccgcctgctggaggcccagatcgccacgggcggcgttatcgaccccgtgcacagccaccgcgtgcccgtggacgtggcctaccggcgcggctacttcgacgaggagatgaaccgcgtcctggcggaccccagcgacgacaccaagggcttctttgaccccaacacgcacgagaacctcacgtacctgcagctactggagcgctgcgtggaggaccccgagacgggcctgtgccttctgccactcacggataaggctgccaagggcggggagctggtctacactgactccgaggcccgggacgtctttgagaaggccaccgtgtctgcgccgttcggcaagttccagggcaagacggtgaccatttgggagatcatcaactcggaatacttcacggcagagcagcggcgggacctgctgcggcagttccgcacgggccggatcacagtggagaagatcatcaagatcatcatcacggtggtggaggagcaggagcagaagggccggctttgctttgagggcctgcgcagcctggtgccagccgccgagctgctggagagcagggtcatcgaccgcgagctctaccagcagctgcagcgaggtgagcgctctgtgcgagacgtagccgaggtggacactgtgcggcgggctctccggggtgccaacgtcatcgcgggtgtatggctggaggaggcggggcagaagctgagtatctacaatgccctgaagaaagacctgctgccatccgacatggccgtggccctgttggaagcccaggccggcaccgggcacatcatcgaccccgccaccagcgcccggctgaccgtggacgaggcagtgcgtgctggcctggtgggccccgagtttcatgagaagctgctatcagccgagaaggctgtgacagggtacagggacccctacacagggcagagcgtctccctgttccaggccctgaagaagggcctcattccccgggagcagggcctgcgcctgttggacgcccagctgtccacgggcggcatcgtggaccccagcaagagccaccgcgtgcccctggatgtcgcctgcgcccgaggctgcctggatgaggagaccagcagggccctgtcggcaccaagggccgacgccaaggcctacagtgaccccagcacaggggagccggccacctacggcgagctccagcagcggtgccggcccgaccagctgaccgggctgagcctgctgccgctctcagaaaaggctgctcgggcccggcaggaggagctctactcagagctgcaggcccgtgagacctttgaaaagaccccggttgaggtccccgtgggtggcttcaagggcaggacggtgacggtgtgggagctcatcagctctgagtacttcactgcggagcagcggcaggagctgttgcgtcagttccgcacgggcaaggtcaccgtggagaaggtcatcaagattctcattaccatcgtggaggaggtggagaccctgcggcaggagaggctgtccttcagcggcctccgtgcccctgtgccagccagcgagctcctggcttccggggtcctcagcagagcccagtttgagcagctcaaggacggcaagacgacggtcaaggacctttcggagctgggctccgtgcggacgctgctgcagggcagtggctgcctcgccggcatctacctggaggacaccaaggagaaggtgtccatctacgaggccatgcgccggggcctgctgagagccacaacggctgcgctcctgctggaggcgcaggcggccactggcttcctggtggaccccgtgcggaaccagcgcctgtatgtccacgaggccgtgaaggcgggcgtggtgggccccgagcttcacgagcagctgctgtctgccgagaaggccgtcaccggctacagagacccctactcgggcagcaccatctccctcttccaggccatgcagaagggcctggttctccggcagcacggcatccgcctgctggaggcccagatcgccacgggcggcatcatcgaccccgtgcacagccaccgcgtgcctgtggacgtggcctaccagcgcggctacttcagtgaggagatgaaccgcgtcctggcggaccccagcgacgacaccaagggcttctttgaccccaacacgcatgagaacctcacgtacaggcagctgctggagcggtgcgtggaggaccccgagacgggcttgcgccttctgccactgaaaggggcggagaaggctgaggtggtggagaccacgcaggtgtacactgaggaggagacaagaagggcatttgaagagacacagatcgacattcccggcggcggcagccacggcggctccaccatgtccctgtgggaggtgatgcagtcggacctgatccccgaggagcagcgggcccagctgatggctgacttccaggccggccgggtgaccaaggaacgcatgatcatcatcatcatcgagatcattgagaagacagagatcatccgccagcagggtctggcctcctacgactacgtgcgccgccgcctcacggctgaggacctgttcgaggctcggatcatctctctcgagacctacaacctgctccgggagggcaccaggagcctccgtgaggctctcgaggcggagtccgcctggtgctacctctatggcacgggctccgtggctggtgtctacctgcccggttccaggcagacactgagcatctaccaggctctcaagaaagggctgctgagtgccgaggtggcccgcctgctgctggaggcacaggcagccacaggcttcctgctggacccggtgaagggggagcggctgactgtggatgaggctgtgcggaagggcctcgtggggcccgagctgcacgaccgcctgctctcggctgagcgggcggtcaccggctaccgtgacccctacaccgagcagaccatctcgctcttccaggccatgaagaaggagctgatccctactgaggaggccctgcggctgctggatgcccagctggccaccggcggcatcgtggacccccgcctgggcttccaccttcccctggaggtggcttaccagcgtggctacctcaacaaggacacgcacgaccagctgtcagagcccagcgaggtgcgcagctacgtggacccgtccaccgacgagcgcctcagctacacgcagctgctcaggcggtgccgtcgtgacgacggcaccggccagctgctcctgccactgtcggacgcccgcaagctgaccttccgtggcctgcggaagcagatcaccatggaggagctggtgcgctcgcaggtcatggacgaggccacggcgctgcagctgcgggagggcctgacctccatcgaggaggtcaccaagaacttgcagaagttcctggaaggcaccagctgcatcgctggtgtcttcgtggacgccaccaaggaacggctctcggtgtaccaggccatgaagaagggcatcatccgccccggcacagcctttgagctcctggaggcgcaggcggccaccggttacgtcatcgaccccatcaagggactgaagctgacggtggaggaggctgtgcgtatgggcattgtgggccccgagttcaaggacaagctgctgtcggccgagcgcgccgtcactgggtacaaggacccctactctgggaagctcatctccctcttccaggccatgaagaagggcctgatcctgaaggaccatggcatccgcctgctggaggcccagatcgccacgggcggcatcatcgaccctgaggagagccaccggctgcccgtggaggtggcctacaagcgcggcctcttcgatgaggagatgaacgagatcctgaccgacccctcggacgacaccaagggcttctttgaccctaacacggaggagaacctcacctacctgcagctgatggagcgttgtatcactgacccccagacgggcctgtgtctcttgccgctgaaggagaagaagcgggagcggaagacgtcctccaagtcctccgtgcgcaagcgccgagtggtcatcgtggaccccgagacgggcaaggagatgtcagtgtacgaggcctaccgcaagggcctgattgaccaccagacgtacctggagctgtccgagcaggagtgcgagtgggaggagatcaccatctcctcctcggacggcgtggtcaagtccatgatcatcgaccgccgctccgggcgccagtacgacatcgatgatgccatcgccaagaacctcatcgaccgctcggcactggaccagtaccgcgccggcacgctctccatcaccgagttcgccgacatgctctcgggcaacgccggtggtttccgctcccgttcctcctcggtgggatcctcctcctcctaccccatcagccccgccgtctccaggacccagctggcctcctggtcagaccccactgaggagacgggccccgtggctggcatcctggacacggagacgctggagaaggtgtccatcaccgaggccatgcaccggaacctggtggataacatcacggggcagcggctgctggaggcgcaggcctgcaccgggggcatcatcgaccccagcaccggtgagcgcttccctgtcaccgacgccgtcaacaagggcctggtggacaagatcatggtggaccgcatcaacctggcccagaaggccttctgcggcttcgaggacccacgcaccaagaccaagatgtcggccgcccaggccctgaagaagggctggctctactacgaggccggccagcgcttcctggaggtgcagtacctgaccggcggcttgatcgagcccgacacgccgggccgcgtgcccctggacgaggccctgcagcgcggcacggtggacgcccgcaccgcacagaagctgcgtgacgtgggcgcctactccaagtacctcacctgccctaagaccaagctcaagatctcctataaggacgcgctggaccgcagcatggtggaggagggcacggggctgcggctgctggaggctgccgcgcagtccaccaagggctactacagcccctacagcgtcagcggctccggctctaccgctggctcccgcaccggctcgcgcaccggctcccgggccggctcccgccgcggcagctttgacgccaccggctccggcttctccatgaccttctcttcatcctcctactcctcctcgggctacggccgccgctacgcctcggggtcctcggcctccctggggggccctgagtctgccgtggcctgaggctgcctgcgcccaccccgctctgcatgcggcccagcccggctcccaccgaggcgcgggggccgttttcaacgcttaaaggtgtcttcctcccaagtggtgcctaaagtttaaccaaaaagaccagactaatatattaatatatatctgctgtccagacagcctgtatcttgggggacagggctggcccagccctgctggccgcctcaccccctcgggtctcctcactcccttctacctgccactcacacagccaggtgccttggagggtcccaagctgggccccagcccaccctcctgtcttcccagggtagcccgcctgccagtcctagctgcacagggcagctgggcccaaccctgtctgtagagggccctggtgtttctagcactggcctgcacggtgggccttgctggggacggggggccccagtcagcctctctcccagtctacccagagaagccccttccccatgggaagacgaggccctcgggcccagcccccacagtgctgtctgatctgtgctttccagctcaccccccacactcactcctgagacccctggcctccggcgtcagcctccagcctctgttcccctagtaagtgccttccatgtcggcctctaaccccaggccccgaggacccagacccagtggggaggcggacgttccagccggcatggctgggaactgcagacctgtcctcctggtgggtccaggggcccctccagcttgtggagccccacactggggtgccgcctgcccgtctctctcccatggagccccagccccctttgggcccagggacaccagccaggctctgtgctgaccctcctgttgcacccagccctggtctcagcagcgaccacccctgcctccaccctctgagctttgcatgttccactaaccccgggcgggtggcaggtggaggtgtcaggctgctggcgcctctgcaagggcagaacactaacctgaccgtgggcggggccttgcggtatccgcccccaataaaagcaattccaacctt

SEQ ID NO: 22769 - DNA, 14689 bp, Homo sapiens
  source 1..14689: mol_type = unassigned DNA
gtggccggcatgtcgggggcggggggcgcctttgcctcgccgagggaggtcttgctggagcggccgtgctggctggacgggggctgcgagccggcccgcaggggctacctctaccagcagctgtgctgcgtagatgagcgggatcgtgtgcagaagaaaaccttcaccaagtgggtcaacaagcacctcatcaaggcccagaggcacatcagtgacctgtatgaagacctccgcgatggccacaacctcatctccctgctggaggtcctctcgggggacagcctgccccgggagaaggggaggatgcgtttccacaagctgcagaatgtccagattgccctggactacctccggcaccgccaggtgaagctggtgaacatcaggaatgatgacatcgctgacggcaaccccaagctgacccttggcctcatctggacaatcattctgcacttccagatctcagatatccaggtgagtgggcagtcggaggacatgacggccaaggagaagctgctgctgtggtcgcagcgaatggtggaggggtaccagggcctgcgatgcgacaacttcacctccagctggagagacggccgcctcttcaatgccatcatccaccggcacaagcccctgctcatcgacatgaacaaggtgtaccggcagaccaacctggagaacctggaccaggccttctctgtggcggagcgggacctgggagtgacgcggctcctggaccctgaggacgtggatgtccctcagcccgacgagaagtccatcatcacctacgtctcgtcgctgtatgacgccatgccccgcgtgccggacgtgcaggatggggtgagggccaacgagctgcagctgcgctggcaggagtaccgggagctggtgctgctgctgcttcagtggatgcgacaccacacggccgcctttgaggaacgcaggttcccctccagcttcgaggagattgagatcctgtggtctcagttcctgaagtttaaggagatggagctaccagccaaggaggccgacaagaacaggtccaagggcatctaccaatccctggagggagcggtgcaagcaggccagctcaaggtgccccctggctaccacccgctggatgtggagaaggagtggggcaagctgcacgtggccatcctggagcgggagaagcagctccgcagcgagtttgagaggctggagtgtcttcagcgcatcgtgaccaagctgcagatggaggcggggctgtgtgaggagcagctgaaccaggccgacgccctgctgcagtcggatgtccggctgctggctgcaggcaaagtgccacagcgggcgggggaggtggaacgggacttggacaaggcggatagcatgatccggctgctcttcaacgacgtgcagaccctcaaggatggacggcacccgcagggcgagcagatgtaccgcagggtgtaccgtctgcacgagcgcctggtagccatccgcaccgagtacaacctacggctgaaggcaggcgtggcggcccctgcaacccaggtggcccaggtgactctgcagagtgtgcagaggcgccccgagctggaggactccactctgcgctacctgcaggacctgctggcctgggtggaggagaaccagcaccgtgtggatggcgctgagtggggtgtggacctgcccagcgtggaggcgcagctgggcagccaccgaggcctgcaccagtccatcgaagaattccgggccaagatcgagcgggcacggagtgacgagggccagctctcccccgccacccggggtgcctaccgtgactgcctgggtcggctggacctgcagtacgccaagctgctgaactcctccaaggcccgcctcaggtccctggagagcttgcacagctttgtggcagccgccactaaggagctaatgtggctgaatgagaaggaggaggaggaggtgggcttcgactggagcgaccgcaacaccaacatgaccgccaagaaggagagctactcggcgctgatgcgggagctggagctgaaggagaagaagatcaaggagctccaaaatgctggggaccggctgctgcgggaggaccacccggcccggcccacggtggagtccttccaggcggccctgcagacgcagtggagctggatgctacagctgtgctgctgtatcgaggcacacctgaaggagaacgctgcctactttcagttcttctcagatgtgcgggaggccgaggggcagttgcagaagctgcaggaggcactgcgtaggaaatacagttgtgatcgctccgccaccgtcacccggctggaggacctgctgcaggatgcccaggacgagaaggaacagctgaacgagtacaagggccacctctcaggcctggccaagcgggccaaggccgtcgtgcagctgaagccccgccacccagcccaccccatgcggggccgcctgcccctgctggccgtgtgcgactataagcaggtggaggtgactgtgcacaagggtgacgagtgccagctggtgggccctgcacagccgtcccactggaaggtgctcagcagctccggcagcgaggccgccgtgccctccgtgtgcttcctggtgcccccgcccaaccaggaggcccaggaggccgtcaccaggctggaggcccagcaccaggccctggtcacgctgtggcaccagttgcacgtggacatgaagagccttctggcctggcagagccttcgccgcgacgtgcagctcatccgctcctggtccctggccacgttccgcaccctgaagccagaggagcagcgccaagccctgcacagcctggagctgcactaccaggccttcctgcgggacagccaggacgcgggcggcttcggacccgaggaccggctgatggctgagcgcgagtacggctcctgcagccaccactaccagcagctgctgcagagcctggaacagggtgcacaggaagagtctcgctgccagcgctgcatctccgagctcaaagacatccggctgcagctggaggcctgtgagacgcgcaccgtgcaccgcctgcggctgccgctggacaaagagccggcacgggagtgtgcccagcgcatcgccgagcagcagaaggcacaggcagaggtggaggggctgggcaagggggtcgcccggctctctgccgaggccgagaaggtcttggccctaccagagccatcgcctgcggcccccacgctgcgctcggagctggagctgacgctgggcaagctggagcaggtccgcagcctgtctgccatctacctggagaagctcaagaccatcagcctggtgatccgcggcacgcagggggccgaggaggtgctcagggcccacgaggagcagctcaaggaggcccaggccgtgccggccaccctcccggagctcgaggccaccaaggcctctctgaagaagctgcgggcccaggccgaggcacagcagcccacgttcgacgccctgcgggatgagctgcggggggcacaggaggtgggggagcgactgcagcagcggcacggggagcgggacgtggaggtggagcgctggcgggagcgggtcgcccagttgcttgagcgctggcaggctgtgctggcccagaccgacgtgcggcagcgcgagctcgagcaactgggccgccagctgcgttactaccgcgagagtgcagaccccttgggcgcctggctgcaggacgccaggcggcggcaggagcagatccaggccatgccgctggccgacagccaggctgtgcgggagcagctgcggcaggagcaggccctgctggaggagatcgagcgccacggcgagaaggtcgaggagtgccagaggtttgcgaaacagtacatcaacgccatcaaggactatgaactccagctggtgacgtacaaggcgcagcttgagccggtggcctccccggccaagaagcccaaggtccagtcgggatcagagagtgtcatccaggagtacgtggacctgcgtacgcactacagcgagctgaccacactgacgagccagtacatcaagttcatcagcgagactctgcggcgcatggaggaggaggagaggctggctgagcagcagcgggcagaggagcgcgagcggctggccgaggtggaggccgcgctggagaagcagcggcagctggccgaggcgcacgcccaggcaaaggcacaggcggagcgggaggcgaaggagctgcagcagcgcatgcaggaggaggtggtgcggcgggaggaggcggcggtggacgcgcagcagcagaagcgcagcattcaggaggagctgcagcagctgcggcagagctcggaggcggagatccaggccaaggcccggcaggcagaggcggctgagcgcagccggctgcgcatcgaggaggagatccgcgtggtgcgcctgcagttggaggccaccgagcgccagcgtggcggggctgagggggagctgcaggcactgcgtgcacgggcggaggaggctgaggcacaaaagcgacaggcgcaggaggaggccgagcgcttgcggaggcaggtgcaggacgagagccagcgtaagcggcaggcggaggtggagctggcctcgcgcgtgaaggccgaggccgaggcggcgcgcgagaagcagcgggccctgcaggccctggaggagctgcggctgcaggcggaggaggcggagcggcgcctgcggcaggccgaggtggagcgagcgcggcaggtacaggtggccctggagacggcgcagcgcagtgcagaggcggagctgcagagcaaacgcgcctccttcgccgagaagacggcacagctggagcgctccctgcaggaggaacacgtggctgtggcacagctgcgggaggaggctgagcggcgggcacagcagcaggccgaggccgagcgggcgcgcgaggaggcagagcgggagctggagcgctggcagctcaaggccaacgaggcgctacggctgcggctgcaggcggaggaggtggcgcagcagaagagcctggcgcaggccgaggctgagaagcagaaggaggaggcggagcgcgaggcgcggcggcgcggcaaggcggaggagcaggccgtccggcagcgggagctggctgaacaagagctggagaagcagcggcagctggcggaaggcaccgcgcagcagcgcctggccgcggagcaggagttgatccggctgcgggccgagacggagcagggggagcagcagcggcagctgctggaggaggagctggcccggctgcagcgtgaggcggctgcagccacgcagaaacggcaggagctggaagccgagctggccaaggtgcgggccgagatggaggtgctgctggccagcaaggcgagggctgaggaggagtcgcgctccaccagcgagaagtccaagcagaggctggaggccgaggccggccggttccgcgagctggccgaggaggccgcccgcctgcgtgccctggcggaagaggccaagcggcagcggcagctggccgaggaagacgcggcgcggcagcgggccgaggcggagcgggtgcttgcggagaagctggccgccatcggcgaggccacgcggctcaagacggaggcggagatcgcgctcaaggagaaggaggcggagaacgagcgcctgcggcggctggcggaggacgaggccttccagcggcggcggctggaggagcaggccgcgcaacacaaggctgacatcgaggagcgcctggcccagctgcgcaaggcatcggacagcgagctggagcggcagaaggggctggtggaggacacgctgaggcagcggcggcaggtggaggaggagatcctggcgctgaaggcgagcttcgagaaggcggccgctggcaaggcggagctggagctggagctgggacgcatccgcagcaacgcggaggacacgctgcgcagcaaggagcaggccgagctggaggctgcgaggcagcggcagctggcggcggaggaggagcggcggcgccgtgaggctgaggagcgcgtgcagaagagcctggcggccgaggaggaggccgcacggcagcggaaggcggcgctggaggaagtcgagcggctgaaagccaaggtggaggaggcgcggcgcctgcgggagcgagcggagcaggagtcggcgcggcagctgcagctggcccaggaggccgcccagaagcggctgcaggcggaagagaaggcacacgccttcgcggtgcagcagaaggagcaggagctacagcagacgctgcagcaggagcagagcgtgctggaccagctgcgcggcgaggcggaggcggcccggcgggcggctgaggaggcggaggaggcccgggtgcaggcggagcgtgaggcggcgcagtcccggcggcaggtggaagaggccgagcggctgaagcagtcggcagaggagcaggcacaggcccgggctcaggcacaggcggctgcagagaagctgcgcaaggaggccgagcaagaggcggcgcggcgggcacaggcggagcaggcggccctgcggcagaagcaggcagctgacgcggagatggagaagcataagaaattcgccgagcagacgctgcggcagaaggcgcaggtggagcaggagctgacaacactgcggctgcagctggaggagaccgaccaccagaagaacctgctggacgaggagctgcagcggctgaaggcggaggccacggaggccgcacgccagcgcagccaggtggaggaggagctcttctcggtgcgcgtgcagatggaggagctgagcaagctcaaggcacgcatcgaggctgagaaccgcgcactcatcttgcgtgacaaggacaatacgcagcgcttcctgcaggaggaggctgagaagatgaagcaggtggcggaggaggccgcgcggctgagtgtggcggcccaagaggctgcgcgactgcggcagctggcagaggaggacctggcacagcagcgggccttggcagagaagatgctcaaggagaagatgcaggcggtgcaggaggccacgcgactcaaggctgaggcggaactgctgcagcagcagaaggagcttgcgcaggagcaggcgcggcggctgcaggaggacaaggagcagatggcgcagcagctggcggaggagacgcagggcttccagcggacgctggaggccgagcggcagcggcagctggagatgagcgctgaggctgagcgcctcaagctgcgtgtggccgagatgagccgagcccaggcccgcgctgaggaggacgcccagcgcttccggaagcaggcggaggagatcggtgagaagctgcaccgcacggagctcgccacccaggagaaggtgaccctggtgcagacactggagatccagcgacagcagagtgaccatgatgccgagcgcctgcgggaggccatcgctgagctggagcgtgagaaggagaagctccaacaggaggccaaactgctgcagctcaagtctgaggagatgcagacggtgcagcaggagcagctgctgcaggagacgcaggccctgcagcaaagcttcctctctgaaaaggacagcctgctacagcgggagcgcttcatcgagcaggagaaggccaagctggagcagctcttccaggacgaggtggccaaggcacagcagctgcgtgaggagcagcagcggcagcagcagcagatggagcaggaacggcagcggctggtggccagcatggaggaggcgcggcggcggcagcatgaggccgaggagggcgtgcggcgcaagcaggaggagctgcagcagctggagcagcagcggcggcagcaggaggagctgctggctgaggagaaccagaggctgcgtgagcagctgcagctcctggaggagcagcaccgggccgcgctggcgcactcagaggaggtcactgcctcgcaggtggctgccacaaagaccctgcccaatggccgggatgcacttgatggccccgcggcagaggcagagccggagcacagcttcgatggcctgcggcggaaggtgtcagctcagaggctgcaggaggccggcatcctgagtgcggaggagctgcagcggttggcgcagggccacaccacggtggacgagctcgcacggcgggaagacgtgcgccactacctgcagggccgcagcagtatcgcagggctgttgctgaaggccaccaatgagaagctgagtgtttacgccgccctgcagaggcagctgctgagtcccggcacggccctcatcctgctggaggcgcaggcggcctcaggcttcctgctggaccctgtgcggaaccggcggctgaccgtcaacgaggctgtgaaggagggtgtggtgggccccgagctgcaccacaagctgctgtcggccgagcgcgccgtcactggctacaaggacccctacactggccagcagatctctctcttccaagccatgcagaagggcctcatcgtccgggagcacggcatccgcctgctggaggcccagatcgccacgggcggcgttatcgaccccgtgcacagccaccgcgtgcccgtggacgtggcctaccggcgcggctacttcgacgaggagatgaaccgcgtcctggcggaccccagcgacgacaccaagggcttctttgaccccaacacgcacgagaacctcacgtacctgcagctactggagcgctgcgtggaggaccccgagacgggcctgtgccttctgccactcacggataaggctgccaagggcggggagctggtctacactgactccgaggcccgggacgtctttgagaaggccaccgtgtctgcgccgttcggcaagttccagggcaagacggtgaccatttgggagatcatcaactcggaatacttcacggcagagcagcggcgggacctgctgcggcagttccgcacgggccggatcacagtggagaagatcatcaagatcatcatcacggtggtggaggagcaggagcagaagggccggctttgctttgagggcctgcgcagcctggtgccagccgccgagctgctggagagcagggtcatcgaccgcgagctctaccagcagctgcagcgaggtgagcgctctgtgcgagacgtagccgaggtggacactgtgcggcgggctctccggggtgccaacgtcatcgcgggtgtatggctggaggaggcggggcagaagctgagtatctacaatgccctgaagaaagacctgctgccatccgacatggccgtggccctgttggaagcccaggccggcaccgggcacatcatcgaccccgccaccagcgcccggctgaccgtggacgaggcagtgcgtgctggcctggtgggccccgagtttcatgagaagctgctatcagccgagaaggctgtgacagggtacagggacccctacacagggcagagcgtctccctgttccaggccctgaagaagggcctcattccccgggagcagggcctgcgcctgttggacgcccagctgtccacgggcggcatcgtggaccccagcaagagccaccgcgtgcccctggatgtcgcctgcgcccgaggctgcctggatgaggagaccagcagggccctgtcggcaccaagggccgacgccaaggcctacagtgaccccagcacaggggagccggccacctacggcgagctccagcagcggtgccggcccgaccagctgaccgggctgagcctgctgccgctctcagaaaaggctgctcgggcccggcaggaggagctctactcagagctgcaggcccgtgagacctttgaaaagaccccggttgaggtccccgtgggtggcttcaagggcaggacggtgacggtgtgggagctcatcagctctgagtacttcactgcggagcagcggcaggagctgttgcgtcagttccgcacgggcaaggtcaccgtggagaaggtcatcaagattctcattaccatcgtggaggaggtggagaccctgcggcaggagaggctgtccttcagcggcctccgtgcccctgtgccagccagcgagctcctggcttccggggtcctcagcagagcccagtttgagcagctcaaggacggcaagacgacggtcaaggacctttcggagctgggctccgtgcggacgctgctgcagggcagtggctgcctcgccggcatctacctggaggacaccaaggagaaggtgtccatctacgaggccatgcgccggggcctgctgagagccacaacggctgcgctcctgctggaggcgcaggcggccactggcttcctggtggaccccgtgcggaaccagcgcctgtatgtccacgaggccgtgaaggcgggcgtggtgggccccgagcttcacgagcagctgctgtctgccgagaaggccgtcaccggctacagagacccctactcgggcagcaccatctccctcttccaggccatgcagaagggcctggttctccggcagcacggcatccgcctgctggaggcccagatcgccacgggcggcatcatcgaccccgtgcacagccaccgcgtgcctgtggacgtggcctaccagcgcggctacttcagtgaggagatgaaccgcgtcctggcggaccccagcgacgacaccaagggcttctttgaccccaacacgcatgagaacctcacgtacaggcagctgctggagcggtgcgtggaggaccccgagacgggcttgcgccttctgccactgaaaggggcggagaaggctgaggtggtggagaccacgcaggtgtacactgaggaggagacaagaagggcatttgaagagacacagatcgacattcccggcggcggcagccacggcggctccaccatgtccctgtgggaggtgatgcagtcggacctgatccccgaggagcagcgggcccagctgatggctgacttccaggccggccgggtgaccaaggaacgcatgatcatcatcatcatcgagatcattgagaagacagagatcatccgccagcagggtctggcctcctacgactacgtgcgccgccgcctcacggctgaggacctgttcgaggctcggatcatctctctcgagacctacaacctgctccgggagggcaccaggagcctccgtgaggctctcgaggcggagtccgcctggtgctacctctatggcacgggctccgtggctggtgtctacctgcccggttccaggcagacactgagcatctaccaggctctcaagaaagggctgctgagtgccgaggtggcccgcctgctgctggaggcacaggcagccacaggcttcctgctggacccggtgaagggggagcggctgactgtggatgaggctgtgcggaagggcctcgtggggcccgagctgcacgaccgcctgctctcggctgagcgggcggtcaccggctaccgtgacccctacaccgagcagaccatctcgctcttccaggccatgaagaaggagctgatccctactgaggaggccctgcggctgctggatgcccagctggccaccggcggcatcgtggacccccgcctgggcttccaccttcccctggaggtggcttaccagcgtggctacctcaacaaggacacgcacgaccagctgtcagagcccagcgaggtgcgcagctacgtggacccgtccaccgacgagcgcctcagctacacgcagctgctcaggcggtgccgtcgtgacgacggcaccggccagctgctcctgccactgtcggacgcccgcaagctgaccttccgtggcctgcggaagcagatcaccatggaggagctggtgcgctcgcaggtcatggacgaggccacggcgctgcagctgcgggagggcctgacctccatcgaggaggtcaccaagaacttgcagaagttcctggaaggcaccagctgcatcgctggtgtcttcgtggacgccaccaaggaacggctctcggtgtaccaggccatgaagaagggcatcatccgccccggcacagcctttgagctcctggaggcgcaggcggccaccggttacgtcatcgaccccatcaagggactgaagctgacggtggaggaggctgtgcgtatgggcattgtgggccccgagttcaaggacaagctgctgtcggccgagcgcgccgtcactgggtacaaggacccctactctgggaagctcatctccctcttccaggccatgaagaagggcctgatcctgaaggaccatggcatccgcctgctggaggcccagatcgccacgggcggcatcatcgaccctgaggagagccaccggctgcccgtggaggtggcctacaagcgcggcctcttcgatgaggagatgaacgagatcctgaccgacccctcggacgacaccaagggcttctttgaccctaacacggaggagaacctcacctacctgcagctgatggagcgttgtatcactgacccccagacgggcctgtgtctcttgccgctgaaggagaagaagcgggagcggaagacgtcctccaagtcctccgtgcgcaagcgccgagtggtcatcgtggaccccgagacgggcaaggagatgtcagtgtacgaggcctaccgcaagggcctgattgaccaccagacgtacctggagctgtccgagcaggagtgcgagtgggaggagatcaccatctcctcctcggacggcgtggtcaagtccatgatcatcgaccgccgctccgggcgccagtacgacatcgatgatgccatcgccaagaacctcatcgaccgctcggcactggaccagtaccgcgccggcacgctctccatcaccgagttcgccgacatgctctcgggcaacgccggtggtttccgctcccgttcctcctcggtgggatcctcctcctcctaccccatcagccccgccgtctccaggacccagctggcctcctggtcagaccccactgaggagacgggccccgtggctggcatcctggacacggagacgctggagaaggtgtccatcaccgaggccatgcaccggaacctggtggataacatcacggggcagcggctgctggaggcgcaggcctgcaccgggggcatcatcgaccccagcaccggtgagcgcttccctgtcaccgacgccgtcaacaagggcctggtggacaagatcatggtggaccgcatcaacctggcccagaaggccttctgcggcttcgaggacccacgcaccaagaccaagatgtcggccgcccaggccctgaagaagggctggctctactacgaggccggccagcgcttcctggaggtgcagtacctgaccggcggcttgatcgagcccgacacgccgggccgcgtgcccctggacgaggccctgcagcgcggcacggtggacgcccgcaccgcacagaagctgcgtgacgtgggcgcctactccaagtacctcacctgccctaagaccaagctcaagatctcctataaggacgcgctggaccgcagcatggtggaggagggcacggggctgcggctgctggaggctgccgcgcagtccaccaagggctactacagcccctacagcgtcagcggctccggctctaccgctggctcccgcaccggctcgcgcaccggctcccgggccggctcccgccgcggcagctttgacgccaccggctccggcttctccatgaccttctcttcatcctcctactcctcctcgggctacggccgccgctacgcctcggggtcctcggcctccctggggggccctgagtctgccgtggcctgaggctgcctgcgcccaccccgctctgcatgcggcccagcccggctcccaccgaggcgcgggggccgttttcaacgcttaaaggtgtcttcctcccaagtggtgcctaaagtttaaccaaaaagaccagactaatatattaatatatatctgctgtccagacagcctgtatcttgggggacagggctggcccagccctgctggccgcctcaccccctcgggtctcctcactcccttctacctgccactcacacagccaggtgccttggagggtcccaagctgggccccagcccaccctcctgtcttcccagggtagcccgcctgccagtcctagctgcacagggcagctgggcccaaccctgtctgtagagggccctggtgtttctagcactggcctgcacggtgggccttgctggggacggggggccccagtcagcctctctcccagtctacccagagaagccccttccccatgggaagacgaggccctcgggcccagcccccacagtgctgtctgatctgtgctttccagctcaccccccacactcactcctgagacccctggcctccggcgtcagcctccagcctctgttcccctagtaagtgccttccatgtcggcctctaaccccaggccccgaggacccagacccagtggggaggcggacgttccagccggcatggctgggaactgcagacctgtcctcctggtgggtccaggggcccctccagcttgtggagccccacactggggtgccgcctgcccgtctctctcccatggagccccagccccctttgggcccagggacaccagccaggctctgtgctgaccctcctgttgcacccagccctggtctcagcagcgaccacccctgcctccaccctctgagctttgcatgttccactaaccccgggcgggtggcaggtggaggtgtcaggctgctggcgcctctgcaagggcagaacactaacctgaccgtgggcggggccttgcggtatccgcccccaataaaagcaattccaacctt

SEQ ID NO: 22770 - DNA, 14646 bp, Homo sapiens
  source 1..14646: mol_type = unassigned DNA
cctccgaggggcctgtgacctcccacacccctggcccgctccgtctgccccgtgggctcctgccaccgtccccgatgaagatcgtgcccgatgagcgggatcgtgtgcagaagaaaaccttcaccaagtgggtcaacaagcacctcatcaaggcccagaggcacatcagtgacctgtatgaagacctccgcgatggccacaacctcatctccctgctggaggtcctctcgggggacagcctgccccgggagaaggggaggatgcgtttccacaagctgcagaatgtccagattgccctggactacctccggcaccgccaggtgaagctggtgaacatcaggaatgatgacatcgctgacggcaaccccaagctgacccttggcctcatctggacaatcattctgcacttccagatctcagatatccaggtgagtgggcagtcggaggacatgacggccaaggagaagctgctgctgtggtcgcagcgaatggtggaggggtaccagggcctgcgatgcgacaacttcacctccagctggagagacggccgcctcttcaatgccatcatccaccggcacaagcccctgctcatcgacatgaacaaggtgtaccggcagaccaacctggagaacctggaccaggccttctctgtggcggagcgggacctgggagtgacgcggctcctggaccctgaggacgtggatgtccctcagcccgacgagaagtccatcatcacctacgtctcgtcgctgtatgacgccatgccccgcgtgccggacgtgcaggatggggtgagggccaacgagctgcagctgcgctggcaggagtaccgggagctggtgctgctgctgcttcagtggatgcgacaccacacggccgcctttgaggaacgcaggttcccctccagcttcgaggagattgagatcctgtggtctcagttcctgaagtttaaggagatggagctaccagccaaggaggccgacaagaacaggtccaagggcatctaccaatccctggagggagcggtgcaagcaggccagctcaaggtgccccctggctaccacccgctggatgtggagaaggagtggggcaagctgcacgtggccatcctggagcgggagaagcagctccgcagcgagtttgagaggctggagtgtcttcagcgcatcgtgaccaagctgcagatggaggcggggctgtgtgaggagcagctgaaccaggccgacgccctgctgcagtcggatgtccggctgctggctgcaggcaaagtgccacagcgggcgggggaggtggaacgggacttggacaaggcggatagcatgatccggctgctcttcaacgacgtgcagaccctcaaggatggacggcacccgcagggcgagcagatgtaccgcagggtgtaccgtctgcacgagcgcctggtagccatccgcaccgagtacaacctacggctgaaggcaggcgtggcggcccctgcaacccaggtggcccaggtgactctgcagagtgtgcagaggcgccccgagctggaggactccactctgcgctacctgcaggacctgctggcctgggtggaggagaaccagcaccgtgtggatggcgctgagtggggtgtggacctgcccagcgtggaggcgcagctgggcagccaccgaggcctgcaccagtccatcgaagaattccgggccaagatcgagcgggcacggagtgacgagggccagctctcccccgccacccggggtgcctaccgtgactgcctgggtcggctggacctgcagtacgccaagctgctgaactcctccaaggcccgcctcaggtccctggagagcttgcacagctttgtggcagccgccactaaggagctaatgtggctgaatgagaaggaggaggaggaggtgggcttcgactggagcgaccgcaacaccaacatgaccgccaagaaggagagctactcggcgctgatgcgggagctggagctgaaggagaagaagatcaaggagctccaaaatgctggggaccggctgctgcgggaggaccacccggcccggcccacggtggagtccttccaggcggccctgcagacgcagtggagctggatgctacagctgtgctgctgtatcgaggcacacctgaaggagaacgctgcctactttcagttcttctcagatgtgcgggaggccgaggggcagttgcagaagctgcaggaggcactgcgtaggaaatacagttgtgatcgctccgccaccgtcacccggctggaggacctgctgcaggatgcccaggacgagaaggaacagctgaacgagtacaagggccacctctcaggcctggccaagcgggccaaggccgtcgtgcagctgaagccccgccacccagcccaccccatgcggggccgcctgcccctgctggccgtgtgcgactataagcaggtggaggtgactgtgcacaagggtgacgagtgccagctggtgggccctgcacagccgtcccactggaaggtgctcagcagctccggcagcgaggccgccgtgccctccgtgtgcttcctggtgcccccgcccaaccaggaggcccaggaggccgtcaccaggctggaggcccagcaccaggccctggtcacgctgtggcaccagttgcacgtggacatgaagagccttctggcctggcagagccttcgccgcgacgtgcagctcatccgctcctggtccctggccacgttccgcaccctgaagccagaggagcagcgccaagccctgcacagcctggagctgcactaccaggccttcctgcgggacagccaggacgcgggcggcttcggacccgaggaccggctgatggctgagcgcgagtacggctcctgcagccaccactaccagcagctgctgcagagcctggaacagggtgcacaggaagagtctcgctgccagcgctgcatctccgagctcaaagacatccggctgcagctggaggcctgtgagacgcgcaccgtgcaccgcctgcggctgccgctggacaaagagccggcacgggagtgtgcccagcgcatcgccgagcagcagaaggcacaggcagaggtggaggggctgggcaagggggtcgcccggctctctgccgaggccgagaaggtcttggccctaccagagccatcgcctgcggcccccacgctgcgctcggagctggagctgacgctgggcaagctggagcaggtccgcagcctgtctgccatctacctggagaagctcaagaccatcagcctggtgatccgcggcacgcagggggccgaggaggtgctcagggcccacgaggagcagctcaaggaggcccaggccgtgccggccaccctcccggagctcgaggccaccaaggcctctctgaagaagctgcgggcccaggccgaggcacagcagcccacgttcgacgccctgcgggatgagctgcggggggcacaggaggtgggggagcgactgcagcagcggcacggggagcgggacgtggaggtggagcgctggcgggagcgggtcgcccagttgcttgagcgctggcaggctgtgctggcccagaccgacgtgcggcagcgcgagctcgagcaactgggccgccagctgcgttactaccgcgagagtgcagaccccttgggcgcctggctgcaggacgccaggcggcggcaggagcagatccaggccatgccgctggccgacagccaggctgtgcgggagcagctgcggcaggagcaggccctgctggaggagatcgagcgccacggcgagaaggtcgaggagtgccagaggtttgcgaaacagtacatcaacgccatcaaggactatgaactccagctggtgacgtacaaggcgcagcttgagccggtggcctccccggccaagaagcccaaggtccagtcgggatcagagagtgtcatccaggagtacgtggacctgcgtacgcactacagcgagctgaccacactgacgagccagtacatcaagttcatcagcgagactctgcggcgcatggaggaggaggagaggctggctgagcagcagcgggcagaggagcgcgagcggctggccgaggtggaggccgcgctggagaagcagcggcagctggccgaggcgcacgcccaggcaaaggcacaggcggagcgggaggcgaaggagctgcagcagcgcatgcaggaggaggtggtgcggcgggaggaggcggcggtggacgcgcagcagcagaagcgcagcattcaggaggagctgcagcagctgcggcagagctcggaggcggagatccaggccaaggcccggcaggcagaggcggctgagcgcagccggctgcgcatcgaggaggagatccgcgtggtgcgcctgcagttggaggccaccgagcgccagcgtggcggggctgagggggagctgcaggcactgcgtgcacgggcggaggaggctgaggcacaaaagcgacaggcgcaggaggaggccgagcgcttgcggaggcaggtgcaggacgagagccagcgtaagcggcaggcggaggtggagctggcctcgcgcgtgaaggccgaggccgaggcggcgcgcgagaagcagcgggccctgcaggccctggaggagctgcggctgcaggcggaggaggcggagcggcgcctgcggcaggccgaggtggagcgagcgcggcaggtacaggtggccctggagacggcgcagcgcagtgcagaggcggagctgcagagcaaacgcgcctccttcgccgagaagacggcacagctggagcgctccctgcaggaggaacacgtggctgtggcacagctgcgggaggaggctgagcggcgggcacagcagcaggccgaggccgagcgggcgcgcgaggaggcagagcgggagctggagcgctggcagctcaaggccaacgaggcgctacggctgcggctgcaggcggaggaggtggcgcagcagaagagcctggcgcaggccgaggctgagaagcagaaggaggaggcggagcgcgaggcgcggcggcgcggcaaggcggaggagcaggccgtccggcagcgggagctggctgaacaagagctggagaagcagcggcagctggcggaaggcaccgcgcagcagcgcctggccgcggagcaggagttgatccggctgcgggccgagacggagcagggggagcagcagcggcagctgctggaggaggagctggcccggctgcagcgtgaggcggctgcagccacgcagaaacggcaggagctggaagccgagctggccaaggtgcgggccgagatggaggtgctgctggccagcaaggcgagggctgaggaggagtcgcgctccaccagcgagaagtccaagcagaggctggaggccgaggccggccggttccgcgagctggccgaggaggccgcccgcctgcgtgccctggcggaagaggccaagcggcagcggcagctggccgaggaagacgcggcgcggcagcgggccgaggcggagcgggtgcttgcggagaagctggccgccatcggcgaggccacgcggctcaagacggaggcggagatcgcgctcaaggagaaggaggcggagaacgagcgcctgcggcggctggcggaggacgaggccttccagcggcggcggctggaggagcaggccgcgcaacacaaggctgacatcgaggagcgcctggcccagctgcgcaaggcatcggacagcgagctggagcggcagaaggggctggtggaggacacgctgaggcagcggcggcaggtggaggaggagatcctggcgctgaaggcgagcttcgagaaggcggccgctggcaaggcggagctggagctggagctgggacgcatccgcagcaacgcggaggacacgctgcgcagcaaggagcaggccgagctggaggctgcgaggcagcggcagctggcggcggaggaggagcggcggcgccgtgaggctgaggagcgcgtgcagaagagcctggcggccgaggaggaggccgcacggcagcggaaggcggcgctggaggaagtcgagcggctgaaagccaaggtggaggaggcgcggcgcctgcgggagcgagcggagcaggagtcggcgcggcagctgcagctggcccaggaggccgcccagaagcggctgcaggcggaagagaaggcacacgccttcgcggtgcagcagaaggagcaggagctacagcagacgctgcagcaggagcagagcgtgctggaccagctgcgcggcgaggcggaggcggcccggcgggcggctgaggaggcggaggaggcccgggtgcaggcggagcgtgaggcggcgcagtcccggcggcaggtggaagaggccgagcggctgaagcagtcggcagaggagcaggcacaggcccgggctcaggcacaggcggctgcagagaagctgcgcaaggaggccgagcaagaggcggcgcggcgggcacaggcggagcaggcggccctgcggcagaagcaggcagctgacgcggagatggagaagcataagaaattcgccgagcagacgctgcggcagaaggcgcaggtggagcaggagctgacaacactgcggctgcagctggaggagaccgaccaccagaagaacctgctggacgaggagctgcagcggctgaaggcggaggccacggaggccgcacgccagcgcagccaggtggaggaggagctcttctcggtgcgcgtgcagatggaggagctgagcaagctcaaggcacgcatcgaggctgagaaccgcgcactcatcttgcgtgacaaggacaatacgcagcgcttcctgcaggaggaggctgagaagatgaagcaggtggcggaggaggccgcgcggctgagtgtggcggcccaagaggctgcgcgactgcggcagctggcagaggaggacctggcacagcagcgggccttggcagagaagatgctcaaggagaagatgcaggcggtgcaggaggccacgcgactcaaggctgaggcggaactgctgcagcagcagaaggagcttgcgcaggagcaggcgcggcggctgcaggaggacaaggagcagatggcgcagcagctggcggaggagacgcagggcttccagcggacgctggaggccgagcggcagcggcagctggagatgagcgctgaggctgagcgcctcaagctgcgtgtggccgagatgagccgagcccaggcccgcgctgaggaggacgcccagcgcttccggaagcaggcggaggagatcggtgagaagctgcaccgcacggagctcgccacccaggagaaggtgaccctggtgcagacactggagatccagcgacagcagagtgaccatgatgccgagcgcctgcgggaggccatcgctgagctggagcgtgagaaggagaagctccaacaggaggccaaactgctgcagctcaagtctgaggagatgcagacggtgcagcaggagcagctgctgcaggagacgcaggccctgcagcaaagcttcctctctgaaaaggacagcctgctacagcgggagcgcttcatcgagcaggagaaggccaagctggagcagctcttccaggacgaggtggccaaggcacagcagctgcgtgaggagcagcagcggcagcagcagcagatggagcaggaacggcagcggctggtggccagcatggaggaggcgcggcggcggcagcatgaggccgaggagggcgtgcggcgcaagcaggaggagctgcagcagctggagcagcagcggcggcagcaggaggagctgctggctgaggagaaccagaggctgcgtgagcagctgcagctcctggaggagcagcaccgggccgcgctggcgcactcagaggaggtcactgcctcgcaggtggctgccacaaagaccctgcccaatggccgggatgcacttgatggccccgcggcagaggcagagccggagcacagcttcgatggcctgcggcggaaggtgtcagctcagaggctgcaggaggccggcatcctgagtgcggaggagctgcagcggttggcgcagggccacaccacggtggacgagctcgcacggcgggaagacgtgcgccactacctgcagggccgcagcagtatcgcagggctgttgctgaaggccaccaatgagaagctgagtgtttacgccgccctgcagaggcagctgctgagtcccggcacggccctcatcctgctggaggcgcaggcggcctcaggcttcctgctggaccctgtgcggaaccggcggctgaccgtcaacgaggctgtgaaggagggtgtggtgggccccgagctgcaccacaagctgctgtcggccgagcgcgccgtcactggctacaaggacccctacactggccagcagatctctctcttccaagccatgcagaagggcctcatcgtccgggagcacggcatccgcctgctggaggcccagatcgccacgggcggcgttatcgaccccgtgcacagccaccgcgtgcccgtggacgtggcctaccggcgcggctacttcgacgaggagatgaaccgcgtcctggcggaccccagcgacgacaccaagggcttctttgaccccaacacgcacgagaacctcacgtacctgcagctactggagcgctgcgtggaggaccccgagacgggcctgtgccttctgccactcacggataaggctgccaagggcggggagctggtctacactgactccgaggcccgggacgtctttgagaaggccaccgtgtctgcgccgttcggcaagttccagggcaagacggtgaccatttgggagatcatcaactcggaatacttcacggcagagcagcggcgggacctgctgcggcagttccgcacgggccggatcacagtggagaagatcatcaagatcatcatcacggtggtggaggagcaggagcagaagggccggctttgctttgagggcctgcgcagcctggtgccagccgccgagctgctggagagcagggtcatcgaccgcgagctctaccagcagctgcagcgaggtgagcgctctgtgcgagacgtagccgaggtggacactgtgcggcgggctctccggggtgccaacgtcatcgcgggtgtatggctggaggaggcggggcagaagctgagtatctacaatgccctgaagaaagacctgctgccatccgacatggccgtggccctgttggaagcccaggccggcaccgggcacatcatcgaccccgccaccagcgcccggctgaccgtggacgaggcagtgcgtgctggcctggtgggccccgagtttcatgagaagctgctatcagccgagaaggctgtgacagggtacagggacccctacacagggcagagcgtctccctgttccaggccctgaagaagggcctcattccccgggagcagggcctgcgcctgttggacgcccagctgtccacgggcggcatcgtggaccccagcaagagccaccgcgtgcccctggatgtcgcctgcgcccgaggctgcctggatgaggagaccagcagggccctgtcggcaccaagggccgacgccaaggcctacagtgaccccagcacaggggagccggccacctacggcgagctccagcagcggtgccggcccgaccagctgaccgggctgagcctgctgccgctctcagaaaaggctgctcgggcccggcaggaggagctctactcagagctgcaggcccgtgagacctttgaaaagaccccggttgaggtccccgtgggtggcttcaagggcaggacggtgacggtgtgggagctcatcagctctgagtacttcactgcggagcagcggcaggagctgttgcgtcagttccgcacgggcaaggtcaccgtggagaaggtcatcaagattctcattaccatcgtggaggaggtggagaccctgcggcaggagaggctgtccttcagcggcctccgtgcccctgtgccagccagcgagctcctggcttccggggtcctcagcagagcccagtttgagcagctcaaggacggcaagacgacggtcaaggacctttcggagctgggctccgtgcggacgctgctgcagggcagtggctgcctcgccggcatctacctggaggacaccaaggagaaggtgtccatctacgaggccatgcgccggggcctgctgagagccacaacggctgcgctcctgctggaggcgcaggcggccactggcttcctggtggaccccgtgcggaaccagcgcctgtatgtccacgaggccgtgaaggcgggcgtggtgggccccgagcttcacgagcagctgctgtctgccgagaaggccgtcaccggctacagagacccctactcgggcagcaccatctccctcttccaggccatgcagaagggcctggttctccggcagcacggcatccgcctgctggaggcccagatcgccacgggcggcatcatcgaccccgtgcacagccaccgcgtgcctgtggacgtggcctaccagcgcggctacttcagtgaggagatgaaccgcgtcctggcggaccccagcgacgacaccaagggcttctttgaccccaacacgcatgagaacctcacgtacaggcagctgctggagcggtgcgtggaggaccccgagacgggcttgcgccttctgccactgaaaggggcggagaaggctgaggtggtggagaccacgcaggtgtacactgaggaggagacaagaagggcatttgaagagacacagatcgacattcccggcggcggcagccacggcggctccaccatgtccctgtgggaggtgatgcagtcggacctgatccccgaggagcagcgggcccagctgatggctgacttccaggccggccgggtgaccaaggaacgcatgatcatcatcatcatcgagatcattgagaagacagagatcatccgccagcagggtctggcctcctacgactacgtgcgccgccgcctcacggctgaggacctgttcgaggctcggatcatctctctcgagacctacaacctgctccgggagggcaccaggagcctccgtgaggctctcgaggcggagtccgcctggtgctacctctatggcacgggctccgtggctggtgtctacctgcccggttccaggcagacactgagcatctaccaggctctcaagaaagggctgctgagtgccgaggtggcccgcctgctgctggaggcacaggcagccacaggcttcctgctggacccggtgaagggggagcggctgactgtggatgaggctgtgcggaagggcctcgtggggcccgagctgcacgaccgcctgctctcggctgagcgggcggtcaccggctaccgtgacccctacaccgagcagaccatctcgctcttccaggccatgaagaaggagctgatccctactgaggaggccctgcggctgctggatgcccagctggccaccggcggcatcgtggacccccgcctgggcttccaccttcccctggaggtggcttaccagcgtggctacctcaacaaggacacgcacgaccagctgtcagagcccagcgaggtgcgcagctacgtggacccgtccaccgacgagcgcctcagctacacgcagctgctcaggcggtgccgtcgtgacgacggcaccggccagctgctcctgccactgtcggacgcccgcaagctgaccttccgtggcctgcggaagcagatcaccatggaggagctggtgcgctcgcaggtcatggacgaggccacggcgctgcagctgcgggagggcctgacctccatcgaggaggtcaccaagaacttgcagaagttcctggaaggcaccagctgcatcgctggtgtcttcgtggacgccaccaaggaacggctctcggtgtaccaggccatgaagaagggcatcatccgccccggcacagcctttgagctcctggaggcgcaggcggccaccggttacgtcatcgaccccatcaagggactgaagctgacggtggaggaggctgtgcgtatgggcattgtgggccccgagttcaaggacaagctgctgtcggccgagcgcgccgtcactgggtacaaggacccctactctgggaagctcatctccctcttccaggccatgaagaagggcctgatcctgaaggaccatggcatccgcctgctggaggcccagatcgccacgggcggcatcatcgaccctgaggagagccaccggctgcccgtggaggtggcctacaagcgcggcctcttcgatgaggagatgaacgagatcctgaccgacccctcggacgacaccaagggcttctttgaccctaacacggaggagaacctcacctacctgcagctgatggagcgttgtatcactgacccccagacgggcctgtgtctcttgccgctgaaggagaagaagcgggagcggaagacgtcctccaagtcctccgtgcgcaagcgccgagtggtcatcgtggaccccgagacgggcaaggagatgtcagtgtacgaggcctaccgcaagggcctgattgaccaccagacgtacctggagctgtccgagcaggagtgcgagtgggaggagatcaccatctcctcctcggacggcgtggtcaagtccatgatcatcgaccgccgctccgggcgccagtacgacatcgatgatgccatcgccaagaacctcatcgaccgctcggcactggaccagtaccgcgccggcacgctctccatcaccgagttcgccgacatgctctcgggcaacgccggtggtttccgctcccgttcctcctcggtgggatcctcctcctcctaccccatcagccccgccgtctccaggacccagctggcctcctggtcagaccccactgaggagacgggccccgtggctggcatcctggacacggagacgctggagaaggtgtccatcaccgaggccatgcaccggaacctggtggataacatcacggggcagcggctgctggaggcgcaggcctgcaccgggggcatcatcgaccccagcaccggtgagcgcttccctgtcaccgacgccgtcaacaagggcctggtggacaagatcatggtggaccgcatcaacctggcccagaaggccttctgcggcttcgaggacccacgcaccaagaccaagatgtcggccgcccaggccctgaagaagggctggctctactacgaggccggccagcgcttcctggaggtgcagtacctgaccggcggcttgatcgagcccgacacgccgggccgcgtgcccctggacgaggccctgcagcgcggcacggtggacgcccgcaccgcacagaagctgcgtgacgtgggcgcctactccaagtacctcacctgccctaagaccaagctcaagatctcctataaggacgcgctggaccgcagcatggtggaggagggcacggggctgcggctgctggaggctgccgcgcagtccaccaagggctactacagcccctacagcgtcagcggctccggctctaccgctggctcccgcaccggctcgcgcaccggctcccgggccggctcccgccgcggcagctttgacgccaccggctccggcttctccatgaccttctcttcatcctcctactcctcctcgggctacggccgccgctacgcctcggggtcctcggcctccctggggggccctgagtctgccgtggcctgaggctgcctgcgcccaccccgctctgcatgcggcccagcccggctcccaccgaggcgcgggggccgttttcaacgcttaaaggtgtcttcctcccaagtggtgcctaaagtttaaccaaaaagaccagactaatatattaatatatatctgctgtccagacagcctgtatcttgggggacagggctggcccagccctgctggccgcctcaccccctcgggtctcctcactcccttctacctgccactcacacagccaggtgccttggagggtcccaagctgggccccagcccaccctcctgtcttcccagggtagcccgcctgccagtcctagctgcacagggcagctgggcccaaccctgtctgtagagggccctggtgtttctagcactggcctgcacggtgggccttgctggggacggggggccccagtcagcctctctcccagtctacccagagaagccccttccccatgggaagacgaggccctcgggcccagcccccacagtgctgtctgatctgtgctttccagctcaccccccacactcactcctgagacccctggcctccggcgtcagcctccagcctctgttcccctagtaagtgccttccatgtcggcctctaaccccaggccccgaggacccagacccagtggggaggcggacgttccagccggcatggctgggaactgcagacctgtcctcctggtgggtccaggggcccctccagcttgtggagccccacactggggtgccgcctgcccgtctctctcccatggagccccagccccctttgggcccagggacaccagccaggctctgtgctgaccctcctgttgcacccagccctggtctcagcagcgaccacccctgcctccaccctctgagctttgcatgttccactaaccccgggcgggtggcaggtggaggtgtcaggctgctggcgcctctgcaagggcagaacactaacctgaccgtgggcggggccttgcggtatccgcccccaataaaagcaattccaacctt

SEQ ID NO: 22771 - DNA, 14787 bp, Homo sapiens
  source 1..14787: mol_type = unassigned DNA
ggcggcagagctgaagtgagcggagccaccaggaggccatgtcgggtgaggacgctgaggtccgggcagtctctgaagatgtctccaatggaagcagtggctcgcccagccctggggacacactgccctggaaccttgggaaaacgcagcggagccggcgcagcgggggtggcgctgggagcaacgggagtgtcctggacccagctgagcgggcggtcattcgcatcgcagatgagcgggatcgtgtgcagaagaaaaccttcaccaagtgggtcaacaagcacctcatcaaggcccagaggcacatcagtgacctgtatgaagacctccgcgatggccacaacctcatctccctgctggaggtcctctcgggggacagcctgccccgggagaaggggaggatgcgtttccacaagctgcagaatgtccagattgccctggactacctccggcaccgccaggtgaagctggtgaacatcaggaatgatgacatcgctgacggcaaccccaagctgacccttggcctcatctggacaatcattctgcacttccagatctcagatatccaggtgagtgggcagtcggaggacatgacggccaaggagaagctgctgctgtggtcgcagcgaatggtggaggggtaccagggcctgcgatgcgacaacttcacctccagctggagagacggccgcctcttcaatgccatcatccaccggcacaagcccctgctcatcgacatgaacaaggtgtaccggcagaccaacctggagaacctggaccaggccttctctgtggcggagcgggacctgggagtgacgcggctcctggaccctgaggacgtggatgtccctcagcccgacgagaagtccatcatcacctacgtctcgtcgctgtatgacgccatgccccgcgtgccggacgtgcaggatggggtgagggccaacgagctgcagctgcgctggcaggagtaccgggagctggtgctgctgctgcttcagtggatgcgacaccacacggccgcctttgaggaacgcaggttcccctccagcttcgaggagattgagatcctgtggtctcagttcctgaagtttaaggagatggagctaccagccaaggaggccgacaagaacaggtccaagggcatctaccaatccctggagggagcggtgcaagcaggccagctcaaggtgccccctggctaccacccgctggatgtggagaaggagtggggcaagctgcacgtggccatcctggagcgggagaagcagctccgcagcgagtttgagaggctggagtgtcttcagcgcatcgtgaccaagctgcagatggaggcggggctgtgtgaggagcagctgaaccaggccgacgccctgctgcagtcggatgtccggctgctggctgcaggcaaagtgccacagcgggcgggggaggtggaacgggacttggacaaggcggatagcatgatccggctgctcttcaacgacgtgcagaccctcaaggatggacggcacccgcagggcgagcagatgtaccgcagggtgtaccgtctgcacgagcgcctggtagccatccgcaccgagtacaacctacggctgaaggcaggcgtggcggcccctgcaacccaggtggcccaggtgactctgcagagtgtgcagaggcgccccgagctggaggactccactctgcgctacctgcaggacctgctggcctgggtggaggagaaccagcaccgtgtggatggcgctgagtggggtgtggacctgcccagcgtggaggcgcagctgggcagccaccgaggcctgcaccagtccatcgaagaattccgggccaagatcgagcgggcacggagtgacgagggccagctctcccccgccacccggggtgcctaccgtgactgcctgggtcggctggacctgcagtacgccaagctgctgaactcctccaaggcccgcctcaggtccctggagagcttgcacagctttgtggcagccgccactaaggagctaatgtggctgaatgagaaggaggaggaggaggtgggcttcgactggagcgaccgcaacaccaacatgaccgccaagaaggagagctactcggcgctgatgcgggagctggagctgaaggagaagaagatcaaggagctccaaaatgctggggaccggctgctgcgggaggaccacccggcccggcccacggtggagtccttccaggcggccctgcagacgcagtggagctggatgctacagctgtgctgctgtatcgaggcacacctgaaggagaacgctgcctactttcagttcttctcagatgtgcgggaggccgaggggcagttgcagaagctgcaggaggcactgcgtaggaaatacagttgtgatcgctccgccaccgtcacccggctggaggacctgctgcaggatgcccaggacgagaaggaacagctgaacgagtacaagggccacctctcaggcctggccaagcgggccaaggccgtcgtgcagctgaagccccgccacccagcccaccccatgcggggccgcctgcccctgctggccgtgtgcgactataagcaggtggaggtgactgtgcacaagggtgacgagtgccagctggtgggccctgcacagccgtcccactggaaggtgctcagcagctccggcagcgaggccgccgtgccctccgtgtgcttcctggtgcccccgcccaaccaggaggcccaggaggccgtcaccaggctggaggcccagcaccaggccctggtcacgctgtggcaccagttgcacgtggacatgaagagccttctggcctggcagagccttcgccgcgacgtgcagctcatccgctcctggtccctggccacgttccgcaccctgaagccagaggagcagcgccaagccctgcacagcctggagctgcactaccaggccttcctgcgggacagccaggacgcgggcggcttcggacccgaggaccggctgatggctgagcgcgagtacggctcctgcagccaccactaccagcagctgctgcagagcctggaacagggtgcacaggaagagtctcgctgccagcgctgcatctccgagctcaaagacatccggctgcagctggaggcctgtgagacgcgcaccgtgcaccgcctgcggctgccgctggacaaagagccggcacgggagtgtgcccagcgcatcgccgagcagcagaaggcacaggcagaggtggaggggctgggcaagggggtcgcccggctctctgccgaggccgagaaggtcttggccctaccagagccatcgcctgcggcccccacgctgcgctcggagctggagctgacgctgggcaagctggagcaggtccgcagcctgtctgccatctacctggagaagctcaagaccatcagcctggtgatccgcggcacgcagggggccgaggaggtgctcagggcccacgaggagcagctcaaggaggcccaggccgtgccggccaccctcccggagctcgaggccaccaaggcctctctgaagaagctgcgggcccaggccgaggcacagcagcccacgttcgacgccctgcgggatgagctgcggggggcacaggaggtgggggagcgactgcagcagcggcacggggagcgggacgtggaggtggagcgctggcgggagcgggtcgcccagttgcttgagcgctggcaggctgtgctggcccagaccgacgtgcggcagcgcgagctcgagcaactgggccgccagctgcgttactaccgcgagagtgcagaccccttgggcgcctggctgcaggacgccaggcggcggcaggagcagatccaggccatgccgctggccgacagccaggctgtgcgggagcagctgcggcaggagcaggccctgctggaggagatcgagcgccacggcgagaaggtcgaggagtgccagaggtttgcgaaacagtacatcaacgccatcaaggactatgaactccagctggtgacgtacaaggcgcagcttgagccggtggcctccccggccaagaagcccaaggtccagtcgggatcagagagtgtcatccaggagtacgtggacctgcgtacgcactacagcgagctgaccacactgacgagccagtacatcaagttcatcagcgagactctgcggcgcatggaggaggaggagaggctggctgagcagcagcgggcagaggagcgcgagcggctggccgaggtggaggccgcgctggagaagcagcggcagctggccgaggcgcacgcccaggcaaaggcacaggcggagcgggaggcgaaggagctgcagcagcgcatgcaggaggaggtggtgcggcgggaggaggcggcggtggacgcgcagcagcagaagcgcagcattcaggaggagctgcagcagctgcggcagagctcggaggcggagatccaggccaaggcccggcaggcagaggcggctgagcgcagccggctgcgcatcgaggaggagatccgcgtggtgcgcctgcagttggaggccaccgagcgccagcgtggcggggctgagggggagctgcaggcactgcgtgcacgggcggaggaggctgaggcacaaaagcgacaggcgcaggaggaggccgagcgcttgcggaggcaggtgcaggacgagagccagcgtaagcggcaggcggaggtggagctggcctcgcgcgtgaaggccgaggccgaggcggcgcgcgagaagcagcgggccctgcaggccctggaggagctgcggctgcaggcggaggaggcggagcggcgcctgcggcaggccgaggtggagcgagcgcggcaggtacaggtggccctggagacggcgcagcgcagtgcagaggcggagctgcagagcaaacgcgcctccttcgccgagaagacggcacagctggagcgctccctgcaggaggaacacgtggctgtggcacagctgcgggaggaggctgagcggcgggcacagcagcaggccgaggccgagcgggcgcgcgaggaggcagagcgggagctggagcgctggcagctcaaggccaacgaggcgctacggctgcggctgcaggcggaggaggtggcgcagcagaagagcctggcgcaggccgaggctgagaagcagaaggaggaggcggagcgcgaggcgcggcggcgcggcaaggcggaggagcaggccgtccggcagcgggagctggctgaacaagagctggagaagcagcggcagctggcggaaggcaccgcgcagcagcgcctggccgcggagcaggagttgatccggctgcgggccgagacggagcagggggagcagcagcggcagctgctggaggaggagctggcccggctgcagcgtgaggcggctgcagccacgcagaaacggcaggagctggaagccgagctggccaaggtgcgggccgagatggaggtgctgctggccagcaaggcgagggctgaggaggagtcgcgctccaccagcgagaagtccaagcagaggctggaggccgaggccggccggttccgcgagctggccgaggaggccgcccgcctgcgtgccctggcggaagaggccaagcggcagcggcagctggccgaggaagacgcggcgcggcagcgggccgaggcggagcgggtgcttgcggagaagctggccgccatcggcgaggccacgcggctcaagacggaggcggagatcgcgctcaaggagaaggaggcggagaacgagcgcctgcggcggctggcggaggacgaggccttccagcggcggcggctggaggagcaggccgcgcaacacaaggctgacatcgaggagcgcctggcccagctgcgcaaggcatcggacagcgagctggagcggcagaaggggctggtggaggacacgctgaggcagcggcggcaggtggaggaggagatcctggcgctgaaggcgagcttcgagaaggcggccgctggcaaggcggagctggagctggagctgggacgcatccgcagcaacgcggaggacacgctgcgcagcaaggagcaggccgagctggaggctgcgaggcagcggcagctggcggcggaggaggagcggcggcgccgtgaggctgaggagcgcgtgcagaagagcctggcggccgaggaggaggccgcacggcagcggaaggcggcgctggaggaagtcgagcggctgaaagccaaggtggaggaggcgcggcgcctgcgggagcgagcggagcaggagtcggcgcggcagctgcagctggcccaggaggccgcccagaagcggctgcaggcggaagagaaggcacacgccttcgcggtgcagcagaaggagcaggagctacagcagacgctgcagcaggagcagagcgtgctggaccagctgcgcggcgaggcggaggcggcccggcgggcggctgaggaggcggaggaggcccgggtgcaggcggagcgtgaggcggcgcagtcccggcggcaggtggaagaggccgagcggctgaagcagtcggcagaggagcaggcacaggcccgggctcaggcacaggcggctgcagagaagctgcgcaaggaggccgagcaagaggcggcgcggcgggcacaggcggagcaggcggccctgcggcagaagcaggcagctgacgcggagatggagaagcataagaaattcgccgagcagacgctgcggcagaaggcgcaggtggagcaggagctgacaacactgcggctgcagctggaggagaccgaccaccagaagaacctgctggacgaggagctgcagcggctgaaggcggaggccacggaggccgcacgccagcgcagccaggtggaggaggagctcttctcggtgcgcgtgcagatggaggagctgagcaagctcaaggcacgcatcgaggctgagaaccgcgcactcatcttgcgtgacaaggacaatacgcagcgcttcctgcaggaggaggctgagaagatgaagcaggtggcggaggaggccgcgcggctgagtgtggcggcccaagaggctgcgcgactgcggcagctggcagaggaggacctggcacagcagcgggccttggcagagaagatgctcaaggagaagatgcaggcggtgcaggaggccacgcgactcaaggctgaggcggaactgctgcagcagcagaaggagcttgcgcaggagcaggcgcggcggctgcaggaggacaaggagcagatggcgcagcagctggcggaggagacgcagggcttccagcggacgctggaggccgagcggcagcggcagctggagatgagcgctgaggctgagcgcctcaagctgcgtgtggccgagatgagccgagcccaggcccgcgctgaggaggacgcccagcgcttccggaagcaggcggaggagatcggtgagaagctgcaccgcacggagctcgccacccaggagaaggtgaccctggtgcagacactggagatccagcgacagcagagtgaccatgatgccgagcgcctgcgggaggccatcgctgagctggagcgtgagaaggagaagctccaacaggaggccaaactgctgcagctcaagtctgaggagatgcagacggtgcagcaggagcagctgctgcaggagacgcaggccctgcagcaaagcttcctctctgaaaaggacagcctgctacagcgggagcgcttcatcgagcaggagaaggccaagctggagcagctcttccaggacgaggtggccaaggcacagcagctgcgtgaggagcagcagcggcagcagcagcagatggagcaggaacggcagcggctggtggccagcatggaggaggcgcggcggcggcagcatgaggccgaggagggcgtgcggcgcaagcaggaggagctgcagcagctggagcagcagcggcggcagcaggaggagctgctggctgaggagaaccagaggctgcgtgagcagctgcagctcctggaggagcagcaccgggccgcgctggcgcactcagaggaggtcactgcctcgcaggtggctgccacaaagaccctgcccaatggccgggatgcacttgatggccccgcggcagaggcagagccggagcacagcttcgatggcctgcggcggaaggtgtcagctcagaggctgcaggaggccggcatcctgagtgcggaggagctgcagcggttggcgcagggccacaccacggtggacgagctcgcacggcgggaagacgtgcgccactacctgcagggccgcagcagtatcgcagggctgttgctgaaggccaccaatgagaagctgagtgtttacgccgccctgcagaggcagctgctgagtcccggcacggccctcatcctgctggaggcgcaggcggcctcaggcttcctgctggaccctgtgcggaaccggcggctgaccgtcaacgaggctgtgaaggagggtgtggtgggccccgagctgcaccacaagctgctgtcggccgagcgcgccgtcactggctacaaggacccctacactggccagcagatctctctcttccaagccatgcagaagggcctcatcgtccgggagcacggcatccgcctgctggaggcccagatcgccacgggcggcgttatcgaccccgtgcacagccaccgcgtgcccgtggacgtggcctaccggcgcggctacttcgacgaggagatgaaccgcgtcctggcggaccccagcgacgacaccaagggcttctttgaccccaacacgcacgagaacctcacgtacctgcagctactggagcgctgcgtggaggaccccgagacgggcctgtgccttctgccactcacggataaggctgccaagggcggggagctggtctacactgactccgaggcccgggacgtctttgagaaggccaccgtgtctgcgccgttcggcaagttccagggcaagacggtgaccatttgggagatcatcaactcggaatacttcacggcagagcagcggcgggacctgctgcggcagttccgcacgggccggatcacagtggagaagatcatcaagatcatcatcacggtggtggaggagcaggagcagaagggccggctttgctttgagggcctgcgcagcctggtgccagccgccgagctgctggagagcagggtcatcgaccgcgagctctaccagcagctgcagcgaggtgagcgctctgtgcgagacgtagccgaggtggacactgtgcggcgggctctccggggtgccaacgtcatcgcgggtgtatggctggaggaggcggggcagaagctgagtatctacaatgccctgaagaaagacctgctgccatccgacatggccgtggccctgttggaagcccaggccggcaccgggcacatcatcgaccccgccaccagcgcccggctgaccgtggacgaggcagtgcgtgctggcctggtgggccccgagtttcatgagaagctgctatcagccgagaaggctgtgacagggtacagggacccctacacagggcagagcgtctccctgttccaggccctgaagaagggcctcattccccgggagcagggcctgcgcctgttggacgcccagctgtccacgggcggcatcgtggaccccagcaagagccaccgcgtgcccctggatgtcgcctgcgcccgaggctgcctggatgaggagaccagcagggccctgtcggcaccaagggccgacgccaaggcctacagtgaccccagcacaggggagccggccacctacggcgagctccagcagcggtgccggcccgaccagctgaccgggctgagcctgctgccgctctcagaaaaggctgctcgggcccggcaggaggagctctactcagagctgcaggcccgtgagacctttgaaaagaccccggttgaggtccccgtgggtggcttcaagggcaggacggtgacggtgtgggagctcatcagctctgagtacttcactgcggagcagcggcaggagctgttgcgtcagttccgcacgggcaaggtcaccgtggagaaggtcatcaagattctcattaccatcgtggaggaggtggagaccctgcggcaggagaggctgtccttcagcggcctccgtgcccctgtgccagccagcgagctcctggcttccggggtcctcagcagagcccagtttgagcagctcaaggacggcaagacgacggtcaaggacctttcggagctgggctccgtgcggacgctgctgcagggcagtggctgcctcgccggcatctacctggaggacaccaaggagaaggtgtccatctacgaggccatgcgccggggcctgctgagagccacaacggctgcgctcctgctggaggcgcaggcggccactggcttcctggtggaccccgtgcggaaccagcgcctgtatgtccacgaggccgtgaaggcgggcgtggtgggccccgagcttcacgagcagctgctgtctgccgagaaggccgtcaccggctacagagacccctactcgggcagcaccatctccctcttccaggccatgcagaagggcctggttctccggcagcacggcatccgcctgctggaggcccagatcgccacgggcggcatcatcgaccccgtgcacagccaccgcgtgcctgtggacgtggcctaccagcgcggctacttcagtgaggagatgaaccgcgtcctggcggaccccagcgacgacaccaagggcttctttgaccccaacacgcatgagaacctcacgtacaggcagctgctggagcggtgcgtggaggaccccgagacgggcttgcgccttctgccactgaaaggggcggagaaggctgaggtggtggagaccacgcaggtgtacactgaggaggagacaagaagggcatttgaagagacacagatcgacattcccggcggcggcagccacggcggctccaccatgtccctgtgggaggtgatgcagtcggacctgatccccgaggagcagcgggcccagctgatggctgacttccaggccggccgggtgaccaaggaacgcatgatcatcatcatcatcgagatcattgagaagacagagatcatccgccagcagggtctggcctcctacgactacgtgcgccgccgcctcacggctgaggacctgttcgaggctcggatcatctctctcgagacctacaacctgctccgggagggcaccaggagcctccgtgaggctctcgaggcggagtccgcctggtgctacctctatggcacgggctccgtggctggtgtctacctgcccggttccaggcagacactgagcatctaccaggctctcaagaaagggctgctgagtgccgaggtggcccgcctgctgctggaggcacaggcagccacaggcttcctgctggacccggtgaagggggagcggctgactgtggatgaggctgtgcggaagggcctcgtggggcccgagctgcacgaccgcctgctctcggctgagcgggcggtcaccggctaccgtgacccctacaccgagcagaccatctcgctcttccaggccatgaagaaggagctgatccctactgaggaggccctgcggctgctggatgcccagctggccaccggcggcatcgtggacccccgcctgggcttccaccttcccctggaggtggcttaccagcgtggctacctcaacaaggacacgcacgaccagctgtcagagcccagcgaggtgcgcagctacgtggacccgtccaccgacgagcgcctcagctacacgcagctgctcaggcggtgccgtcgtgacgacggcaccggccagctgctcctgccactgtcggacgcccgcaagctgaccttccgtggcctgcggaagcagatcaccatggaggagctggtgcgctcgcaggtcatggacgaggccacggcgctgcagctgcgggagggcctgacctccatcgaggaggtcaccaagaacttgcagaagttcctggaaggcaccagctgcatcgctggtgtcttcgtggacgccaccaaggaacggctctcggtgtaccaggccatgaagaagggcatcatccgccccggcacagcctttgagctcctggaggcgcaggcggccaccggttacgtcatcgaccccatcaagggactgaagctgacggtggaggaggctgtgcgtatgggcattgtgggccccgagttcaaggacaagctgctgtcggccgagcgcgccgtcactgggtacaaggacccctactctgggaagctcatctccctcttccaggccatgaagaagggcctgatcctgaaggaccatggcatccgcctgctggaggcccagatcgccacgggcggcatcatcgaccctgaggagagccaccggctgcccgtggaggtggcctacaagcgcggcctcttcgatgaggagatgaacgagatcctgaccgacccctcggacgacaccaagggcttctttgaccctaacacggaggagaacctcacctacctgcagctgatggagcgttgtatcactgacccccagacgggcctgtgtctcttgccgctgaaggagaagaagcgggagcggaagacgtcctccaagtcctccgtgcgcaagcgccgagtggtcatcgtggaccccgagacgggcaaggagatgtcagtgtacgaggcctaccgcaagggcctgattgaccaccagacgtacctggagctgtccgagcaggagtgcgagtgggaggagatcaccatctcctcctcggacggcgtggtcaagtccatgatcatcgaccgccgctccgggcgccagtacgacatcgatgatgccatcgccaagaacctcatcgaccgctcggcactggaccagtaccgcgccggcacgctctccatcaccgagttcgccgacatgctctcgggcaacgccggtggtttccgctcccgttcctcctcggtgggatcctcctcctcctaccccatcagccccgccgtctccaggacccagctggcctcctggtcagaccccactgaggagacgggccccgtggctggcatcctggacacggagacgctggagaaggtgtccatcaccgaggccatgcaccggaacctggtggataacatcacggggcagcggctgctggaggcgcaggcctgcaccgggggcatcatcgaccccagcaccggtgagcgcttccctgtcaccgacgccgtcaacaagggcctggtggacaagatcatggtggaccgcatcaacctggcccagaaggccttctgcggcttcgaggacccacgcaccaagaccaagatgtcggccgcccaggccctgaagaagggctggctctactacgaggccggccagcgcttcctggaggtgcagtacctgaccggcggcttgatcgagcccgacacgccgggccgcgtgcccctggacgaggccctgcagcgcggcacggtggacgcccgcaccgcacagaagctgcgtgacgtgggcgcctactccaagtacctcacctgccctaagaccaagctcaagatctcctataaggacgcgctggaccgcagcatggtggaggagggcacggggctgcggctgctggaggctgccgcgcagtccaccaagggctactacagcccctacagcgtcagcggctccggctctaccgctggctcccgcaccggctcgcgcaccggctcccgggccggctcccgccgcggcagctttgacgccaccggctccggcttctccatgaccttctcttcatcctcctactcctcctcgggctacggccgccgctacgcctcggggtcctcggcctccctggggggccctgagtctgccgtggcctgaggctgcctgcgcccaccccgctctgcatgcggcccagcccggctcccaccgaggcgcgggggccgttttcaacgcttaaaggtgtcttcctcccaagtggtgcctaaagtttaaccaaaaagaccagactaatatattaatatatatctgctgtccagacagcctgtatcttgggggacagggctggcccagccctgctggccgcctcaccccctcgggtctcctcactcccttctacctgccactcacacagccaggtgccttggagggtcccaagctgggccccagcccaccctcctgtcttcccagggtagcccgcctgccagtcctagctgcacagggcagctgggcccaaccctgtctgtagagggccctggtgtttctagcactggcctgcacggtgggccttgctggggacggggggccccagtcagcctctctcccagtctacccagagaagccccttccccatgggaagacgaggccctcgggcccagcccccacagtgctgtctgatctgtgctttccagctcaccccccacactcactcctgagacccctggcctccggcgtcagcctccagcctctgttcccctagtaagtgccttccatgtcggcctctaaccccaggccccgaggacccagacccagtggggaggcggacgttccagccggcatggctgggaactgcagacctgtcctcctggtgggtccaggggcccctccagcttgtggagccccacactggggtgccgcctgcccgtctctctcccatggagccccagccccctttgggcccagggacaccagccaggctctgtgctgaccctcctgttgcacccagccctggtctcagcagcgaccacccctgcctccaccctctgagctttgcatgttccactaaccccgggcgggtggcaggtggaggtgtcaggctgctggcgcctctgcaagggcagaacactaacctgaccgtgggcggggccttgcggtatccgcccccaataaaagcaattccaacctt

SEQ ID NO: 22772 - DNA, 13713 bp, Homo sapiens
  source 1..13713: mol_type = unassigned DNA
atgtcgggtgaggacgctgaggtccgggcagtctctgaagatgtctccaatggaagcagtggctcgcccagccctggggacacactgccctggaaccttgggaaaacgcagcggagccggcgcagcgggggtggcgctgggagcaacgggagtgtcctggacccagctgagcgggcggtcattcgcatcgcagatgagcgggatcgtgtgcagaagaaaaccttcaccaagtgggtcaacaagcacctcatcaaggcccagaggcacatcagtgacctgtatgaagacctccgcgatggccacaacctcatctccctgctggaggtcctctcgggggacagcctgccccgggagaaggggaggatgcgtttccacaagctgcagaatgtccagattgccctggactacctccggcaccgccaggtgaagctggtgaacatcaggaatgatgacatcgctgacggcaaccccaagctgacccttggcctcatctggacaatcattctgcacttccagatctcagatatccaggtgagtgggcagtcggaggacatgacggccaaggagaagctgctgctgtggtcgcagcgaatggtggaggggtaccagggcctgcgatgcgacaacttcacctccagctggagagacggccgcctcttcaatgccatcatccaccggcacaagcccctgctcatcgacatgaacaaggtgtaccggcagaccaacctggagaacctggaccaggccttctctgtggcggagcgggacctgggagtgacgcggctcctggaccctgaggacgtggatgtccctcagcccgacgagaagtccatcatcacctacgtctcgtcgctgtatgacgccatgccccgcgtgccggacgtgcaggatggggagctgcagctgcgctggcaggagtaccgggagctggtgctgctgctgcttcagtggatgcgacaccacacggccgcctttgaggaacgcaggttcccctccagcttcgaggagattgagatcctgtggtctcagttcctgaagtttaaggagatggagctaccagccaaggaggccgacaagaacaggtccaagggcatctaccaatccctggagggagcggtgcaagcaggccagctcaaggtgccccctggctaccacccgctggatgtggagaaggagtggggcaagctgcacgtggccatcctggagcgggagaagcagctccgcagcgagtttgagaggctggagtgtcttcagcgcatcgtgaccaagctgcagatggaggcggggctgtgtgaggagcagctgaaccaggccgacgccctgctgcagtcggatgtccggctgctggctgcaggcaaagtgccacagcgggcgggggaggtggaacgggacttggacaaggcggatagcatgatccggctgctcttcaacgacgtgcagaccctcaaggatggacggcacccgcagggcgagcagatgtaccgcagggtgtaccgtctgcacgagcgcctggtagccatccgcaccgagtacaacctacggctgaaggcaggcgtggcggcccctgcaacccaggtggcccaggtgactctgcagagtgtgcagaggcgccccgagctggaggactccactctgcgctacctgcaggacctgctggcctgggtggaggagaaccagcaccgtgtggatggcgctgagtggggtgtggacctgcccagcgtggaggcgcagctgggcagccaccgaggcctgcaccagtccatcgaagaattccgggccaagatcgagcgggcacggagtgacgagggccagctctcccccgccacccggggtgcctaccgtgactgcctgggtcggctggacctgcagtacgccaagctgctgaactcctccaaggcccgcctcaggtccctggagagcttgcacagctttgtggcagccgccactaaggagctaatgtggctgaatgagaaggaggaggaggaggtgggcttcgactggagcgaccgcaacaccaacatgaccgccaagaaggagagctactcggcgctgatgcgggagctggagctgaaggagaagaagatcaaggagctccaaaatgctggggaccggctgctgcgggaggaccacccggcccggcccacggtggagtccttccaggcggccctgcagacgcagtggagctggatgctacagctgtgctgctgtatcgaggcacacctgaaggagaacgctgcctactttcagttcttctcagatgtgcgggaggccgaggggcagttgcagaagctgcaggaggcactgcgtaggaaatacagttgtgatcgctccgccaccgtcacccggctggaggacctgctgcaggatgcccaggacgagaaggaacagctgaacgagtacaagggccacctctcaggcctggccaagcgggccaaggccgtcgtgcagctgaagccccgccacccagcccaccccatgcggggccgcctgcccctgctggccgtgtgcgactataagcaggtggaggtgactgtgcacaagggtgacgagtgccagctggtgggccctgcacagccgtcccactggaaggtgctcagcagctccggcagcgaggccgccgtgccctccgtgtgcttcctggtgcccccgcccaaccaggaggcccaggaggccgtcaccaggctggaggcccagcaccaggccctggtcacgctgtggcaccagttgcacgtggacatgaagagccttctggcctggcagagccttcgccgcgacgtgcagctcatccgctcctggtccctggccacgttccgcaccctgaagccagaggagcagcgccaagccctgcacagcctggagctgcactaccaggccttcctgcgggacagccaggacgcgggcggcttcggacccgaggaccggctgatggctgagcgcgagtacggctcctgcagccaccactaccagcagctgctgcagagcctggaacagggtgcacaggaagagtctcgctgccagcgctgcatctccgagctcaaagacatccggctgcagctggaggcctgtgagacgcgcaccgtgcaccgcctgcggctgccgctggacaaagagccggcacgggagtgtgcccagcgcatcgccgagcagcagaaggcacaggcagaggtggaggggctgggcaagggggtcgcccggctctctgccgaggccgagaaggtcttggccctaccagagccatcgcctgcggcccccacgctgcgctcggagctggagctgacgctgggcaagctggagcaggtccgcagcctgtctgccatctacctggagaagctcaagaccatcagcctggtgatccgcggcacgcagggggccgaggaggtgctcagggcccacgaggagcagctcaaggaggcccaggccgtgccggccaccctcccggagctcgaggccaccaaggcctctctgaagaagctgcgggcccaggccgaggcacagcagcccacgttcgacgccctgcgggatgagctgcggggggcacaggaggtgggggagcgactgcagcagcggcacggggagcgggacgtggaggtggagcgctggcgggagcgggtcgcccagttgcttgagcgctggcaggctgtgctggcccagaccgacgtgcggcagcgcgagctcgagcaactgggccgccagctgcgttactaccgcgagagtgcagaccccttgggcgcctggctgcaggacgccaggcggcggcaggagcagatccaggccatgccgctggccgacagccaggctgtgcgggagcagctgcggcaggagcaggccctgctggaggagatcgagcgccacggcgagaaggtcgaggagtgccagaggtttgcgaaacagtacatcaacgccatcaaggactatgaactccagctggtgacgtacaaggcgcagcttgagccggtggcctccccggccaagaagcccaaggtccagtcgggatcagagagtgtcatccaggagtacgtggacctgcgtacgcactacagcgagctgaccacactgacgagccagtacatcaagttcatcagcgagactctgcggcgcatggaggaggaggagaggctggctgagcagcagcgggcagaggagcgcgagcggctggccgaggtggaggccgcgctggagaagcagcggcagctggccgaggcgcacgcccaggcaaaggcacaggcggagcgggaggcgaaggagctgcagcagcgcatgcaggaggaggtggtgcggcgggaggaggcggcggtggacgcgcagcagcagaagcgcagcattcaggaggagctgcagcagctgcggcagagctcggaggcggagatccaggccaaggcccggcaggcagaggcggctgagcgcagccggctgcgcatcgaggaggagatccgcgtggtgcgcctgcagttggaggccaccgagcgccagcgtggcggggctgagggggagctgcaggcactgcgtgcacgggcggaggaggctgaggcacaaaagcgacaggcgcaggaggaggccgagcgcttgcggaggcaggtgcaggacgagagccagcgtaagcggcaggcggaggtggagctggcctcgcgcgtgaaggccgaggccgaggcggcgcgcgagaagcagcgggccctgcaggccctggaggagctgcggctgcaggcggaggaggcggagcggcgcctgcggcaggccgaggtggagcgagcgcggcaggtacaggtggccctggagacggcgcagcgcagtgcagaggcggagctgcagagcaaacgcgcctccttcgccgagaagacggcacagctggagcgctccctgcaggaggaacacgtggctgtggcacagctgcgggaggaggctgagcggcgggcacagcagcaggccgaggccgagcgggcgcgcgaggaggcagagcgggagctggagcgctggcagctcaaggccaacgaggcgctacggctgcggctgcaggcggaggaggtggcgcagcagaagagcctggcgcaggccgaggctgagaagcagaaggaggaggcggagcgcgaggcgcggcggcgcggcaaggcggaggagcaggccgtccggcagcgggagctggctgaacaagagctggagaagcagcggcagctggcggaaggcaccgcgcagcagcgcctggccgcggagcaggagttgatccggctgcgggccgagacggagcagggggagcagcagcggcagctgctggaggaggagctggcccggctgcagcgtgaggcggctgcagccacgcagaaacggcaggagctggaagccgagctggccaaggtgcgggccgagatggaggtgctgctggccagcaaggcgagggctgaggaggagtcgcgctccaccagcgagaagtccaagcagaggctggaggccgaggccggccggttccgcgagctggccgaggaggccgcccgcctgcgtgccctggcggaagaggccaagcggcagcggcagctggccgaggaagacgcggcgcggcagcgggccgaggcggagcgggtgcttgcggagaagctggccgccatcggcgaggccacgcggctcaagacggaggcggagatcgcgctcaaggagaaggaggcggagaacgagcgcctgcggcggctggcggaggacgaggccttccagcggcggcggctggaggagcaggccgcgcaacacaaggctgacatcgaggagcgcctggcccagctgcgcaaggcatcggacagcgagctggagcggcagaaggggctggtggaggacacgctgaggcagcggcggcaggtggaggaggagatcctggcgctgaaggcgagcttcgagaaggcggccgctggcaaggcggagctggagctggagctgggacgcatccgcagcaacgcggaggacacgctgcgcagcaaggagcaggccgagctggaggctgcgaggcagcggcagctggcggcggaggaggagcggcggcgccgtgaggctgaggagcgcgtgcagaagagcctggcggccgaggaggaggccgcacggcagcggaaggcggcgctggaggaagtcgagcggctgaaagccaaggtggaggaggcgcggcgcctgcgggagcgagcggagcaggagtcggcgcggcagctgcagctggcccaggaggccgcccagaagcggctgcaggcggaagagaaggcacacgccttcgcggtgcagcagaaggagcaggagctacagcagacgctgcagcaggagcagagcgtgctggaccagctgcgcggcgaggcggaggcggcccggcgggcggctgaggaggcggaggaggcccgggtgcaggcggagcgtgaggcggcgcagtcccggcggcaggtggaagaggccgagcggctgaagcagtcggcagaggagcaggcacaggcccgggctcaggcacaggcggctgcagagaagctgcgcaaggaggccgagcaagaggcggcgcggcgggcacaggcggagcaggcggccctgcggcagaagcaggcagctgacgcggagatggagaagcataagaaattcgccgagcagacgctgcggcagaaggcgcaggtggagcaggagctgacaacactgcggctgcagctggaggagaccgaccaccagaagaacctgctggacgaggagctgcagcggctgaaggcggaggccacggaggccgcacgccagcgcagccaggtggaggaggagctcttctcggtgcgcgtgcagatggaggagctgagcaagctcaaggcacgcatcgaggctgagaaccgcgcactcatcttgcgtgacaaggacaatacgcagcgcttcctgcaggaggaggctgagaagatgaagcaggtggcggaggaggccgcgcggctgagtgtggcggcccaagaggctgcgcgactgcggcagctggcagaggaggacctggcacagcagcgggccttggcagagaagatgctcaaggagaagatgcaggcggtgcaggaggccacgcgactcaaggctgaggcggaactgctgcagcagcagaaggagcttgcgcaggagcaggcgcggcggctgcaggaggacaaggagcagatggcgcagcagctggcggaggagacgcagggcttccagcggacgctggaggccgagcggcagcggcagctggagatgagcgctgaggctgagcgcctcaagctgcgtgtggccgagatgagccgagcccaggcccgcgctgaggaggacgcccagcgcttccggaagcaggcggaggagatcggtgagaagctgcaccgcacggagctcgccacccaggagaaggtgaccctggtgcagacactggagatccagcgacagcagagtgaccatgatgccgagcgcctgcgggaggccatcgctgagctggagcgtgagaaggagaagctccaacaggaggccaaactgctgcagctcaagtctgaggagatgcagacggtgcagcaggagcagctgctgcaggagacgcaggccctgcagcaaagcttcctctctgaaaaggacagcctgctacagcgggagcgcttcatcgagcaggagaaggccaagctggagcagctcttccaggacgaggtggccaaggcacagcagctgcgtgaggagcagcagcggcagcagcagcagatggagcaggaacggcagcggctggtggccagcatggaggaggcgcggcggcggcagcatgaggccgaggagggcgtgcggcgcaagcaggaggagctgcagcagctggagcagcagcggcggcagcaggaggagctgctggctgaggagaaccagaggctgcgtgagcagctgcagctcctggaggagcagcaccgggccgcgctggcgcactcagaggaggtcactgcctcgcaggtggctgccacaaagaccctgcccaatggccgggatgcacttgatggccccgcggcagaggcagagccggagcacagcttcgatggcctgcggcggaaggtgtcagctcagaggctgcaggaggccggcatcctgagtgcggaggagctgcagcggttggcgcagggccacaccacggtggacgagctcgcacggcgggaagacgtgcgccactacctgcagggccgcagcagtatcgcagggctgttgctgaaggccaccaatgagaagctgagtgtttacgccgccctgcagaggcagctgctgagtcccggcacggccctcatcctgctggaggcgcaggcggcctcaggcttcctgctggaccctgtgcggaaccggcggctgaccgtcaacgaggctgtgaaggagggtgtggtgggccccgagctgcaccacaagctgctgtcggccgagcgcgccgtcactggctacaaggacccctacactggccagcagatctctctcttccaagccatgcagaagggcctcatcgtccgggagcacggcatccgcctgctggaggcccagatcgccacgggcggcgttatcgaccccgtgcacagccaccgcgtgcccgtggacgtggcctaccggcgcggctacttcgacgaggagatgaaccgcgtcctggcggaccccagcgacgacaccaagggcttctttgaccccaacacgcacgagaacctcacgtacctgcagctactggagcgctgcgtggaggaccccgagacgggcctgtgccttctgccactcacggataaggctgccaagggcggggagctggtctacactgactccgaggcccgggacgtctttgagaaggccaccgtgtctgcgccgttcggcaagttccagggcaagacggtgaccatttgggagatcatcaactcggaatacttcacggcagagcagcggcgggacctgctgcggcagttccgcacgggccggatcacagtggagaagatcatcaagatcatcatcacggtggtggaggagcaggagcagaagggccggctttgctttgagggcctgcgcagcctggtgccagccgccgagctgctggagagcagggtcatcgaccgcgagctctaccagcagctgcagcgaggtgagcgctctgtgcgagacgtagccgaggtggacactgtgcggcgggctctccggggtgccaacgtcatcgcgggtgtatggctggaggaggcggggcagaagctgagtatctacaatgccctgaagaaagacctgctgccatccgacatggccgtggccctgttggaagcccaggccggcaccgggcacatcatcgaccccgccaccagcgcccggctgaccgtggacgaggcagtgcgtgctggcctggtgggccccgagtttcatgagaagctgctatcagccgagaaggctgtgacagggtacagggacccctacacagggcagagcgtctccctgttccaggccctgaagaagggcctcattccccgggagcagggcctgcgcctgttggacgcccagctgtccacgggcggcatcgtggaccccagcaagagccaccgcgtgcccctggatgtcgcctgcgcccgaggctgcctggatgaggagaccagcagggccctgtcggcaccaagggccgacgccaaggcctacagtgaccccagcacaggggagccggccacctacggcgagctccagcagcggtgccggcccgaccagctgaccgggctgagcctgctgccgctctcagaaaaggctgctcgggcccggcaggaggagctctactcagagctgcaggcccgtgagacctttgaaaagaccccggttgaggtccccgtgggtggcttcaagggcaggacggtgacggtgtgggagctcatcagctctgagtacttcactgcggagcagcggcaggagctgttgcgtcagttccgcacgggcaaggtcaccgtggagaaggtcatcaagattctcattaccatcgtggaggaggtggagaccctgcggcaggagaggctgtccttcagcggcctccgtgcccctgtgccagccagcgagctcctggcttccggggtcctcagcagagcccagtttgagcagctcaaggacggcaagacgacggtcaaggacctttcggagctgggctccgtgcggacgctgctgcagggcagtggctgcctcgccggcatctacctggaggacaccaaggagaaggtgtccatctacgaggccatgcgccggggcctgctgagagccacaacggctgcgctcctgctggaggcgcaggcggccactggcttcctggtggaccccgtgcggaaccagcgcctgtatgtccacgaggccgtgaaggcgggcgtggtgggccccgagcttcacgagcagctgctgtctgccgagaaggccgtcaccggctacagagacccctactcgggcagcaccatctccctcttccaggccatgcagaagggcctggttctccggcagcacggcatccgcctgctggaggcccagatcgccacgggcggcatcatcgaccccgtgcacagccaccgcgtgcctgtggacgtggcctaccagcgcggctacttcagtgaggagatgaaccgcgtcctggcggaccccagcgacgacaccaagggcttctttgaccccaacacgcatgagaacctcacgtacaggcagctgctggagcggtgcgtggaggaccccgagacgggcttgcgccttctgccactgaaaggggcggagaaggctgaggtggtggagaccacgcaggtgtacactgaggaggagacaagaagggcatttgaagagacacagatcgacattcccggcggcggcagccacggcggctccaccatgtccctgtgggaggtgatgcagtcggacctgatccccgaggagcagcgggcccagctgatggctgacttccaggccggccgggtgaccaaggaacgcatgatcatcatcatcatcgagatcattgagaagacagagatcatccgccagcagggtctggcctcctacgactacgtgcgccgccgcctcacggctgaggacctgttcgaggctcggatcatctctctcgagacctacaacctgctccgggagggcaccaggagcctccgtgaggctctcgaggcggagtccgcctggtgctacctctatggcacgggctccgtggctggtgtctacctgcccggttccaggcagacactgagcatctaccaggctctcaagaaagggctgctgagtgccgaggtggcccgcctgctgctggaggcacaggcagccacaggcttcctgctggacccggtgaagggggagcggctgactgtggatgaggctgtgcggaagggcctcgtggggcccgagctgcacgaccgcctgctctcggctgagcgggcggtcaccggctaccgtgacccctacaccgagcagaccatctcgctcttccaggccatgaagaaggagctgatccctactgaggaggccctgcggctgctggatgcccagctggccaccggcggcatcgtggacccccgcctgggcttccaccttcccctggaggtggcttaccagcgtggctacctcaacaaggacacgcacgaccagctgtcagagcccagcgaggtgcgcagctacgtggacccgtccaccgacgagcgcctcagctacacgcagctgctcaggcggtgccgtcgtgacgacggcaccggccagctgctcctgccactgtcggacgcccgcaagctgaccttccgtggcctgcggaagcagatcaccatggaggagctggtgcgctcgcaggtcatggacgaggccacggcgctgcagctgcgggagggcctgacctccatcgaggaggtcaccaagaacttgcagaagttcctggaaggcaccagctgcatcgctggtgtcttcgtggacgccaccaaggaacggctctcggtgtaccaggccatgaagaagggcatcatccgccccggcacagcctttgagctcctggaggcgcaggcggccaccggttacgtcatcgaccccatcaagggactgaagctgacggtggaggaggctgtgcgtatgggcattgtgggccccgagttcaaggacaagctgctgtcggccgagcgcgccgtcactgggtacaaggacccctactctgggaagctcatctccctcttccaggccatgaagaagggcctgatcctgaaggaccatggcatccgcctgctggaggcccagatcgccacgggcggcatcatcgaccctgaggagagccaccggctgcccgtggaggtggcctacaagcgcggcctcttcgatgaggagatgaacgagatcctgaccgacccctcggacgacaccaagggcttctttgaccctaacacggaggagaacctcacctacctgcagctgatggagcgttgtatcactgacccccagacgggcctgtgtctcttgccgctgaaggagaagaagcgggagcggaagacgtcctccaagtcctccgtgcgcaagcgccgagtggtcatcgtggaccccgagacgggcaaggagatgtcagtgtacgaggcctaccgcaagggcctgattgaccaccagacgtacctggagctgtccgagcaggagtgcgagtgggaggagatcaccatctcctcctcggacggcgtggtcaagtccatgatcatcgaccgccgctccgggcgccagtacgacatcgatgatgccatcgccaagaacctcatcgaccgctcggcactggaccagtaccgcgccggcacgctctccatcaccgagttcgccgacatgctctcgggcaacgccggtggtttccgctcccgttcctcctcggtgggatcctcctcctcctaccccatcagccccgccgtctccaggacccagctggcctcctggtcagaccccactgaggagacgggccccgtggctggcatcctggacacggagacgctggagaaggtgtccatcaccgaggccatgcaccggaacctggtggataacatcacggggcagcggctgctggaggcgcaggcctgcaccgggggcatcatcgaccccagcaccggtgagcgcttccctgtcaccgacgccgtcaacaagggcctggtggacaagatcatggtggaccgcatcaacctggcccagaaggccttctgcggcttcgaggacccacgcaccaagaccaagatgtcggccgcccaggccctgaagaagggctggctctactacgaggccggccagcgcttcctggaggtgcagtacctgaccggcggcttgatcgagcccgacacgccgggccgcgtgcccctggacgaggccctgcagcgcggcacggtggacgcccgcaccgcacagaagctgcgtgacgtgggcgcctactccaagtacctcacctgccctaagaccaagctcaagatctcctataaggacgcgctggaccgcagcatggtggaggagggcacggggctgcggctgctggaggctgccgcgcagtccaccaagggctactacagcccctacagcgtcagcggctccggctctaccgctggctcccgcaccggctcgcgcaccggctcccgggccggctcccgccgcggcagctttgacgccaccggctccggcttctccatgaccttctcttcatcctcctactcctcctcgggctacggccgccgctacgcctcggggtcctcggcctccctggggggccctgagtctgccgtggcctga

SEQ ID NO: 22773 - DNA, 7322 bp, Homo sapiens
  source 1..7322: mol_type = unassigned DNA
ggcagcgcatacactacaatggctgctggaaagaggcgtaaggaaacaatttccaggcccgccgcgtccagcccgaaatatgagaaaaaaattattagaaattccgcgggcggtgtagaggcggcggacgggccggagggaggatgttaaagccccgcggttgcctcttggtgctgccttggccgtatttggcacccagaatgcttcattctgtgacggtctattaataaggttgccttgctagagtttggagcagggcctcagattggccaaaatgggaaggattggattccactctcttccacgaagagtcaatgggactggctaagatcaaagtctgaggctttttccatcagtaatcagtccctttttgctttcttttacgaccacatgaaacttgagaagccacctaaagctatatcatttagtggagttgggcagttcccaagtgtccaacaagaaggcctggtttaggctgcgatggccactgtcattcctggtgatttgtcagaagtaagagatacccagaaagtcccttcagggaaacgtaagcgtggtgaaaccaaaccaagaaaaaactttccttgccaactgtgtgacaaggcctttaacagtgttgagaaattaaaggttcactcctactctcacacaggagagaggccctacaagtgcatacaacaagactgcaccaaggcctttgtttctaagtacaaattacaaaggcacatggctactcattctcctgagaaaacccacaagtgtaattattgtgagaaaatgtttcaccggaaagatcatctgaagaatcacctccatacacacgaccctaacaaagagacgtttaagtgcgaagaatgtggcaagaactacaataccaagcttggatttaaacgtcacttggccttgcatgccgcaacaagtggtgacctcacctgtaaggtatgtttgcaaacttttgaaagcacgggagtgcttctggagcaccttaaatctcatgcaggcaagtcgtctggtggggttaaagaaaaaaagcaccagtgcgaacattgtgatcgccggttctacacccgaaaggatgtccggagacacatggtggtgcacactggaagaaaggacttcctctgtcagtattgtgcacagagatttgggcgaaaggatcacctgactcgacatatgaagaagagtcacaatcaagagcttctgaaggtcaaaacagaaccagtggatttccttgacccatttacctgcaatgtgtctgtgcctataaaagacgagctccttccggtgatgtccttaccttccagtgaactgttatcaaagccattcacaaacactttgcagttaaacctctacaacactccatttcagtccatgcagagctcgggatctgcccaccaaatgatcacaactttacctttgggaatgacatgcccaatagatatggacactgttcatccctctcaccacctttctttcaaatatccgttcagttctacctcatatgcaatttctattcctgaaaaagaacagccattaaagggggaaattgagagttacctgatggagttacaaggtggcgtgccctcttcatcccaagattctcaagcatcgtcatcatctaagctagggttggatcctcagattgggtccctagatgatggtgcaggagacctctccctatccaaaagctctatctccatcagtgaccccctaaacacaccagcattggatttttctcagttgtttaatttcatacctttaaatggtcctccctataatcctctatcagtggggagccttggaatgagctattcccaggaagaagcacattcttctgtttcccagctccccccacaaacacaggatcttcaggatcctgcaaacactatagggcttgggtctctgcactcactgtcagcagctttcaccagcagtttaagcacaagtaccaccctcccacgtttccatcaagcttttcagtaggattctgggacatggattcattacagaaatgtatgtgtagctgtgccctagatgaccatttttattttagtgcctactttaaaacagtataaaaatttctgcttttgtataatacaaattttcattaagccagtataaaatagaaactagcttttaaactgagctttggaaccatttgtgttcagttaagtttacctgggtattttgtcctgattcactgccaattgtcacattttaagacttttttttttccatataggaaagccattattagtagtaaacttttacaaatcccattttcaaattacttttagatcttaaaattttcatttttgtctaataacagtggctctaccttttgacatctggctcattaaaaaatttagcaatagaatgtaaattgtataaaaagtttgtgaataactcaagggtttaaattttcttactagcttctaaatggattaataatcaagtgcttcaaatgaattaagagtccagtttcggaagataataaatgtttgttagatacaccataatttcagatcagtatattctgaagactccctgttgtctggctaaaatatttgccatctttattatgagcctttaaggaaaacaaaccctaaacacaaagcatcagtatttatagcaaaaagagactctgttaggtgacatggcatttcgtgtcacttaatagttggccctaaattagtacacaggatattttgtcgtgtttcatccttcttaacatgctatcttttcatttaataatagtaatagtgtatggcattggggtcttcagagtcgatatataggtagatctctttagtcttttccacctttcacatccaaggggtgggtcaagtgcagccagcaatttattttcattgttggcccacggttagtccataatctagagccattgtggaactgcagccatgaggtgtgtttatcccacagtggattgactcagcctctgtgggtgacagacttctaagcaggaagatagacgtgaagcacatggttacatttgggaacttgtgtagggatcatggcccctgtagccagggttaaaaactggactttttagaagtaaagtaaaagcatatcgcttatatcatttcttgctgaatttgatatgtttttctttcccttaagaatcaaaagcagaaaacaaaaacaacagtcctactccgatgttatctttctgattcaatgtgaatccatctttccttgcaatattttggatggagaatttgaagttaaatgcattagaaaactacctgatgaactaccacaaagttttaagtgactagaaatatatacagtaaaatcccactttcatgcatctctgggaaatgataggagtattgcaaataagttgagtttgtagagggtaacaaagtaaagtaaaacaaacctatcttggttaacatgaaaataacaattgagaatatattatattcactgaataattataggcttttcctcacattagacaaccaacataatcttcttaaaggtctaattaatatatttttctaagggtcagttgggacattaacctaagaaacatatctattaagcacttgttaacaccttattttaggaccctttccgttggggatgggggcaagggtgggaggtttttagaagagtatatatctctttaaaaaaaaacagaaagaaaaatatttctgagcactcattagccctatatggaaacttctttcctttttgtagggccagttatcactgcagattgcaatgtttaccaagaatttctaaaaatgagtgcagattactgaatataatacattatttaaaatatttgggagtagtataatttgtggagaaatgtaaattgtaataatgtaaatgggggcttcaatatatatatataatacacacacacacacacatgcacacataccgcacttcatagaatcaaagttgctctctgaaggagctttggctcctgatattttatcatgctcctatatttttttaatccttggagcagtagtttttatacttatgtatttaaattttattatgaaaaattacatttattaaaaaagtgtgttccaaaggcattaaaattatatatgttaataaggaagtacatttttaaatttttcaaactgctcctagcttttgattaggagaatattttttctgaaagtaggcttttcgctctgcttcattactgcttcctttagtttctatgaaacagattgcttacctaaatctttagttgaatgattagtgttcaatattgctttaatcaccatataaaaggaaaaaaattggtgacagagcacaaatagaaaacctatttttaaatagaaatcacaaatagcaagtgtggaagcactactttattctgtttaaaatgtacttaagaagtcatcaaattagtgaactgagacattggccttagtaggctgtattcactgctaatttaaaaaagggagtaccaggatttattaagtaaagcattttggaaatggggaatagcgccatatatgtatgtatgtgtatgtgtgtgtgtgtgtgtgtatatatacacacacacacacatacttaaatcttgccctgcatgaaattcaaatacatggaggcacatcttcagggcaccagtgttaaaattttggagtcttaattttcatgtgtacacctctttgcctgttcccacccccagacttgaaataacacttcagagtaagagggaattcagctaatttgtttttaaaattgactgtagtggtcactaaaccctttttgagagaatttctattaaagatgaggcagactcgcttatttgaattgcacaatgttctaacaaggatgtaacacagaattggcttttttttccctagaaaaagattgtttgtttctatgtcaactagatatgattaaaaataagtattgccaatgctgttttcattctctagtggccagaatcattatccttgaaatttctggtagtgccttagcttggttaaaaaaaaaaaaaaaaaaaaaaaaaagggattaacattaaataaaagtagtttagaatttgggcctcagacaagatattgaacctcattcagtttcacttccacatgtatgtacaagttaggtcaccaaacacggaagtgtgagtgtggaaggatcttggcactgtaagcaatgctatccattgatgtatacaagtacctttatagttatcgatcactgttaaaactttcattttaaaatcctattaccaagttcagttttttaaaacttcaattgtcctggctgattatgcatcactctgtgtgcaacttttttatttcatttagtgtttctttcaagctgtgtatttttgcctatttgttgcttgtgctttatttttcttagtcatttgtggaatatagtgatatattgtgttaatttggacagtagcggtttttaaaaaccatatactgactgaaacatgagccagagccgattgctttattaagctaataatgaatgttaaagagtacatattttcaggatcgttcatctagtgagcaatacacatattataggccaatatttttttaaaaaatagagcttggtcaacctctatactacacatattacaagatatagcactttcaaaatgaatctaaacctttacagaaactttcttataggttatgccttttattttaagacttattataattcaagtgccattagatgatatatatgtaggcctttgatatataatgctttgtgtacaaaaatggtagatggtattttaaacaggtacatttttacagtgttttcttatcaatttgctatattgcacagaatcagtgtgtgtcttttcataaggttttacaatggtttatttttttacaaggtttacgtgtctcaaagcacactgtcttcccagtacgtaagttaaaaaataccagttcacccaagttgcttctagcctactgagatccatgtgacattggaggagatcttttaaatgtttagtattcgtcattagcaatggctggctgttagttctggtaaatgtgtgcctaagttgaatttgtcttgtttttctcacactgtgtcagcagccatgtctacaacacagataagtctgttgtgatcacatagatctacataagttgtgcagttttgtgctaaaaacccatagggagctcctttgggatcatagaaaagaagatcatgcaaccagcattggtgaaggcacactcagattgcacttagggcctttctatgatgttgtcaaccctctgaggatggaaggcagtgtcttttgatgttatctagcctagaaatgacacagaactattgctaatgtataaaacacttcattatataagcttcagtggtacagatgaaccagaatgaatgtttatcttctcagaaacactccttcaatattatattggatcatgctgctaatgtaacttgggctacaactcttcatggtgctacaaacttctctgtctcattcagtcgtatttttttatccatagaaaaaggactacattaggtgtaaaagtgtacaatatatttttatactgtgacttaatttgtcattaacaaacttttacaccaccacaatgtattcatgtgcacttgcaaaaggagatctcggacatgcaaatgttaccagaacaaacccagcttttgtccacaaggtgactgtaactcagaatggaaagtgggctttataatagggtgtggagtgaagaacatgctgtatgttactaacagccctttgaatttaacaaaaactgggaatccattaggaaacggattgcatcatacctgaacataagctggactgctgaaattgtatttttagctaatgaaaaagtgtttggactagtactctaaaaatgttctaatgataaagttttgagtcaaaatagaaaagaaaaaaatctgcattccaggccgaattttgtatatttttattgcatttaaaattgctattctgtaatattgggaaatcaagtggcttatcatgtatatcgtgtacttaaaatgtattcacaaactactgttgtatttgtataaaatatagacaaagatcatattttttgtgtgtgtataagctctgtaaaatagcaatcacattatgaagctgcagtgatactacattttaaacattcacatccaaagaagcagactatttattgtccatataccagatttaaaatattaatttgctgctaattaaataatagtactgcagcttcttgtggcctacagtgttatgtttgctgtaagaataagatatgtgaattccacaaaatatatgaataaaattatagaatggctttagataa

SEQ ID NO: 22774 - DNA, 1684 bp, Homo sapiens
  source 1..1684: mol_type = unassigned DNA
agctgcaagttgggctgcaggggcagcgcatacactacaatggctgctggaaagaggcgtaaggaaacaatttccaggcccgccgcgtccagcccgaaatatgagaaaaaaattattagaaattccgcgggcggtgtagaggcggcggacgggccggagggaggatgttaaagccccgcgattggccaaaatgggaaggattggattccactctcttccacgaagagtcaatgggactggctaagatcaaagtctgaggctttttccatcagtaatcaggcacatggctactcattctcctgagaaaacccacaagtgtaattattgtgagaaaatgtttcaccggaaagatcatctgaagaatcacctccatacacacgaccctaacaaagagacgtttaagtgcgaagaatgtggcaagaactacaataccaagcttggatttaaacgtcacttggccttgcatgccgcaacaagtggtgacctcacctgtaaggtatgtttgcaaacttttgaaagcacgggagtgcttctggagcaccttaaatctcatgcaggcaagtcgtctggtggggttaaagaaaaaaagcaccagtgcgaacattgtgatcgccggttctacacccgaaaggatgtccggagacacatggtggtgcacactggaagaaaggacttcctctgtcagtattgtgcacagagatttgggcgaaaggatcacctgactcgacatatgaagaagagtcacaatcaagagcttctgaaggtcaaaacagaaccagtggatttccttgacccatttacctgcaatgtgtctgtgcctataaaagacgagctccttccggtgatgtccttaccttccagtgaactgttatcaaagccattcacaaacactttgcagttaaacctctacaacactccatttcagtccatgcagagctcgggatctgcccaccaaatgatcacaactttacctttgggaatgacatgcccaatagatatggacactgttcatccctctcaccacctttctttcaaatatccgttcagttctacctcatatgcaatttctattcctgaaaaagaacagccattaaagggggaaattgagagttacctgatggagttacaaggtggcgtgccctcttcatcccaagattctcaagcatcgtcatcatctaagctagggttggatcctcagattgggtccctagatgatggtgcaggagacctctccctatccaaaagctctatctccatcagtgaccccctaaacacaccagcattggatttttctcagttgtttaatttcatacctttaaatggtcctccctataatcctctatcagtggggagccttggaatgagctattcccaggaagaagcacattcttctgtttcccagctccccccacaaacacaggatcttcaggatcctgcaaacactatagggcttgggtctctgcactcactgtcagcagctttcaccagcagtttaagcacaagtaccaccctcccacgtttccatcaagcttttcagtaggattctgggacatggattcattacagaaatgtatgtgtagctgtgccctagatgaccatttttattttagtgcctactttaaaacagtataaaaatttctgcttttgtataatacaaattttcattaagccagtataaaataga

SEQ ID NO: 22775 - DNA, 1899 bp, Homo sapiens
  source 1..1899: mol_type = unassigned DNA
agctgcaagttgggctgcaggggcagcgcatacactacaatggctgctggaaagaggcgtaaggaaacaatttccaggcccgccgcgtccagcccgaaatatgagaaaaaaattattagaaattccgcgggcggtgtagaggcggcggacgggccggagggaggatgttaaagccccgcgattggccaaaatgggaaggattggattccactctcttccacgaagagtcaatgggactggctaagatcaaagtctgaggctttttccatcagtaatcagtccctttttgctttcttttacgaccacatgaaacttgagaagccacctaaagctatatcatttagtggagttgggcagttcccaagtgtccaacaagaaggcctggtttaggctgcgatggccactgtcattcctggtgatttgtcagaagtaagagatacccagaaagtcccttcagggaaacgtaagcgtggtgaaaccaaaccaagaaaaaactttccttgccaactgtgtgacaaggcctttaacagtgttgagaaattaaaggttcactcctactctcacacaggagagaggccctacaagtgcatacaacaagactgcaccaaggcctttgtttctaagtacaaattacaaaggcacatggctactcattctcctgagaaaacccacaagtgtaattattgtgagaaaatgtttcaccggaaagatcatctgaagaatcacctccatacacacgaccctaacaaagagacgtttaagtgcgaagaatgtggcaagaactacaataccaagcttggatttaaacgtcacttggccttgcatgccgcaacaagtggtgacctcacctgtaaggtatgtttgcaaacttttgaaagcacgggagtgcttctggagcaccttaaatctcatgcaggcaagtcgtctggtggggttaaagaaaaaaagcaccagtgcgaacattgtgatcgccggttctacacccgaaaggatgtccggagacacatggtggtgcacactggaagaaaggacttcctctgtcagtattgtgcacagagatttgggcgaaaggatcacctgactcgacatatgaagaagagtcacaatcaagagcttctgaaggtcaaaacagaaccagtggatttccttgacccatttacctgcaatgtgtctgtgcctataaaagacgagctccttccggtgatgtccttaccttccagtgaactgttatcaaagccattcacaaacactttgcagttaaacctctacaacactccatttcagtccatgcagagctcgggatctgcccaccaaatgatcacaactttacctttgggaatgacatgcccaatagatatggacactgttcatccctctcaccacctttctttcaaatatccgttcagttctacctcatatgcaatttctattcctgaaaaagaacagccattaaagggggaaattgagagttacctgatggagttacaaggtggcgtgccctcttcatcccaagattctcaagcatcgtcatcatctaagctagggttggatcctcagattgggtccctagatgatggtgcaggagacctctccctatccaaaagctctatctccatcagtgaccccctaaacacaccagcattggatttttctcagttgtttaatttcatacctttaaatggtcctccctataatcctctatcagtggggagccttggaatgagctattcccaggaagaagcacattcttctgtttcccagctccccccacaaacacaggatcttcaggatcctgcaaacactatagggcttgggtctctgcactcactgtcagcagctttcaccagcagtttaagcacaagtaccaccctcccacgtttccatcaagcttttcagtag

SEQ ID NO: 22776 - DNA, 3346 bp, Homo sapiens
  source 1..3346: mol_type = unassigned DNA
attgttcctgcctgattcataaacatcgtgattggcttttgattgctgtcacgtctaatgtggctgctgcctcgtgtcacatctgaaactcatctgtacctcacttagaaagtttctttctataacacaagcctgaacatattgctctcctgattaacaactttcagtggttctgattagacaagacttttcgttgcagtcgacagaaacctaatgggaccattgaagaattccaaacagggtctttataagcttcttctgaaggtctcagacattcagccacggaactcaagtggaatttgtttggataacgtgactgatttcaaagcccggaccccttagacgtgcccatttggtgctgcaagtatttgcataggaatcagaggagttaatcttcttcattccctgacgatgtacaaggtctcttctcacaggtttgaatcttcagacaaacttctgggaggactcggtccctgcctcgcagcagatgttccctgtcactcagtagccaatccgggggacccaggacatgccccagctatagtgatgcagattacctttctgctcctgaatcgcacctgtgcctcagactttctcccctcagcttgagactgcatgtaaactgggatgtgtgaaagcaggaagcaaagctagtgacagctgagaggtccatgtctgggtagaaccaggcccacgatgctgcctctcccgtggtctggagttcagctgcagggactctgctgatgtgcccagcaccatcgttctgtttgtgcttaaatggcacagcatttggtcagcacatctgaaaaggaaggtgtgagaagcaaagcccatggccacgttcccctgccagttatgtggcaagacgttcctcaccctggagaagttcacgattcacaattattcccactccagggagcggccgtacaagtgtgtgcagcctgactgtggcaaagcctttgtttccagatataaattgatgaggcatatggctacccattctccccagaaatctcaccagtgtgctcactgtgagaagacgttcaaccggaaagaccacctgaaaaaccacctccagacccacgaccccaacaaaatggcctttgggtgtgaggagtgtgggaagaagtacaacaccatgctgggctataagaggcacctggccctccatgcggccagcagtggggacctcacctgtggggtctgtgccctggagctagggagcaccgaggtgctactggaccacctcaaagcccatgcggaagagaagccccctagcggaaccaaggaaaagaagcaccagtgcgaccactgtgaaagatgcttctacacccggaaggatgtgcgacgccacctggtggtccacacaggatgcaaggacttcctgtgccagttctgtgcccagagatttgggcgcaaggatcacctcacccggcataccaagaagacccactcacaggagctgatgaaagagagcttgcagaccggagaccttctgagcaccttccacaccatctcgccttcattccaactgaaggctgctgccttgcctcctttccctttaggagcttctgcccagaacgggcttgcaagtagcttgccagctgaggtccatagcctcaccctcagtcccccagaacaagccgcccagcctatgcagccgctgccagagtccctggcctccctccacccctcggtatcccctggctctcctccgccaccccttcccaatcacaagtacaacaccacttctacctcatactccccacttgcaagcctgcccctcaaagcagatactaaaggtttttgcaatatcagtttgtttgaggacttgcctctgcaagagcctcagtcacctcaaaagctcaacccaggttttgatctggctaagggaaatgctggtaaagtaaacctgcccaaggagctgcctgcagatgctgtgaacctaacaatacctgcctctctggacctgtcccccctgttgggcttctggcagctgccccctcctgctacccaaaatacctttgggaatagcactcttgccctggggcctggggaatctttgccccacaggttaagctgtctggggcagcagcagcaagaacccccacttgccatgggcactgtgagcctgggccagctccccctgccccccatccctcatgtgttctcagctggcactggctctgccatcctgcctcatttccatcatgcattcagataattgatttttaaagtgtatttttcgtattctggaagatgttttaagaagcattttaaatgtcagttacaatatgagaaagatttggaaaacgagactgggactatggcttattcagtgatgactggcttgagatgataagagaattctcgaactgcatgtattgtgccaatctgtcctgagtgttcatgctttgtaccaaatttaatgaacgcgtgttctgtaatcaaactgcaaatattgtcataaccaacatccaaaatgacggctgctatatataagtgtttgtcatatggaatttaatcgtaagccatgatcataatgttaactaaataactttatgtggcactgcctagtaagggaactatggaaaggtttggatttctccaaatctgggagaattttcaaaataagaaaataacctttatatgatatactatgactaggctgtgtatttcttttcagggatttttctaccttcagggttggatgtagtttagttactattaccatagccaacctgtagttttacatatacattttcttgtggagcaatagagttctccattttacagaagcattttaaatgtagtttgaatattttccacaagatgctgcaatgtgagttatcacttcatttatcttaaagaaagactaaactggttgtcagttacatctgacagaaaaaaaaaaaaaatcactgtgtaaccaggttaagtggtaaaataatccaggcgtcagtcaaaggcattttgctgactttaatattgattatatttttaacaggaatttaagaaaatattactggaattaaaaatatatatatattaaacaagaattttctttgctctgtctagcttaaactactactcaagctgcttaagttcttaagtattgtttgtaatcaccaataaataagtgcatttgtaattcatcagtcattattagcttttattaaaagaagattacgttttacaatgtaactataatctcttgaatttggtatcttattaatgagttttaaagatgtaaaacctaaccttttttaaagctccattgtcttatgtttttagaggcttttccgtaaacatatatcttacatataataaacttttcaaatcttgc

SEQ ID NO: 22777 - DNA, 4430 bp, Homo sapiens
  source 1..4430: mol_type = unassigned DNA
gattgctgtcacgtctaatgtggctgctgcctcgtgtcacatctgaaactcatctgtacctcacttagaaagtggttctgattagacaagacttttcgttgcagtcgacagaaacctaatgggaccattgaagaattccaaacaggcaagtgacaggaacatatttgcatgttagaagaatcagcctggcagcagcattgtgattagaatgaaggggaaccgtccaaaaacagactggggaaccaatatggatctgcctctagcatgcggaaatatctctctacactgacctaactgactcactaagcttgtggtttgtttaaaggaagccacatgaaaattgagtttgggccaatagagtgaactcgttctccattctctagcatccctccccatgcaaccaccctatccctgccaagtttctgggcaccacagattggaaagtagcctcctgtaggtatttgcccatgttaagtggtggggtctctttctgtcttcccttcttggtctcacctgtctggtgtgacaagggaagcatgtgccaaccaaggctagacccttgtgagaccagagcagccccactttcggtaaagcaagcaacctctgcttacttgcccaacacaccctagcttccgtgttccttgccttgtgagttatcttcttgggtacaatttaacacagcgttcccacctccttataactaaaatagctagagggggctttgtgcctcaaaccccaaggagaccatcttggcaatctctgcctctgcaacagggcacttgctccctgggcaactcctttcccaggtcatcttctcccttgacatgcccatcagatttaatagtgtgcctatttggcagaaaaatggggtcccttggttgctgattcttaggaatgtgaggttctcccagccagagctctcagcactaaaagttctagtctctgcgtaatggccggcatatctttggcgtatctaaaatcctcttcagtttccagcagggtctttataagcttcttctgaaggtctcagacattcagccacggaactcaagtggaatttgtttggataacgtgactgatttcaaagcccggaccccttagacgtgcccatttggtgctgcaagtactgaccattactacaacatcttacagtcaacaaatttgacacattaaagatttatatcctttcttttgggttaggatcttctctcccctaaagcatctcagtttccagcatgcaatcatttccatcttatggaaatcagccatcccgctccgtgccagcatgctaccctgggaggcacatccaggcttgggaaacgggggtgtcctggatctcatgactccagcagcaccagctgctctctttcctcttccaagtagacttccgttccccccccacttgggtgtttttgtttgttttagcaattcagagctcaagataaagaccttaaagataactttgtgtgtctctccctttctaggtatttgcataggaatcagaggagttaatcttgtttgaatcttcagacaaacttctgggaggactcggtccctgcctcgcagcagatgttccctgtcactcagtagccaatccgggggacccaggacatgccccagctatagtgatgcagattacctttctgctcctgaatcgcacctgtgcctcagactttctcccctcagcttgagactgcatgtaaactgggatgtgtgaaagcaggaagcaaagctagtgacagctgagaggtccatgtctgggtagaaccaggcccacgatgctgcctctcccgtggtctggagttcagctgcagggactctgctgatgtgcccagcaccatcgttctgtttgtgcttaaatggcacagcatttggtcagcacatctgaaaaggaaggtgtgagaagcaaagcccatggccacgttcccctgccagttatgtggcaagacgttcctcaccctggagaagttcacgattcacaattattcccactccagggagcggccgtacaagtgtgtgcagcctgactgtggcaaagcctttgtttccagatataaattgatgaggcatatggctacccattctccccagaaatctcaccagtgtgctcactgtgagaagacgttcaaccggaaagaccacctgaaaaaccacctccagacccacgaccccaacaaaatggcctttgggtgtgaggagtgtgggaagaagtacaacaccatgctgggctataagaggcacctggccctccatgcggccagcagtggggacctcacctgtggggtctgtgccctggagctagggagcaccgaggtgctactggaccacctcaaagcccatgcggaagagaagccccctagcggaaccaaggaaaagaagcaccagtgcgaccactgtgaaagatgcttctacacccggaaggatgtgcgacgccacctggtggtccacacaggatgcaaggacttcctgtgccagttctgtgcccagagatttgggcgcaaggatcacctcacccggcataccaagaagacccactcacaggagctgatgaaagagagcttgcagaccggagaccttctgagcaccttccacaccatctcgccttcattccaactgaaggctgctgccttgcctcctttccctttaggagcttctgcccagaacgggcttgcaagtagcttgccagctgaggtccatagcctcaccctcagtcccccagaacaagccgcccagcctatgcagccgctgccagagtccctggcctccctccacccctcggtatcccctggctctcctccgccaccccttcccaatcacaagtacaacaccacttctacctcatactccccacttgcaagcctgcccctcaaagcagatactaaaggtttttgcaatatcagtttgtttgaggacttgcctctgcaagagcctcagtcacctcaaaagctcaacccaggttttgatctggctaagggaaatgctggtaaagtaaacctgcccaaggagctgcctgcagatgctgtgaacctaacaatacctgcctctctggacctgtcccccctgttgggcttctggcagctgccccctcctgctacccaaaatacctttgggaatagcactcttgccctggggcctggggaatctttgccccacaggttaagctgtctggggcagcagcagcaagaacccccacttgccatgggcactgtgagcctgggccagctccccctgccccccatccctcatgtgttctcagctggcactggctctgccatcctgcctcatttccatcatgcattcagataattgatttttaaagtgtatttttcgtattctggaagatgttttaagaagcattttaaatgtcagttacaatatgagaaagatttggaaaacgagactgggactatggcttattcagtgatgactggcttgagatgataagagaattctcgaactgcatgtattgtgccaatctgtcctgagtgttcatgctttgtaccaaatttaatgaacgcgtgttctgtaatcaaactgcaaatattgtcataaccaacatccaaaatgacggctgctatatataagtgtttgtcatatggaatttaatcgtaagccatgatcataatgttaactaaataactttatgtggcactgcctagtaagggaactatggaaaggtttggatttctccaaatctgggagaattttcaaaataagaaaataacctttatatgatatactatgactaggctgtgtatttcttttcagggatttttctaccttcagggttggatgtagtttagttactattaccatagccaacctgtagttttacatatacattttcttgtggagcaatagagttctccattttacagaagcattttaaatgtagtttgaatattttccacaagatgctgcaatgtgagttatcacttcatttatcttaaagaaagactaaactggttgtcagttacatctgacagaaaaaaaaaaaaaatcactgtgtaaccaggttaagtggtaaaataatccaggcgtcagtcaaaggcattttgctgactttaatattgattatatttttaacaggaatttaagaaaatattactggaattaaaaatatatatatattaaacaagaattttctttgctctgtctagcttaaactactactcaagctgcttaagttcttaagtattgtttgtaatcaccaataaataagtgcatttgtaattcatcagtcattattagcttttattaaaagaagattacgttttacaatgtaactataatctcttgaatttggtatcttattaatgagttttaaagatgtaaaacctaaccttttttaaagctccattgtcttatgtttttagaggcttttccgtaaacatatatcttacatataataaacttttcaaatcttgcaa

SEQ ID NO: 22778 - DNA, 2800 bp, Homo sapiens
  source 1..2800: mol_type = unassigned DNA
tgaataaatcacttaggcgagatataaattggctttgttccatagcagatttgcctttgtactagttaagaaaatcctgaaaagctttccctgtaagaggatcagttggttggaatagccttggtaggaagaagccaagtttgataattacttggtgaacggaaatgctggtttccaaatgctcatcagggttcagtggcacaaagctggctgtagacttggcttctgtagatttggtaaaaacgtaaattcctggggtcccagtgatgctgttttagtctgtactgatttgccctgtggccacccaggaatctgtatttttaaaagttttccatgctgattctaatgcatagccaggtttagtaaccatttaattcagtattcaacttagagacttcaaccttcttgcactgcaaatttgataaatctttgtttatatgaatctcctttgttgagtgccaactggttatttgctgactttctttcaattcagaatttgttttaggttctgttattgcatagatttgcatacctgttttatggtattttaatactgttggttttaaaaaataccatttcctctgagtgctgttctgaatatattatgtaagcaattttgtgtgttcttttttttccacttgcataaagcaggggaaaagttgagagtttttcttaatccagttgcaagtaggacaaaggatatgagtgtttaaagatcatctattaaaatgcatgaaaaaacactagaaaatctcctgtgcacatcgccagtcgtgtgtgtgctctagaagtgaagttcagggggtaacataatggaggaatgttttcctagcttcattccctgacgatgtacaaggtctcttctcacaggtttgaatcttcagacaaacttctgggaggactcggtccctgcctcgcagcagatgttccctgtcactcagtagccaatccgggggacccaggacatgccccagctatagtgatgcagattacctttctgctcctgaatcgcacctgtgcctcagactttctcccctcagcttgagactgcatgtaaactgggatgtgtgaaagcaggaagcaaagctagtgacagctgagaggtccatgtctgggtagaaccaggcccacgatgctgcctctcccgtggtctggagttcagctgcagggactctgctgatgtgcccagcaccatcgttctgtttgtgcttaaatggcacagcatttggtcagcacatctgaaaaggaaggtgtgagaagcaaagcccatggccacgttcccctgccagttatgtggcaagacgttcctcaccctggagaagttcacgattcacaattattcccactccagggagcggccgtacaagtgtgtgcagcctgactgtggcaaagcctttgtttccagatataaattgatgaggcatatggctacccattctccccagaaatctcaccagtgtgctcactgtgagaagacgttcaaccggaaagaccacctgaaaaaccacctccagacccacgaccccaacaaaatggcctttgggtgtgaggagtgtgggaagaagtacaacaccatgctgggctataagaggcacctggccctccatgcggccagcagtggggacctcacctgtggggtctgtgccctggagctagggagcaccgaggtgctactggaccacctcaaagcccatgcggaagagaagccccctagcggaaccaaggaaaagaagcaccagtgcgaccactgtgaaagatgcttctacacccggaaggatgtgcgacgccacctggtggtccacacaggatgcaaggacttcctgtgccagttctgtgcccagagatttgggcgcaaggatcacctcacccggcataccaagaagacccactcacaggagctgatgaaagagagcttgcagaccggagaccttctgagcaccttccacaccatctcgccttcattccaactgaaggctgctgccttgcctcctttccctttaggagcttctgcccagaacgggcttgcaagtagcttgccagctgaggtccatagcctcaccctcagtcccccagaacaagccgcccagcctatgcagccgctgccagagtccctggcctccctccacccctcggtatcccctggctctcctccgccaccccttcccaatcacaagtacaacaccacttctacctcatactccccacttgcaagcctgcccctcaaagcagatactaaaggtttttgcaatatcagtttgtttgaggacttgcctctgcaagagcctcagtcacctcaaaagctcaacccaggttttgatctggctaagggaaatgctggtaaagtaaacctgcccaaggagctgcctgcagatgctgtgaacctaacaatacctgcctctctggacctgtcccccctgttgggcttctggcagctgccccctcctgctacccaaaatacctttgggaatagcactcttgccctggggcctggggaatctttgccccacaggttaagctgtctggggcagcagcagcaagaacccccacttgccatgggcactgtgagcctgggccagctccccctgccccccatccctcatgtgttctcagctggcactggctctgccatcctgcctcatttccatcatgcattcagataattgatttttaaagtgtatttttcgtattctggaagatgttttaagaagcattttaaatgtcagttacaatatgagaaagatttggaaaacgagactgggactatggcttattcagtgatgactggcttgagatgataaga

SEQ ID NO: 22779 - DNA, 2496 bp, Homo sapiens
  source 1..2496: mol_type = unassigned DNA
gctcaagataaagaccttaaagataactttgtgtgtctctccctttctaggtatttgcataggaatcagaggagttaatcttgtctcttctcacaggtttgaatcttcagacaaacttctgggaggactcggtccctgcctcgcagcagatgttccctgtcactcagtaggcatatggctacccattctccccagaaatctcaccagtgtgctcactgtgagaagacgttcaaccggaaagaccacctgaaaaaccacctccagacccacgaccccaacaaaatggcctttgggtgtgaggagtgtgggaagaagtacaacaccatgctgggctataagaggcacctggccctccatgcggccagcagtggggacctcacctgtggggtctgtgccctggagctagggagcaccgaggtgctactggaccacctcaaagcccatgcggaagagaagccccctagcggaaccaaggaaaagaagcaccagtgcgaccactgtgaaagatgcttctacacccggaaggatgtgcgacgccacctggtggtccacacaggatgcaaggacttcctgtgccagttctgtgcccagagatttgggcgcaaggatcacctcacccggcataccaagaagacccactcacaggagctgatgaaagagagcttgcagaccggagaccttctgagcaccttccacaccatctcgccttcattccaactgaaggctgctgccttgcctcctttccctttaggagcttctgcccagaacgggcttgcaagtagcttgccagctgaggtccatagcctcaccctcagtcccccagaacaagccgcccagcctatgcagccgctgccagagtccctggcctccctccacccctcggtatcccctggctctcctccgccaccccttcccaatcacaagtacaacaccacttctacctcatactccccacttgcaagcctgcccctcaaagcagatactaaaggtttttgcaatatcagtttgtttgaggacttgcctctgcaagagcctcagtcacctcaaaagctcaacccaggttttgatctggctaagggaaatgctggtaaagtaaacctgcccaaggagctgcctgcagatgctgtgaacctaacaatacctgcctctctggacctgtcccccctgttgggcttctggcagctgccccctcctgctacccaaaatacctttgggaatagcactcttgccctggggcctggggaatctttgccccacaggttaagctgtctggggcagcagcagcaagaacccccacttgccatgggcactgtgagcctgggccagctccccctgccccccatccctcatgtgttctcagctggcactggctctgccatcctgcctcatttccatcatgcattcagataattgatttttaaagtgtatttttcgtattctggaagatgttttaagaagcattttaaatgtcagttacaatatgagaaagatttggaaaacgagactgggactatggcttattcagtgatgactggcttgagatgataagagaattctcgaactgcatgtattgtgccaatctgtcctgagtgttcatgctttgtaccaaatttaatgaacgcgtgttctgtaatcaaactgcaaatattgtcataaccaacatccaaaatgacggctgctatatataagtgtttgtcatatggaatttaatcgtaagccatgatcataatgttaactaaataactttatgtggcactgcctagtaagggaactatggaaaggtttggatttctccaaatctgggagaattttcaaaataagaaaataacctttatatgatatactatgactaggctgtgtatttcttttcagggatttttctaccttcagggttggatgtagtttagttactattaccatagccaacctgtagttttacatatacattttcttgtggagcaatagagttctccattttacagaagcattttaaatgtagtttgaatattttccacaagatgctgcaatgtgagttatcacttcatttatcttaaagaaagactaaactggttgtcagttacatctgacagaaaaaaaaaaaaaatcactgtgtaaccaggttaagtggtaaaataatccaggcgtcagtcaaaggcattttgctgactttaatattgattatatttttaacaggaatttaagaaaatattactggaattaaaaatatatatatattaaacaagaattttctttgctctgtctagcttaaactactactcaagctgcttaagttcttaagtattgtttgtaatcaccaataaataagtgcatttgtaattcatcagtcattattagcttttattaaaagaagattacgttttacaatgtaactataatctcttgaatttggtatcttattaatgagttttaaagatgtaaaacctaaccttttttaaagctccattgtcttatgtttttagaggcttttccgtaaac

SEQ ID NO: 22780 - DNA, 2942 bp, Homo sapiens
  source 1..2942: mol_type = unassigned DNA
gagccccgcctgcgcgcggcctcctcggcgcagccatcctcttggctgccgcgggcggcaaagcccacggcatctgccatttgtcattcagcccgtcggtaccgccccgagccttgatttagacacggctggggcgtgctctggcctcactctccgggcgggtgctggacggacggacggacggggcagccgtgctcacagctcagcagcgcggggccttggcgcgcggggcgcttccccgggtcgccgtcatggccgcggaggtggcacgcccgagcggcctcgcctgagctccgggggtcgtcgccccgcagggattgctgtcacgtctaatgtggctgctgcctcgtgtcacatctgaaactcatctgtacctcacttagaaagtggttctgattagacaagacttttcgttgcagtcgacagaaacctaatgggaccattgaagaattccaaacaggtatttgcataggaatcagaggagttaatcttgtctcttctcacaggtttgaatcttcagacaaacttctgggaggactcggtccctgcctcgcagcagatgttccctgtcactcagtaggcatatggctacccattctccccagaaatctcaccagtgtgctcactgtgagaagacgttcaaccggaaagaccacctgaaaaaccacctccagacccacgaccccaacaaaatggcctttgggtgtgaggagtgtgggaagaagtacaacaccatgctgggctataagaggcacctggccctccatgcggccagcagtggggacctcacctgtggggtctgtgccctggagctagggagcaccgaggtgctactggaccacctcaaagcccatgcggaagagaagccccctagcggaaccaaggaaaagaagcaccagtgcgaccactgtgaaagatgcttctacacccggaaggatgtgcgacgccacctggtggtccacacaggatgcaaggacttcctgtgccagttctgtgcccagagatttgggcgcaaggatcacctcacccggcataccaagaagacccactcacaggagctgatgaaagagagcttgcagaccggagaccttctgagcaccttccacaccatctcgccttcattccaactgaaggctgctgccttgcctcctttccctttaggagcttctgcccagaacgggcttgcaagtagcttgccagctgaggtccatagcctcaccctcagtcccccagaacaagccgcccagcctatgcagccgctgccagagtccctggcctccctccacccctcggtatcccctggctctcctccgccaccccttcccaatcacaagtacaacaccacttctacctcatactccccacttgcaagcctgcccctcaaagcagatactaaaggtttttgcaatatcagtttgtttgaggacttgcctctgcaagagcctcagtcacctcaaaagctcaacccaggttttgatctggctaagggaaatgctggtaaagtaaacctgcccaaggagctgcctgcagatgctgtgaacctaacaatacctgcctctctggacctgtcccccctgttgggcttctggcagctgccccctcctgctacccaaaatacctttgggaatagcactcttgccctggggcctggggaatctttgccccacaggttaagctgtctggggcagcagcagcaagaacccccacttgccatgggcactgtgagcctgggccagctccccctgccccccatccctcatgtgttctcagctggcactggctctgccatcctgcctcatttccatcatgcattcagataattgatttttaaagtgtatttttcgtattctggaagatgttttaagaagcattttaaatgtcagttacaatatgagaaagatttggaaaacgagactgggactatggcttattcagtgatgactggcttgagatgataagagaattctcgaactgcatgtattgtgccaatctgtcctgagtgttcatgctttgtaccaaatttaatgaacgcgtgttctgtaatcaaactgcaaatattgtcataaccaacatccaaaatgacggctgctatatataagtgtttgtcatatggaatttaatcgtaagccatgatcataatgttaactaaataactttatgtggcactgcctagtaagggaactatggaaaggtttggatttctccaaatctgggagaattttcaaaataagaaaataacctttatatgatatactatgactaggctgtgtatttcttttcagggatttttctaccttcagggttggatgtagtttagttactattaccatagccaacctgtagttttacatatacattttcttgtggagcaatagagttctccattttacagaagcattttaaatgtagtttgaatattttccacaagatgctgcaatgtgagttatcacttcatttatcttaaagaaagactaaactggttgtcagttacatctgacagaaaaaaaaaaaaaatcactgtgtaaccaggttaagtggtaaaataatccaggcgtcagtcaaaggcattttgctgactttaatattgattatatttttaacaggaatttaagaaaatattactggaattaaaaatatatatatattaaacaagaattttctttgctctgtctagcttaaactactactcaagctgcttaagttcttaagtattgtttgtaatcaccaataaataagtgcatttgtaattcatcagtcattattagcttttattaaaagaagattacgttttacaatgtaactataatctcttgaatttggtatcttattaatgagttttaaagatgtaaaacctaaccttttttaaagctccattgtcttatgtttttagaggcttttccgtaaacatatatcttacatataataaacttttcaaatcttgc

SEQ ID NO: 22781 - DNA, 3404 bp, Homo sapiens
  source 1..3404: mol_type = unassigned DNA
gagccccgcctgcgcgcggcctcctcggcgcagccatcctcttggctgccgcgggcggcaaagcccacggcatctgccatttgtcattcagcccgtcggtaccgccccgagccttgatttagacacggctggggcgtgctctggcctcactctccgggcgggtgctggacggacggacggacggggcagccgtgctcacagctcagcagcgcggggccttggcgcgcggggcgcttccccgggtcgccgtcatggccgcggaggtggcacgcccgagcggcctcgcctgagctccgggggtcgtcgccccgcagggattgctgtcacgtctaatgtggctgctgcctcgtgtcacatctgaaactcatctgtacctcacttagaaagtggttctgattagacaagacttttcgttgcagtcgacagaaacctaatgggaccattgaagaattccaaacaggtatttgcataggaatcagaggagttaatcttgtttgaatcttcagacaaacttctgggaggactcggtccctgcctcgcagcagatgttccctgtcactcagtagccaatccgggggacccaggacatgccccagctatagtgatgcagattacctttctgctcctgaatcgcacctgtgcctcagactttctcccctcagcttgagactgcatgtaaactgggatgtgtgaaagcaggaagcaaagctagtgacagctgagaggtccatgtctgggtagaaccaggcccacgatgctgcctctcccgtggtctggagttcagctgcagggactctgctgatgtgcccagcaccatcgttctgtttgtgcttaaatggcacagcatttggtcagcacatctgaaaaggaaggtgtgagaagcaaagcccatggccacgttcccctgccagttatgtggcaagacgttcctcaccctggagaagttcacgattcacaattattcccactccagggagcggccgtacaagtgtgtgcagcctgactgtggcaaagcctttgtttccagatataaattgatgaggcatatggctacccattctccccagaaatctcaccagtgtgctcactgtgagaagacgttcaaccggaaagaccacctgaaaaaccacctccagacccacgaccccaacaaaatggcctttgggtgtgaggagtgtgggaagaagtacaacaccatgctgggctataagaggcacctggccctccatgcggccagcagtggggacctcacctgtggggtctgtgccctggagctagggagcaccgaggtgctactggaccacctcaaagcccatgcggaagagaagccccctagcggaaccaaggaaaagaagcaccagtgcgaccactgtgaaagatgcttctacacccggaaggatgtgcgacgccacctggtggtccacacaggatgcaaggacttcctgtgccagttctgtgcccagagatttgggcgcaaggatcacctcacccggcataccaagaagacccactcacaggagctgatgaaagagagcttgcagaccggagaccttctgagcaccttccacaccatctcgccttcattccaactgaaggctgctgccttgcctcctttccctttaggagcttctgcccagaacgggcttgcaagtagcttgccagctgaggtccatagcctcaccctcagtcccccagaacaagccgcccagcctatgcagccgctgccagagtccctggcctccctccacccctcggtatcccctggctctcctccgccaccccttcccaatcacaagtacaacaccacttctacctcatactccccacttgcaagcctgcccctcaaagcagatactaaaggtttttgcaatatcagtttgtttgaggacttgcctctgcaagagcctcagtcacctcaaaagctcaacccaggttttgatctggctaagggaaatgctggtaaagtaaacctgcccaaggagctgcctgcagatgctgtgaacctaacaatacctgcctctctggacctgtcccccctgttgggcttctggcagctgccccctcctgctacccaaaatacctttgggaatagcactcttgccctggggcctggggaatctttgccccacaggttaagctgtctggggcagcagcagcaagaacccccacttgccatgggcactgtgagcctgggccagctccccctgccccccatccctcatgtgttctcagctggcactggctctgccatcctgcctcatttccatcatgcattcagataattgatttttaaagtgtatttttcgtattctggaagatgttttaagaagcattttaaatgtcagttacaatatgagaaagatttggaaaacgagactgggactatggcttattcagtgatgactggcttgagatgataagagaattctcgaactgcatgtattgtgccaatctgtcctgagtgttcatgctttgtaccaaatttaatgaacgcgtgttctgtaatcaaactgcaaatattgtcataaccaacatccaaaatgacggctgctatatataagtgtttgtcatatggaatttaatcgtaagccatgatcataatgttaactaaataactttatgtggcactgcctagtaagggaactatggaaaggtttggatttctccaaatctgggagaattttcaaaataagaaaataacctttatatgatatactatgactaggctgtgtatttcttttcagggatttttctaccttcagggttggatgtagtttagttactattaccatagccaacctgtagttttacatatacattttcttgtggagcaatagagttctccattttacagaagcattttaaatgtagtttgaatattttccacaagatgctgcaatgtgagttatcacttcatttatcttaaagaaagactaaactggttgtcagttacatctgacagaaaaaaaaaaaaaatcactgtgtaaccaggttaagtggtaaaataatccaggcgtcagtcaaaggcattttgctgactttaatattgattatatttttaacaggaatttaagaaaatattactggaattaaaaatatatatatattaaacaagaattttctttgctctgtctagcttaaactactactcaagctgcttaagttcttaagtattgtttgtaatcaccaataaataagtgcatttgtaattcatcagtcattattagcttttattaaaagaagattacgttttacaatgtaactataatctcttgaatttggtatcttattaatgagttttaaagatgtaaaacctaaccttttttaaagctccattgtcttatgtttttagaggcttttccgtaaacatatatcttacatataataaacttttcaaatcttgc

SEQ ID NO: 22782 - DNA, 3371 bp, Homo sapiens
  source 1..3371: mol_type = unassigned DNA
gagccccgcctgcgcgcggcctcctcggcgcagccatcctcttggctgccgcgggcggcaaagcccacggcatctgccatttgtcattcagcccgtcggtaccgccccgagccttgatttagacacggctggggcgtgctctggcctcactctccgggcgggtgctggacggacggacggacggggcagccgtgctcacagctcagcagcgcggggccttggcgcgcggggcgcttccccgggtcgccgtcatggccgcggaggtggcacgcccgagcggcctcgcctgagctccgggggtcgtcgccccgcaggattgttcctgcctgattcataaacatcgtgattggcttttgattgctgtcacgtctaatgtggctgctgcctcgtgtcacatctgaaactcatctgtacctcacttagaaaggtatttgcataggaatcagaggagttaatcttgtttgaatcttcagacaaacttctgggaggactcggtccctgcctcgcagcagatgttccctgtcactcagtagccaatccgggggacccaggacatgccccagctatagtgatgcagattacctttctgctcctgaatcgcacctgtgcctcagactttctcccctcagcttgagactgcatgtaaactgggatgtgtgaaagcaggaagcaaagctagtgacagctgagaggtccatgtctgggtagaaccaggcccacgatgctgcctctcccgtggtctggagttcagctgcagggactctgctgatgtgcccagcaccatcgttctgtttgtgcttaaatggcacagcatttggtcagcacatctgaaaaggaaggtgtgagaagcaaagcccatggccacgttcccctgccagttatgtggcaagacgttcctcaccctggagaagttcacgattcacaattattcccactccagggagcggccgtacaagtgtgtgcagcctgactgtggcaaagcctttgtttccagatataaattgatgaggcatatggctacccattctccccagaaatctcaccagtgtgctcactgtgagaagacgttcaaccggaaagaccacctgaaaaaccacctccagacccacgaccccaacaaaatggcctttgggtgtgaggagtgtgggaagaagtacaacaccatgctgggctataagaggcacctggccctccatgcggccagcagtggggacctcacctgtggggtctgtgccctggagctagggagcaccgaggtgctactggaccacctcaaagcccatgcggaagagaagccccctagcggaaccaaggaaaagaagcaccagtgcgaccactgtgaaagatgcttctacacccggaaggatgtgcgacgccacctggtggtccacacaggatgcaaggacttcctgtgccagttctgtgcccagagatttgggcgcaaggatcacctcacccggcataccaagaagacccactcacaggagctgatgaaagagagcttgcagaccggagaccttctgagcaccttccacaccatctcgccttcattccaactgaaggctgctgccttgcctcctttccctttaggagcttctgcccagaacgggcttgcaagtagcttgccagctgaggtccatagcctcaccctcagtcccccagaacaagccgcccagcctatgcagccgctgccagagtccctggcctccctccacccctcggtatcccctggctctcctccgccaccccttcccaatcacaagtacaacaccacttctacctcatactccccacttgcaagcctgcccctcaaagcagatactaaaggtttttgcaatatcagtttgtttgaggacttgcctctgcaagagcctcagtcacctcaaaagctcaacccaggttttgatctggctaagggaaatgctggtaaagtaaacctgcccaaggagctgcctgcagatgctgtgaacctaacaatacctgcctctctggacctgtcccccctgttgggcttctggcagctgccccctcctgctacccaaaatacctttgggaatagcactcttgccctggggcctggggaatctttgccccacaggttaagctgtctggggcagcagcagcaagaacccccacttgccatgggcactgtgagcctgggccagctccccctgccccccatccctcatgtgttctcagctggcactggctctgccatcctgcctcatttccatcatgcattcagataattgatttttaaagtgtatttttcgtattctggaagatgttttaagaagcattttaaatgtcagttacaatatgagaaagatttggaaaacgagactgggactatggcttattcagtgatgactggcttgagatgataagagaattctcgaactgcatgtattgtgccaatctgtcctgagtgttcatgctttgtaccaaatttaatgaacgcgtgttctgtaatcaaactgcaaatattgtcataaccaacatccaaaatgacggctgctatatataagtgtttgtcatatggaatttaatcgtaagccatgatcataatgttaactaaataactttatgtggcactgcctagtaagggaactatggaaaggtttggatttctccaaatctgggagaattttcaaaataagaaaataacctttatatgatatactatgactaggctgtgtatttcttttcagggatttttctaccttcagggttggatgtagtttagttactattaccatagccaacctgtagttttacatatacattttcttgtggagcaatagagttctccattttacagaagcattttaaatgtagtttgaatattttccacaagatgctgcaatgtgagttatcacttcatttatcttaaagaaagactaaactggttgtcagttacatctgacagaaaaaaaaaaaaaatcactgtgtaaccaggttaagtggtaaaataatccaggcgtcagtcaaaggcattttgctgactttaatattgattatatttttaacaggaatttaagaaaatattactggaattaaaaatatatatatattaaacaagaattttctttgctctgtctagcttaaactactactcaagctgcttaagttcttaagtattgtttgtaatcaccaataaataagtgcatttgtaattcatcagtcattattagcttttattaaaagaagattacgttttacaatgtaactataatctcttgaatttggtatcttattaatgagttttaaagatgtaaaacctaaccttttttaaagctccattgtcttatgtttttagaggcttttccgtaaacatatatcttacatataataaacttttcaaatcttgc

SEQ ID NO: 22783 - DNA, 904 bp, Homo sapiens
  source 1..904: mol_type = unassigned DNA
ggacggacggggcagccgtgctcacagctcagcagcgcggggccttggcgcgcggggcgcttccccgggtcgccgtcatggccgcggaggtggcacgcccgagcggcctcgcctgagctccgggggtcgtcgccccgcagattgctgtcacgtctaatgtggctgctgcctcgtgtcacatctgaaactcatctgtacctcacttagaaagacttttcgttgcagtcgacagaaacctaatgggaccattgaagaattccaaacaggtatttgcataggaatcagaggagttaatcttgtttgaatcttcagacaaacttctgggaggactcggtccctgcctcgcagcagatgttccctgtcactcagtaggcatatggctacccattctccccagaaatctcaccagtgtgctcactgtgagaagacgttcaaccggaaagaccacctgaaaaaccacctccagacccacgaccccaacaaaatggcctttgggtgtgaggagtgtgggaagaagtacaacaccatgctgggctataagaggcacctggccctccatgcggccagcagtggggacctcacctgtggggtctgtgccctggagctagggagcaccgaggtgctactggaccacctcaaagcccatgcggaagagaagccccctagcggaaccaaggaaaagaagcaccagtgcgaccactgtgaaagatgcttctacacccggaaggatgtgcgacgccacctggtggtccacacaggatgcaaggacttcctgtgccagttctgtgcccagagatttgggcgcaaggatcacctcacccggcataccaagaagacccactcacaggagctgatgaaagagagcttgcagaccggagaccttctgagcaccttccacaccatc

SEQ ID NO: 22784 - DNA, 3418 bp, Homo sapiens
  source 1..3418: mol_type = unassigned DNA
gagccccgcctgcgcgcggcctcctcggcgcagccatcctcttggctgccgcgggcggcaaagcccacggcatctgccatttgtcattcagcccgtcggtaccgccccgagccttgatttagacacggctggggcgtgctctggcctcactctccgggcgggtgctggacggacggacggacggggcagccgtgctcacagctcagcagcgcggggccttggcgcgcggggcgcttccccgggtcgccgtcatggccgcggaggtggcacgcccgagcggcctcgcctgagctccgggggtcgtcgccccgcagggattgctgtcacgtctaatgtggctgctgcctcgtgtcacatctgaaactcatctgtacctcacttagaaagtggttctgattagacaagacttttcgttgcagtcgacagaaacctaatgggaccattgaagaattccaaacaggtatttgcataggaatcagaggagttaatcttgtctcttctcacaggtttgaatcttcagacaaacttctgggaggactcggtccctgcctcgcagcagatgttccctgtcactcagtagccaatccgggggacccaggacatgccccagctatagtgatgcagattacctttctgctcctgaatcgcacctgtgcctcagactttctcccctcagcttgagactgcatgtaaactgggatgtgtgaaagcaggaagcaaagctagtgacagctgagaggtccatgtctgggtagaaccaggcccacgatgctgcctctcccgtggtctggagttcagctgcagggactctgctgatgtgcccagcaccatcgttctgtttgtgcttaaatggcacagcatttggtcagcacatctgaaaaggaaggtgtgagaagcaaagcccatggccacgttcccctgccagttatgtggcaagacgttcctcaccctggagaagttcacgattcacaattattcccactccagggagcggccgtacaagtgtgtgcagcctgactgtggcaaagcctttgtttccagatataaattgatgaggcatatggctacccattctccccagaaatctcaccagtgtgctcactgtgagaagacgttcaaccggaaagaccacctgaaaaaccacctccagacccacgaccccaacaaaatggcctttgggtgtgaggagtgtgggaagaagtacaacaccatgctgggctataagaggcacctggccctccatgcggccagcagtggggacctcacctgtggggtctgtgccctggagctagggagcaccgaggtgctactggaccacctcaaagcccatgcggaagagaagccccctagcggaaccaaggaaaagaagcaccagtgcgaccactgtgaaagatgcttctacacccggaaggatgtgcgacgccacctggtggtccacacaggatgcaaggacttcctgtgccagttctgtgcccagagatttgggcgcaaggatcacctcacccggcataccaagaagacccactcacaggagctgatgaaagagagcttgcagaccggagaccttctgagcaccttccacaccatctcgccttcattccaactgaaggctgctgccttgcctcctttccctttaggagcttctgcccagaacgggcttgcaagtagcttgccagctgaggtccatagcctcaccctcagtcccccagaacaagccgcccagcctatgcagccgctgccagagtccctggcctccctccacccctcggtatcccctggctctcctccgccaccccttcccaatcacaagtacaacaccacttctacctcatactccccacttgcaagcctgcccctcaaagcagatactaaaggtttttgcaatatcagtttgtttgaggacttgcctctgcaagagcctcagtcacctcaaaagctcaacccaggttttgatctggctaagggaaatgctggtaaagtaaacctgcccaaggagctgcctgcagatgctgtgaacctaacaatacctgcctctctggacctgtcccccctgttgggcttctggcagctgccccctcctgctacccaaaatacctttgggaatagcactcttgccctggggcctggggaatctttgccccacaggttaagctgtctggggcagcagcagcaagaacccccacttgccatgggcactgtgagcctgggccagctccccctgccccccatccctcatgtgttctcagctggcactggctctgccatcctgcctcatttccatcatgcattcagataattgatttttaaagtgtatttttcgtattctggaagatgttttaagaagcattttaaatgtcagttacaatatgagaaagatttggaaaacgagactgggactatggcttattcagtgatgactggcttgagatgataagagaattctcgaactgcatgtattgtgccaatctgtcctgagtgttcatgctttgtaccaaatttaatgaacgcgtgttctgtaatcaaactgcaaatattgtcataaccaacatccaaaatgacggctgctatatataagtgtttgtcatatggaatttaatcgtaagccatgatcataatgttaactaaataactttatgtggcactgcctagtaagggaactatggaaaggtttggatttctccaaatctgggagaattttcaaaataagaaaataacctttatatgatatactatgactaggctgtgtatttcttttcagggatttttctaccttcagggttggatgtagtttagttactattaccatagccaacctgtagttttacatatacattttcttgtggagcaatagagttctccattttacagaagcattttaaatgtagtttgaatattttccacaagatgctgcaatgtgagttatcacttcatttatcttaaagaaagactaaactggttgtcagttacatctgacagaaaaaaaaaaaaaatcactgtgtaaccaggttaagtggtaaaataatccaggcgtcagtcaaaggcattttgctgactttaatattgattatatttttaacaggaatttaagaaaatattactggaattaaaaatatatatatattaaacaagaattttctttgctctgtctagcttaaactactactcaagctgcttaagttcttaagtattgtttgtaatcaccaataaataagtgcatttgtaattcatcagtcattattagcttttattaaaagaagattacgttttacaatgtaactataatctcttgaatttggtatcttattaatgagttttaaagatgtaaaacctaaccttttttaaagctccattgtcttatgtttttagaggcttttccgtaaacatatatcttacatataataaacttttcaaatcttgc

SEQ ID NO: 22785 - DNA, 2726 bp, Homo sapiens
  source 1..2726: mol_type = unassigned DNA
cttttccgcgccgccgagtcggagctgcgccgcacgcccagcggccgcccggacccgccggccggagctgacccagtgggccacgggctccggactccagaactttccaagcgggggaaacttggcggcgggattgctgtcacgtctaatgtggctgctgcctcgtgtcacatctgaaactcatctgtacctcacttagaaagtcgacagaaacctaatgggaccattgaagaattccaaacaggtatttgcataggaatcagaggagttaatcttgtctcttctcacaggtttgaatcttcagacaaacttctgggaggactcggtccctgcctcgcagcagatgttccctgtcactcagtaggcatatggctacccattctccccagaaatctcaccagtgtgctcactgtgagaagacgttcaaccggaaagaccacctgaaaaaccacctccagacccacgaccccaacaaaatggcctttgggtgtgaggagtgtgggaagaagtacaacaccatgctgggctataagaggcacctggccctccatgcggccagcagtggggacctcacctgtggggtctgtgccctggagctagggagcaccgaggtgctactggaccacctcaaagcccatgcggaagagaagccccctagcggaaccaaggaaaagaagcaccagtgcgaccactgtgaaagatgcttctacacccggaaggatgtgcgacgccacctggtggtccacacaggatgcaaggacttcctgtgccagttctgtgcccagagatttgggcgcaaggatcacctcacccggcataccaagaagacccactcacaggagctgatgaaagagagcttgcagaccggagaccttctgagcaccttccacaccatctcgccttcattccaactgaaggctgctgccttgcctcctttccctttaggagcttctgcccagaacgggcttgcaagtagcttgccagctgaggtccatagcctcaccctcagtcccccagaacaagccgcccagcctatgcagccgctgccagagtccctggcctccctccacccctcggtatcccctggctctcctccgccaccccttcccaatcacaagtacaacaccacttctacctcatactccccacttgcaagcctgcccctcaaagcagatactaaaggtttttgcaatatcagtttgtttgaggacttgcctctgcaagagcctcagtcacctcaaaagctcaacccaggttttgatctggctaagggaaatgctggtaaagtaaacctgcccaaggagctgcctgcagatgctgtgaacctaacaatacctgcctctctggacctgtcccccctgttgggcttctggcagctgccccctcctgctacccaaaatacctttgggaatagcactcttgccctggggcctggggaatctttgccccacaggttaagctgtctggggcagcagcagcaagaacccccacttgccatgggcactgtgagcctgggccagctccccctgccccccatccctcatgtgttctcagctggcactggctctgccatcctgcctcatttccatcatgcattcagataattgatttttaaagtgtatttttcgtattctggaagatgttttaagaagcattttaaatgtcagttacaatatgagaaagatttggaaaacgagactgggactatggcttattcagtgatgactggcttgagatgataagagaattctcgaactgcatgtattgtgccaatctgtcctgagtgttcatgctttgtaccaaatttaatgaacgcgtgttctgtaatcaaactgcaaatattgtcataaccaacatccaaaatgacggctgctatatataagtgtttgtcatatggaatttaatcgtaagccatgatcataatgttaactaaataactttatgtggcactgcctagtaagggaactatggaaaggtttggatttctccaaatctgggagaattttcaaaataagaaaataacctttatatgatatactatgactaggctgtgtatttcttttcagggatttttctaccttcagggttggatgtagtttagttactattaccatagccaacctgtagttttacatatacattttcttgtggagcaatagagttctccattttacagaagcattttaaatgtagtttgaatattttccacaagatgctgcaatgtgagttatcacttcatttatcttaaagaaagactaaactggttgtcagttacatctgacagaaaaaaaaaaaaaatcactgtgtaaccaggttaagtggtaaaataatccaggcgtcagtcaaaggcattttgctgactttaatattgattatatttttaacaggaatttaagaaaatattactggaattaaaaatatatatatattaaacaagaattttctttgctctgtctagcttaaactactactcaagctgcttaagttcttaagtattgtttgtaatcaccaataaataagtgcatttgtaattcatcagtcattattagcttttattaaaagaagattacgttttacaatgtaactataatctcttgaatttggtatcttattaatgagttttaaagatgtaaaacctaaccttttttaaagctccattgtcttatgtttttagaggcttttccgtaaacatatatcttacatataataaacttttcaaatcttgc

SEQ ID NO: 22786 - DNA, 3277 bp, Homo sapiens
  source 1..3277: mol_type = unassigned DNA
cttttccgcgccgccgagtcggagctgcgccgcacgcccagcggccgcccggacccgccggccggagctgacccagtgggccacgggctccggactccagaactttccaagcgggggaaacttggcggcgggtaggtaggaaaggcagattgttcctgcctgattcataaacatcgtgattggcttttgattgctgtcacgtctaatgtggctgctgcctcgtgtcacatctgaaactcatctgtacctcacttagaaagtggttctgattagacaagacttttcgttgcagtcgacagaaacctaatgggaccattgaagaattccaaacaggtatttgcataggaatcagaggagttaatcttgtttgaatcttcagacaaacttctgggaggactcggtccctgcctcgcagcagatgttccctgtcactcagtagccaatccgggggacccaggacatgccccagctatagtgatgcagattacctttctgctcctgaatcgcacctgtgcctcagactttctcccctcagcttgagactgcatgtaaactgggatgtgtgaaagcaggaagcaaagctagtgacagctgagaggtccatgtctgggtagaaccaggcccacgatgctgcctctcccgtggtctggagttcagctgcagggactctgctgatgtgcccagcaccatcgttctgtttgtgcttaaatggcacagcatttggtcagcacatctgaaaaggaaggtgtgagaagcaaagcccatggccacgttcccctgccagttatgtggcaagacgttcctcaccctggagaagttcacgattcacaattattcccactccagggagcggccgtacaagtgtgtgcagcctgactgtggcaaagcctttgtttccagatataaattgatgaggcatatggctacccattctccccagaaatctcaccagtgtgctcactgtgagaagacgttcaaccggaaagaccacctgaaaaaccacctccagacccacgaccccaacaaaatggcctttgggtgtgaggagtgtgggaagaagtacaacaccatgctgggctataagaggcacctggccctccatgcggccagcagtggggacctcacctgtggggtctgtgccctggagctagggagcaccgaggtgctactggaccacctcaaagcccatgcggaagagaagccccctagcggaaccaaggaaaagaagcaccagtgcgaccactgtgaaagatgcttctacacccggaaggatgtgcgacgccacctggtggtccacacaggatgcaaggacttcctgtgccagttctgtgcccagagatttgggcgcaaggatcacctcacccggcataccaagaagacccactcacaggagctgatgaaagagagcttgcagaccggagaccttctgagcaccttccacaccatctcgccttcattccaactgaaggctgctgccttgcctcctttccctttaggagcttctgcccagaacgggcttgcaagtagcttgccagctgaggtccatagcctcaccctcagtcccccagaacaagccgcccagcctatgcagccgctgccagagtccctggcctccctccacccctcggtatcccctggctctcctccgccaccccttcccaatcacaagtacaacaccacttctacctcatactccccacttgcaagcctgcccctcaaagcagatactaaaggtttttgcaatatcagtttgtttgaggacttgcctctgcaagagcctcagtcacctcaaaagctcaacccaggttttgatctggctaagggaaatgctggtaaagtaaacctgcccaaggagctgcctgcagatgctgtgaacctaacaatacctgcctctctggacctgtcccccctgttgggcttctggcagctgccccctcctgctacccaaaatacctttgggaatagcactcttgccctggggcctggggaatctttgccccacaggttaagctgtctggggcagcagcagcaagaacccccacttgccatgggcactgtgagcctgggccagctccccctgccccccatccctcatgtgttctcagctggcactggctctgccatcctgcctcatttccatcatgcattcagataattgatttttaaagtgtatttttcgtattctggaagatgttttaagaagcattttaaatgtcagttacaatatgagaaagatttggaaaacgagactgggactatggcttattcagtgatgactggcttgagatgataagagaattctcgaactgcatgtattgtgccaatctgtcctgagtgttcatgctttgtaccaaatttaatgaacgcgtgttctgtaatcaaactgcaaatattgtcataaccaacatccaaaatgacggctgctatatataagtgtttgtcatatggaatttaatcgtaagccatgatcataatgttaactaaataactttatgtggcactgcctagtaagggaactatggaaaggtttggatttctccaaatctgggagaattttcaaaataagaaaataacctttatatgatatactatgactaggctgtgtatttcttttcagggatttttctaccttcagggttggatgtagtttagttactattaccatagccaacctgtagttttacatatacattttcttgtggagcaatagagttctccattttacagaagcattttaaatgtagtttgaatattttccacaagatgctgcaatgtgagttatcacttcatttatcttaaagaaagactaaactggttgtcagttacatctgacagaaaaaaaaaaaaaatcactgtgtaaccaggttaagtggtaaaataatccaggcgtcagtcaaaggcattttgctgactttaatattgattatatttttaacaggaatttaagaaaatattactggaattaaaaatatatatatattaaacaagaattttctttgctctgtctagcttaaactactactcaagctgcttaagttcttaagtattgtttgtaatcaccaataaataagtgcatttgtaattcatcagtcattattagcttttattaaaagaagattacgttttacaatgtaactataatctcttgaatttggtatcttattaatgagttttaaagatgtaaaacctaaccttttttaaagctccattgtcttatgtttttagaggcttttccgtaaacatatatcttacatataataaacttttcaaatcttgc

SEQ ID NO: 22787 - DNA, 6296 bp, Homo sapiens
  source 1..6296: mol_type = unassigned DNA
tattcttattctctcctcgcattacagcacaaaccagagccttcgcctcctccatggtagaggggcttatgtcccagaaaagactttgtgagagaatttacatttgaggaacttcaggccttgagggggaaaataaggttgggggattaagatgtggacttaatgaaagcctgtttttcactctaaaaattcaagaggacacgctaagaacgatcattgctatttatctgtcttaaattagaaatcatgggcattgtacagttgatttttacttatcatgacttgctcactagaaacttcgtgatctctttctgttatattttaaaaagatgtttttaaatggttttatcttaaagaaatattaggaaaaaaaaaactgaggtagggtccaccatttagaatcagatatctagaatgtaacgtatgttacaattcagagtctctaaaccactctcctaaaatcataatatgagatgattctcagcttgccaaattttctagagttgtgaaataggttatgtcactcaaccagtgtttatttgagggaattcatggttggcagggtccccattatacatcagaagtttttatttcttattttctatcactcatgtaaagattaggatttgtttgaactgcctatttcaagataatgattccaaatcccagccttaaatttcatatctaacatgtttgttgtttttccctgtcccatacattaattctaggttcaaggccatgtcaccctaaagcagccctcacttcttttgcagctgcagtgctgttgcttaaccataactcttggcctctctccagactgtttttttttttttttttttttgcaaaatgtccttgatggtcataatggtgtattttttaaaaattccagttgtttttgtaagttttcttatatcccatcttacattcaattccccctgcaaacctcccactagataaaccacttcccgctctattctttgtcttgagactgacttctaggaaggctgtccacagctgcctcaggccgaaggctaactaggagaatattaggtcgtgtgcttggattcctgttctccaaacgattctaattaaaactagtccactacccccaccaacacgttcagaaggaaaaaaatgtagcagaatccccaaatgccctcatcacttcattataccatttgggtagctttatggcacctgtaggactagttcatgccaggcccatttgtaactgttttctctagttaaacatgatattgccattaacagcacattaaataggattacactgcttaagaatctaggaatttctcaaatatatgagaaaatgtgaaagcacagggataatagaaatttattttataaacacatgctaggagatggaattgtgtcatgatgatccacattaaagaaacatgattgaagtgaatccattatttatactctgactttccattatatatatatattactccaaaagaagttattcatgtttcctaattgtgagcttacccatcgtgtaaaattggccctaacacttattcacaggccacatctacttcgtacatgtactttgcctctgtatgtacacgtgtaacgcataaccgtatatcagctctgcaagatacatagatatccccattttatggtgacggagactgaggcttagagaagttatgcaacttacctaaagttacacaccttccaagcagcagagccagcattcgaacttagacccatctgactccaaagccagtgccctctacactagaccacactgtctttcttaggttggatctaaaaaaatactaccagctggttggttttttaactaactgtaggaacacaacctagtattaagtagagtatgcatgctgcatagtggactgaggtagagtaaaacccattattgtaccacttttaggtaagaaaatgtattatctaaggaatatcattaaaatttccttacttccctccatgaacaaacaaaaaattaaaatgaaagcagtgggggatgaagggaggcggggatcataacataggagtgttaaatattaaaattagaaaagaaaataatttctctatcaatgtttaaaatgctagaaattatgcatgcttatactataacaaagaatactttatttggggaataacttaattgatccatgatgtggcatttaccaaggtaatttttccctttttgttccagcagtaggaattagaggtggttcataaaacacacaatcaccatgtaaattgaaaccgcattaagatcatagtcatcttatgttgtttccctaaaatggttctcatttgccccacatattcaaatcagagtgcacaaagatgttgtgctgagtcagggaagatttagaatgctctgtgaacagttttatactgaacttcagagttcagttattgtacttattttttggtgtgtgtgtgtgcacagttgggttttttgtttgttttgctatttgaattactgtttggccattttaatgtatataactgataaatccaggaggataatctgtatgtctgctctctcagtttctttctataacacaagcctgaacatattgctctcctgattaacaactttcagtggttctgattagacaagacttttcgttgcagtcgacagaaacctaatgggaccattgaagaattccaaacaggcaagtgacaggaacatatttgcatgttagaagaatcagcctggcagcagcattgtgattagaatgaaggggaaccgtccaaaaacagactggggaaccaatatggatctgcctctagcatgcggaaatatctctctacactgacctaactgactcactaagcttgtggtttgtttaaaggaagccacatgaaaattgagtttgggccaatagagtgaactcgttctccattctctagcatccctccccatgcaaccaccctatccctgccaagtttctgggcaccacagattggaaagtagcctcctgtaggtatttgcccatgttaagtggtggggtctctttctgtcttcccttcttggtctcacctgtctggtgtgacaagggaagcatgtgccaaccaaggctagacccttgtgagaccagagcagccccactttcggtaaagcaagcaacctctgcttacttgcccaacacaccctagcttccgtgttccttgccttgtgagttatcttcttgggtacaatttaacacagcgttcccacctccttataactaaaatagctagagggggctttgtgcctcaaaccccaaggagaccatcttggcaatctctgcctctgcaacagggcacttgctccctgggcaactcctttcccaggtcatcttctcccttgacatgcccatcagatttaatagtgtgcctatttggcagaaaaatggggtcccttggttgctgattcttaggaatgtgaggttctcccagccagagctctcagcactaaaagttctagtctctgcgtaatggccggcatatctttggcgtatctaaaatcctcttcagtttccagcagggtctttataagcttcttctgaaggtctcagacattcagccacggaactcaagtggaatttgtttggataacgtgactgatttcaaagcccggaccccttagacgtgcccatttggtgctgcaagtactgaccattactacaacatcttacagtcaacaaatttgacacattaaagatttatatcctttcttttgggttaggatcttctctcccctaaagcatctcagtttccagcatgcaatcatttccatcttatggaaatcagccatcccgctccgtgccagcatgctaccctgggaggcacatccaggcttgggaaacgggggtgtcctggatctcatgactccagcagcaccagctgctctctttcctcttccaagtagacttccgttccccccccacttgggtgtttttgtttgttttagcaattcagagctcaagataaagaccttaaagataactttgtgtgtctctccctttctaggtatttgcataggaatcagaggagttaatcttgcatatggctacccattctccccagaaatctcaccagtgtgctcactgtgagaagacgttcaaccggaaagaccacctgaaaaaccacctccagacccacgaccccaacaaaatggcctttgggtgtgaggagtgtgggaagaagtacaacaccatgcggaagagaagccccctagcggaaccaaggaaaagaagcaccagtgcgaccactgtgaaagatgcttctacacccggaaggatgtgcgacgccacctggtggtccacacaggatgcaaggacttcctgtgccagttctgtgcccagagatttgggcgcaaggatcacctcacccggcataccaagaagacccactcacaggagctgatgaaagagagcttgcagaccggagaccttctgagcaccttccacaccatctcgccttcattccaactgaaggctgctgccttgcctcctttccctttaggagcttctgcccagaacgggcttgcaagtagcttgccagctgaggtccatagcctcaccctcagtcccccagaacaagccgcccagcctatgcagccgctgccagagtccctggcctccctccacccctcggtatcccctggctctcctccgccaccccttcccaatcacaagtacaacaccacttctacctcatactccccacttgcaagcctgcccctcaaagcagatactaaaggtttttgcaatatcagtttgtttgaggacttgcctctgcaagagcctcagtcacctcaaaagctcaacccaggttttgatctggctaagggaaatgctggtaaagtaaacctgcccaaggagctgcctgcagatgctgtgaacctaacaatacctgcctctctggacctgtcccccctgttgggcttctggcagctgccccctcctgctacccaaaatacctttgggaatagcactcttgccctggggcctggggaatctttgccccacaggttaagctgtctggggcagcagcagcaagaacccccacttgccatgggcactgtgagcctgggccagctccccctgccccccatccctcatgtgttctcagctggcactggctctgccatcctgcctcatttccatcatgcattcagataattgatttttaaagtgtatttttcgtattctggaagatgttttaagaagcattttaaatgtcagttacaatatgagaaagatttggaaaacgagactgggactatggcttattcagtgatgactggcttgagatgataagagaattctcgaactgcatgtattgtgccaatctgtcctgagtgttcatgctttgtaccaaatttaatgaacgcgtgttctgtaatcaaactgcaaatattgtcataaccaacatccaaaatgacggctgctatatataagtgtttgtcatatggaatttaatcgtaagccatgatcataatgttaactaaataactttatgtggcactgcctagtaagggaactatggaaaggtttggatttctccaaatctgggagaattttcaaaataagaaaataacctttatatgatatactatgactaggctgtgtatttcttttcagggatttttctaccttcagggttggatgtagtttagttactattaccatagccaacctgtagttttacatatacattttcttgtggagcaatagagttctccattttacagaagcattttaaatgtagtttgaatattttccacaagatgctgcaatgtgagttatcacttcatttatcttaaagaaagactaaactggttgtcagttacatctgacagaaaaaaaaaaaaaatcactgtgtaaccaggttaagtggtaaaataatccaggcgtcagtcaaaggcattttgctgactttaatattgattatatttttaacaggaatttaagaaaatattactggaattaaaaatatatatatattaaacaagaattttctttgctctgtctagcttaaactactactcaagctgcttaagttcttaagtattgtttgtaatcaccaataaataagtgcatttgtaattcatcagtcattattagcttttattaaaagaagattacgttttacaatgtaactataatctcttgaatttggtatcttattaatgagttttaaagatgtaaaacctaaccttttttaaagctccattgtcttatgtttttagaggcttttccgtaaacatatatcttacatataataaacttttcaaatcttgc

SEQ ID NO: 22788 - DNA, 5705 bp, Homo sapiens
  source 1..5705: mol_type = unassigned DNA
cgcggcaccgccccctccacgacccgagcgcccgctcgcgcggctcccacaatgcaccgcacaatggcccgaccgccgccactaccggggcctgagggggcctggcggagcccgagcgcggcccggcccgcagcgtggggccccgagcgcggtgaagagattgttttctgaaagctgcgttggaggctgtgacagagctgagagcctgtgtggagcggatggggaggctttctcaataacatggccctttgccattagccttgccatgaccacatttttcaccagcgtccccccctggattcaagatgcaaagcaggaggaggaagtgggctggaaactagttcccaggcctcggggccgggaggcggagagtcaagtgaagtgccaatgtgaaatttcgggaacacctttctcaaatggggagaagctgaggcctcacagcctcccgcaaccagagcagagaccatatagctgccctcagctgcactgtggcaaggcttttgcttccaaatacaagctgtataggcacatggccacccactcagcccagaaaccccaccagtgtatgtactgtgataagatgtttcaccgcaaggaccatctgcggaaccatctgcagacccatgatcctaacaaagaggccctccactgctctgagtgcggtaagaattacaatacgaagctgggctaccggcgccacctggccatgcatgctgccagcagcggtgacctcagctgcaaggtgtgcctgcagacctttgagagtacccaggccctgctagagcacctgaaggcccactcacgccgggtagcaggcggtgccaaggagaagaagcacccctgtgaccactgcgaccggcggttctatactcgtaaggatgtacggcggcacctagtggtgcacacaggccgtaaggacttcctgtgccagtactgtgcccagcggtttggccgtaaggaccacctgacgcgtcatgtcaagaagagccactcgcaggagctgctcaagatcaagacagagcccgtggacatgttaggcctactcagctgcagctccacagtcagtgtgaaggaagagctgagccctgtgctgtgcatggcctctcgggacgtaatggggaccaaggccttccctggcatgttgcccatgggcatgtatggtgcccacatccctaccatgcccagcacgggcgtgccacactccctggtgcacaacacgctgcccatgggtatgagctaccctctggaatcctcacctatctcttccccagctcagctccctccaaaataccagcttggatctacctcatacttgcccgacaaattgcccaaagtggaggtggatagttttctggcggagcttcctggaagcctgtctctctcatccgctgaaccccagcccgcctcacctcagccggcggcagctgcggccctcctagatgaagcactgcttgccaagagccccgccaacctctctgaggccctctgcgctgctaatgtggacttctcccacctactgggctttcttccactcaacctgcccccgtgtaacccacctggggccacaggaggcctggtcatgggctactcccaggctgaggcacagcccctgcttaccactttgcaagctcagcctcaagattccccaggagctgggggaccactgaactttgggcctctgcactccttgcctcctgtcttcacgtctggcctgagtagcaccaccctgcctcgtttccatcaagcattccagtagcccccacagaggccctcagctcagtttttggctctgttatggagccttagtacccaccccgtctgtgtcccccatgaaggcagctgagctttcagagctgggttcaaaaaaaaaaattccagtgtctgtatacaggagcacttggtttgggggttcaggctctaggatcgattccagaaggagccttgagccccaaccccgtgaaaagatctcataccgtaggacttcaggtattatttacttttatttttttgacctgaatcgggagccacacttggccctcttcctctccaaagcgccagaacctccttctctttggagaatggggaggcctcttggagacacagagggtttcaccttggatgacctctagagaaattgcccaagaagcccaccttctggtcccaacctgcagaccccacagcagtcagttggtcaggccctgctgtagaaggtcacttggctccattgcctgcttccaaccaatgggcaggagagaaggcctttatttctcgcccacccattcctcctgtaccagcacctccgttttcagtcagtgttgtccagcaacggtaccgtttacacagtcacctcagacacaccatttcacctcccttgccaagctgttagccttagagtgattgcagtgaacactgtttacacaccgtgaatccattcccatcagtccattccagttggcaccagcctgaaccatttggtacctggtgttaactggagtcctgtttacaaggtggagtcggggcttgctgacttctcttcatttgaggtcacatttttcccccgtggggaaataaactgactttggactgcttcagtctctgccatcttccatgactgcatttgttcctgcctgcctcggcggtatccacagaagacaggcaagaggattggagcagttttctcacaggtctgcaattctgtttttctccaagtacattatgaccccctcatccttctcttgaactggagaggggaagaaatgaaaggcatgcccacgtccgtcacctccccatcccctagtccccaccttgaacatcatgagctgttgttattagtcttggaagcagagtctgggttggtgtggatagcaaaggaggaagtctgagcccctcattggtcttcctcccacctgtcccttttccgggaagttgtggaattgttggaagaagagtttgcagaaggttaggaatgggtagatagctaagtcctaatctatgggtacattgttgtgtcccaaaccaaaattttccttatccacaatgtcccttctgtctcttccactttacagtggactcggccactgtgcataggcttctctgctctccatcaaatcacttccactttcctgtgcccccacccccgcctccagttttccgctagtatccggcaaggtttcttgcaacaaatgattagttcttttcttctgactcgtggggctccctgctgcagagagcacagcccttgcctggagcccaggaaccccatccttgcttcatctcagttcttcatgggcttcactcttcccactcacggaagggaggtagctcagggacctccactgtgggacccttgagacgcttccactctgattcagaaacacacttctacctctttactgttaactcttaacagatgcagtcagcagtttctgggcacttctctcagtaggtgcctcatgctgacttctccagtagggtttcaggacaaactaccaaggaattgcctcagcctcctaccagtcctccctcacccaccttctgtctaggttcacttggtttgtcatcaggaactgagcaggtccaggactcagctttctgcttcagcctaagccagtactccttgtttgaggtaaaagccttaaaatttagctccctagctcttgattagaagcaatttggagtaagtgtgttttgatttaggcagggtagcttgggatacctttttaaaaacaccagatattaaaatgtctggcaaggttagaatcagactagatgatttgcttctaaaaattagtttcagtgagtcccagggactaattaaggtttattttaaaaagtgtctaccttggtacgcagccacctcctgcatgctgtgcatgttattgggacttgtattataggtgatggtatgtgagaatccagttgggactcgctgttgccatcctctttgttgtatctggttttcatcactagactcagcaacccttctcaccttaactgccaccttccctacactctcagtttacagaggccactgggcctctggctgcagaatacaaagtcccgggctgttagaggagtcctttcctctctgcctgccctttcctgtccctccctcgaattctctctccccgtaagtgatgctggaaaagtcataggactggcaaagcaactgtttaaaccctttgtaaccggggccttgcccccacctcctgtcttttctccttgccttccccactcctgtgtcctcccatctatcctgtctttcctttcctcctctcagtgtcctcagcacccacaaggaattttcctatcactgtgaactttgctggtacagaggaataatatctgccttcacctttttttttttggaccatagctagccagtcatttcttaaacctcccttcctaaaatctggggggtcggggggaaagaaaaaaaaagccttagtggcctggttgttcaaaggataagaatagctttatcctgcactcagtacccgaactcacttcagtatgcttactgaggccatgagaacctgaggggcatctgcccaggacaggagccatggcatatgacaaagaccaatgagggaccaggaaaaaaagtgatgtcccctttccctgccacctccagcctctgccagcaatgagctgtccccctcccaccctacacagtagctggtcagggctgagtacagtcctgggggtaaggggatgacatgcccaggtgtcagctcaaaggatctctgcatcatcttgaggtgggaggcagggaaaggagcgccaatgaggttccctgcaacccccgccctccagcccaccgcccaaccttttacaaatggcattttcttaattgaaaatccgggaagcaggtgtgattacttttttgctcgtagatattgtcctaagttggaattctcccactgccctaaaactttccctagtagtcctttaaactcccccctccctttttggtagctgttttctccgtcctctctccacctgccctcttatctaggagctgtttgtaagcacgatttttttaacaggttatattgtacaggatcaatattttgctttttaacaaggatatttatgtaataagaaactttgccttaggcaggtgttggccagaaaagtccagattcctctgggatcccaccctggcctctcctggaactctgaacctgctgtggaaggaattggccatgaccttcacctctggagagtagggtctatggcgagggaaaagggtgttcaccatgataacctagtgcctccatagaggggtttggaaaaattccagtccgatttctttgtgtgtcagctgacttccttagctgattgttcccacttgcacctctccacctttggcactagaactcctgagacaccacttctcatgcttctccctccctaccagcggtcaaggctttggagccactcttttgtaactccagattatttaaagagaaaagtacaagacagaaatcttctagcactttgtaaacacagtgaataacctcttggagtatttttggctttatataaaacaaggtttttaattgtaaagtataagtgccattagaaaatgcacagggcatatctttgttaaagtagatttttcaatgttttacagaattacattttcaaaaaaaggtttttataatgaagttgtttattaaaaacttctgaatgatgtgttt

SEQ ID NO: 22789 - DNA, 1614 bp, Homo sapiens
  source 1..1614: mol_type = unassigned DNA
ttgctccgcagggagagactgcccctggagtattctgcttttaataagcttcccaatcagctctcgagtgcaaagcgctctccctccctcgcccagccttcgtcctcctggcccgctcctctcatccctcccattctccatttcccttccgttccctccctgtcagggcgtaattgagtcaaaggcaggatcaggttccccgccttccagtccaaaaatcccgccaagagagccccagagcagaggaaaatccaaagtggagagaggggaagaaagagaccagtgagtcatccgtccagaaggcggggagagcagcagcggcccaagcaggagctgcagcgagccgggtacctggactcagcggtagcaacctcgccccttgcaacaaaggcagactgagcgccagagaggacgtttccaactcaaaaatgcaggctcaacagtaccagcagcagcgtcgaaaatttgcagctgccttcttggcattcattttcatactggcagctgtggatactgctgaagcagggaagaaagagaaaccagaaaaaaaagtgaagaagtctgactgtggagaatggcagtggagtgtgtgtgtgcccaccagtggagactgtgggctgggcacacgggagggcactcggactggagctgagtgcaagcaaaccatgaagacccagagatgtaagatcccctgcaactggaagaagcaatttggcgcggagtgcaaataccagttccaggcctggggagaatgtgacctgaacacagccctgaagaccagaactggaagtctgaagcgagccctgcacaatgccgaatgccagaagactgtcaccatctccaagccctgtggcaaactgaccaagcccaaacctcaagcagaatctaagaagaagaaaaaggaaggcaagaaacaggagaagatgctggattaaaagatgtcacctgtggaacataaaaaggacatcagcaaacaggatcagttaactattgcatttatatgtaccgtaggctttgtattcaaaaattatctatagctaagtacacaataagcaaaaacaaaaagaaaagaaaatttttgtagtagcgttttttaaatgtatactatagtaccagtaggggcttataataaaggactgtaatcttatttaggaagttgacttatagtacatgataaatgatagacaattgaggtaagttttttgaaattatgtgacattttacattaaattttttttacattttttgggcagcaatttaaatgttatgactatgtaaactacttctcttgttaggtaatttttttcacctagatttttttcccaattgagaaaaatatatactaaacaaaatagcaataaaacataatcactctatttgaagaaaatatcttgttttctgccaatagattttttaaaatgtagtcagcaaaatgggggtggggaagcagagcatgtcctagttcaatgttgactttttttttttttaaagaaaagcattaagacataaaattctttcactttggcagaagcatttgttttcttgatgaaattatttttccatctgaggaaaaaaatactaggaaaataaatcaaggtgatgctgaaaaaaaaa

SEQ ID NO: 22790 - DNA, 1673 bp, Homo sapiens
  source 1..1673: mol_type = unassigned DNA
tccggaaggtgctgcacagctgtggcggcgggtactgcgttagtgattagagtttcttccctgccggaggtgggatacacggtagcatcatggtcgaggaggtacagaaacattctgtacacacccttgtgttcaggtcgttgaagaggacccatgacatgtttgtagctgataatggaaaacctgtgcctttagatgaagagagtcacaaacgaaaaatggcaatcaagcttcgtaatgagtatggtcctgtgttgcatatgcctacttcaaaagaaaatcttaaagagaagggtcctcagaatgcaacggattcatatgttcataaacagtaccctgccaatcaaggacaagaagttgaatactttgtggcaggggttgctttgacagcagatactaagatccagagaatgccaagtgaatcagctgcacagtccttagcggtggcattacctttgcagaccaaggctgatgcaaatcgtactgcccctagtggaagtgaataccgacatcctggggcttctgaccgtccacagcctacagcgatgaattcaattgtcatggagactggcaataccaagaactctgcactgatggctaaaaaagcccctacaatgccaaaaccccagtggcacccaccgtggaaactctacagggttatcagtgggcatcttggctgggttcgatgtattgctgtggaacctggaaatcagtggtttgttactggatctgctgacagaactataaagatctgggacttggctagtggcaaattaaaactgtcattgactgggcatattagtactgtgcggggcgtgatagtaagcacaaggagcccatatctgttctcttgtggagaagacaaacaagtgaaatgctgggatctcgaatacaataaggttatacggcattatcatggacatttaagtgcagtgtatggtttggatttgcacccgacaatcgatgtgttggtaacctgtagtcgagattcaactgcacggatttgggatgtgagaactaaagccagtgtacacacattatctggacatacaaatgcagttgctacagtgagatgtcaggctgcagaaccacaaattattacaggaagccatgatactacaattcgattatgggatctggtggctggaaaaacaagagtgacattaacaaatcacaaaaaatcagttagggctgtggttttacatccaagacattacacatttgcatctggttctccagataacataaagcagtggaaattccctgatggaagtttcattcaaaatctttccggtcataatgctattattaacacattgacggtaaattctgatggagtgcttgtatctggagctgacaatggcaccatgcatctttgggactggagaactggctacaattttcagagagttcacgcagctgtgcaacctgggtctttggacagtgaatcaggaatatttgcttgtgcttttgatcagtctgaaagtcgattactaacagctgaagctgataaaaccattaaagtatacagagaggatgacacagccacagaagaaactcatccagtcagctggaaaccagaaattatcaagagaaagagattttaatgaatgtggaattttttctctctctttttttttctttttaattaaaaaaaaaaaagcttggcgttc

SEQ ID NO: 22791 - DNA, 1719 bp, Homo sapiens
  source 1..1719: mol_type = unassigned DNA
atgatttgtgaggtacagaaacattctgtacacacccttgtgttcaggtcgttgaagaggacccatgacatgtttgtagctgataatggaaaacctgtgcctttagatgaagagagtcacaaacgaaaaatggcaatcaagcttcgtaatgagtatggtcctgtgttgcatatgcctacttcaaaagaaaatcttaaagagaagggtcctcagaatgcaacggattcatatgttcataaacagtaccctgccaatcaaggacaagaagttgaatactttgtggcaggtacacatccatacccaccaggacctggggttgctttgacagcagatactaagatccagagaatgccaagtgaatcagctgcacagtccttagcggtggcattacctttgcagaccaaggctgatgcaaatcgtactgcccctagtggaagtgaataccgacatcctggggcttctgaccgtccacagcctacagcgatgaattcaattgtcatggagactggcaataccaagaactctgcactgatggctaaaaaagcccctacaatgccaaaaccccagtggcacccaccgtggaaactctacagggttatcagtgggcatcttggctgggttcgatgtattgctgtggaacctggaaatcagtggtttgttactggatctgctgacagaactataaagatctgggacttggctagtggcaaattaaaactgtcattgactgggcatattagtactgtgcggggcgtgatagtaagcacaaggagcccatatctgttctcttgtggagaagacaaacaagtgaaatgctgggatctcgaatacaataaggttatacggcattatcatggacatttaagtgcagtgtatggtttggatttgcacccgacaatcgatgtgttggtaacctgtagtcgagattcaactgcacggatttgggatgtgagaactaaagccagtgtacacacattatctggacatacaaatgcagttgctacagtgagatgtcaggctgcagaaccacaaattattacaggaagccatgatactacaattcgattatgggatctggtggctggaaaaacaagagtgacattaacaaatcacaaaaaatcagttagggctgtggttttacatccaagacattacacatttgcatctggttctccagataacataaagcagtggaaattccctgatggaagtttcattcaaaatctttccggtcataatgctattattaacacattgacggtaaattctgatggagtgcttgtatctggagctgacaatggcaccatgcatctttgggactggagaactggctacaattttcagagagttcacgcagctgtgcaacctgggtctttggacagtgaatcaggaatatttgcttgtgcttttgatcagtctgaaagtcgattactaacagctgaagctgataaaaccattaaagtatacagagaggatgacacagccacagaagaaactcatccagtcagctggaaaccagaaattatcaagagaaagagattttaatgaatgtggaattttttctctctctttttttttctttttaattaaaaaaaaaaaagcttggcgttcatgaggatatccagtcattttgtgctctggctgggaatataaaggagaaattcacttgcttcaatcattgctgcttcatattttacaataaactgtcccctgtcccct

SEQ ID NO: 22792 - DNA, 3351 bp, Homo sapiens
  source 1..3351: mol_type = unassigned DNA
gcagagcttgcatcacatccgccgcctgggcgcccaattccggaaggtgctgcacagctgtggcggcgggtactgcgttagtgattagagtttcttccctgccggaggtgggatacacggtagcatcatggtcgaggaggtacagaaacattctgtacacacccttgtgttcaggtcgttgaagaggacccatgacatgtttgtagctgataatggaaaacctgtgcctttagatgaagagagtcacaaacgaaaaatggcaatcaagcttcgtaatgagtatggtcctgtgttgcatatgcctacttcaaaagaaaatcttaaagagaagggtcctcagaatgcaacggattcatatgttcataaacagtaccctgccaatcaaggacaagaagttgaatactttgtggcaggtacacatccatacccaccaggacctggggttgctttgacagcagatactaagatccagagaatgccaagtgaatcagctgcacagtccttagcggtggcattacctttgcagaccaaggctgatgcaaatcgtactgcccctagtggaagtgaataccgacatcctggggcttctgaccgtccacagcctacagcgatgaattcaattgtcatggagactggcaataccaagaactctgcactgatggctaaaaaagcccctacaatgccaaaaccccagtggcacccaccgtggaaactctacagggttatcagtgggcatcttggctgggttcgatgtattgctgtggaacctggaaatcagtggtttgttactggatctgctgacagaactataaagatctgggacttggctagtggcaaattaaaactgtcattgactgggcatattagtactgtgcggggcgtgatagtaagcacaaggagcccatatctgttctcttgtggagaagacaaacaagtgaaatgctgggatctcgaatacaataaggttatacggcattatcatggacatttaagtgcagtgtatggtttggatttgcacccgacaatcgatgtgttggtaacctgtagtcgagattcaactgcacggatttgggatgtgagaactaaagccagtgtacacacattatctggacatacaaatgcagttgctacagtgagatgtcaggctgcagaaccacaaattattacaggaagccatgatactacaattcgattatgggatctggtggctggaaaaacaagagtgacattaacaaatcacaaaaaatcagttagggctgtggttttacatccaagacattacacatttgcatctggttctccagataacataaagcagtggaaattccctgatggaagtttcattcaaaatctttccggtcataatgctattattaacacattgacggtaaattctgatggagtgcttgtatctggagctgacaatggcaccatgcatctttgggactggagaactggctacaattttcagagagttcacgcagctgtgcaacctgggtctttggacagtgaatcaggaatatttgcttgtgcttttgatcagtctgaaagtcgattactaacagctgaagctgataaaaccattaaagtatacagagaggatgacacagccacagaagaaactcatccagtcagctggaaaccagaaattatcaagagaaagagattttaatgaatgtggaattttttctctctctttttttttctttttaattaaaaaaaaaaaagcttggcgttcatgaggatatccagtcattttgtgctctggctgggaatataaaggagaaattcacttgcttcaatcattgctgcttcatattttacaataaactgtcccctgtcccctacccctgtgtttttatttctaaaacaatttgtgatactaggaagatgcagatatcaagtaaatgcaggtttattgaacataactattctagatgtaatattttgacagtcttattagaaaacccccttttttaaaaaaaatgtatgaaaccgataattaggacatttgaaggagcagtagtttttttttagtcctttaaaaaataacatctgtgactaataatttgagattaaaagatttgaagtcttaatttatgtatgtttattccaaaaacagtttttgagtgtatgttctacaaagttctgcactagatactgttcaggaaatagacaagtaagatgtgtctatcctctaagacttccagtttggtagcttagtatagaaattctgtaacagaggtgcaggtgaaatgctgggggaacagaagggataagaccatttatttttctcaggaaggattgtggaagacttcatagagtaagtggcattggagattaccttgaagtgaaggaagacaaagaaggaaaagagatgaggcataaagtgatgaaaccaggcacaagaaagtgtgcggtgtgttctgggacaaagaatgttctgctactgtcgaataatgggactaaagctggcttgttctggggaaagctcatataagtatggattttattcctcaactagtaggataccaatactggtattgaaacttggggaaaataactggagataccagtgcagctatttaaagctgtagcaagggctgcaatcttgcggagattttaaagagaagttttaaagtttctaatactgatgcctctttttggtaaatacaagttttataaatcctgccctgggatcctgattccccattaatcaagatttgtcagacttcaccttctataattagaaaacacagttataagaacagtcaattttttaaattttccaaattaaaaaattgcaccatgattttgaacaagcacttccaattacattacccatcttgtatgccataggtgggagtataattgtcacagcctttaggaatgtagttttctgggatttattgaaactttgaaccttttggcctactaagttcattcctaggaaactgcctaatgggaatgatctgacaagtgtacacaagcaaagtcattgcacctttgttctttaatacttaaaactagcccaaatgccctgtcagtaagggactggtttaatagatggtacctttatgcaatttgtttctaagtattcgttaagagagtgaggaatgtctggattattagggcaagatttctaaacttgggtaaaaaaaaaagttgtgcaagcatttttgtggacaacttgatgctctaaaatataagtaacaccacattactaacagtggctttgttaggaagcagaattatggaagaactttcatgggtggctttacatatttctataatgttttaattttctataagcatgtatttcgtaaacttaaataaagaaaaaagaacact

SEQ ID NO: 22793 - DNA, 9066 bp, Homo sapiens
  source 1..9066: mol_type = unassigned DNA
atgccgctgccaccgcggagcctgcaggtgctcctgctgctgctgctgttgctgctgctgctgccgggcatgtgggctgaggcaggcttgcccagggcaggcgggggttcacagccccccttccgcaccttctcggccagcgactggggcctcacccacctagtggtgcatgagcagacaggcgaggtgtatgtgggcgcagtgaaccgcatctataagctgtcggggaacctgacactgctgcgggcccacgtcacgggccctgtggaggacaacgagaagtgctacccgccgcccagcgtgcagtcctgcccccacggcctgggcagtactgacaacgtcaacaagctgctgctgctggactatgccgctaaccgcctgctggcctgtggcagcgcctcccagggcatctgccagttcctgcgtctggacgatctcttcaaactgggtgagccacaccaccgtaaggagcactacctgtccagcgtgcaggaggcaggcagcatggcgggcgtgctcattgccgggccaccgggccagggccaggccaagctcttcgtgggcacacccatcgatggcaagtccgagtacttccccacactgtccagccgtcggctcatggccaacgaggaggatgccgacatgttcggcttcgtgtaccaggatgagtttgtgtcatcacagctcaagatcccttcggacacgctgtccaagttcccggcctttgacatctactatgtgtacagcttccgcagcgagcagtttgtctactacctcacgctgcagctagacacacagctgacctcgcctgatgccgccggcgagcacttcttcacgtccaagatcgtgcggctctgtgtggacgaccccaaattctactcgtacgttgagttccccattggctgcgagcaggcgggtgtggagtaccgcctggtgcaggatgcctacctgagccggcccggccgtgccctggcccaccagctgggcctggctgaggacgaggacgtgctgttcactgtgttcgcccagggccagaagaaccgcgtgaagccaccaaaggagtcagcactgtgcctgttcacgctcagggccatcaaggagaagattaaggagcgcatccagtcctgctaccgtggtgagggcaagctctccctgccgtggctgctcaacaaggagctgggctgcatcaactcgcccctgcagatcgatgacgacttctgcgggcaggacttcaaccagcccctggggggcacagtcaccattgaggggacgcccctgttcgtggacaaggatgatggcctgaccgccgtggctgcctatgactatcggggccgcactgtggtattcgccggcacgcgaagtggccgcatccgcaagatcctggtggacctctcaaaccccggtggccggcctgccctggcctacgagagcgtcgtggcccaggagggcagccccatcctgcgagacctcgtcctcagccccaaccaccagtacctctacgccatgaccgagaagcaggtgacgcgggtgcctgtggagagctgtgtgcagtacacgtcctgtgagctgtgtctggggtcacgggacccccactgtggctggtgtgtcctgcacagcatctgctcgcggcgggacgcctgtgagcgagcagacgagccccagcgctttgctgcggacctgctgcagtgtgtgcagctgactgtgcagccccgcaatgtgtctgtcaccatgtcccaggtcccacttgtgctgcaggcctggaacgtgcctgacctctcagctggcgtcaactgctccttcgaggacttcacggaatctgagagcgtcctggaggatggccggatccactgccgctcaccctccgcccgggaggtggcgcccatcacgcggggccagggagaccagcgggtggtgaaactctacctaaagtccaaggagacagggaagaagtttgcgtctgtggacttcgtcttctacaactgcagcgtccaccagtcctgcctgtcctgtgtcaacggctcctttccctgccactggtgcaaataccgccacgtgtgcacacacaacgtggctgactgcgccttcctggagggccgtgtcaacgtgtctgaggactgcccacagatcctgccctccacgcagatctacgtgccagtgggagtggtaaaacccatcaccctggccgcacggaacctgccacagccacagtcaggccagcgtggatatgagtgcctcttccacatcccgggcagcccggcccgtgtcaccgccctgcgcttcaacagctccagcctgcagtgccagaattcctcgtactcctacgaggggaacgatgtcagcgacctgccagtgaacctgtcagtcgtgtggaacggcaactttgtcattgacaacccacagaacatccaggcgcacctctacaagtgcccggccctgcgcgagagctgcggcctctgcctcaaggccgacccgcgcttcgagtgcggatggtgcgtggccgagcgccgctgctccctgcgacaccactgcgctgccgacacacctgcatcgtggatgcacgcgcgtcacggcagcagtcgctgcaccgaccccaagatcctcaagctgtcccccgagacgggcccgaggcagggcggcacgcggctcactatcacaggcgagaacctgggcctgcgattcgaagacgtgcgtctgggcgtgcgcgtgggcaaggtgctgtgcagccctgtggagagcgagtacatcagtgcggagcagatcgtctgtgagatcggggacgccagctccgtgcgtgcccatgacgccctggtggaggtgtgtgtgcgggactgctcaccacactaccgcgccctgtcacccaagcgcttcaccttcgtgacaccaaccttctaccgtgtgagcccctcccgtgggcctctgtcagggggcacctggattggcatcgagggaagccacctgaacgcaggcagtgatgtggctgtgtcggtcggtggccggccctgctccttctcctggaggaactcccgtgagatccggtgcctgacaccccccgggcagagccctggcagcgctcccatcatcatcaacatcaaccgcgcccagctcaccaaccctgaggtgaagtacaactacaccgaggaccccaccatcctgaggatcgaccccgagtggagcatcaacagcggtgggaccctcctgacggtcacaggcaccaacctggccactgtccgtgaaccccgaatccgggccaagtatggaggcattgagagggagaacggctgcctggtgtacaatgacaccaccatggtatgccgcgccccgtctgtggccaaccctgtgcgcagcccaccagagctgggggagcggccggatgagctgggcttcgtcatggacaacgtgcgctccctgcttgtgctcaactccacctccttcctctactaccctgaccccgtactggagccactcagccccactggcctgctggagctgaagcccagctccccactcatcctcaagggccggaacctcttgccacctgcacccggcaactcccgactcaactacacggtgctcatcggctccacaccctgtaccctcaccgtgtcggagacgcaactgctgtgcgaggcgcccaacctcactgggcagcacaaggtcacggtgcgggcaggtggcttcgagttctcgccagggacactgcaggtgtactcggacagcctgctgacgctgcctgccattgtgggcattggcggaggcgggggtctcctgctgctggtcatcgtggctgtgctcatcgcctacaagcgcaagtcacgagatgctgaccgcacactcaagcggctgcagctccagatggacaacctggagtcccgcgtggccctcgaatgcaaggaagcctttgcagagctgcagacagacatccacgagctgaccaatgacctggacggtgccggcatccccttccttgactaccggacatatgccatgcgggtgctctttcctgggatcgaggaccaccctgtgctcaaggagatggaggtgcaggccaatgtggagaagtcgctgacactgttcgggcagctgctgaccaagaagcacttcctgctgaccttcatccgcacgctggaggcacagcgcagcttctccatgcgcgaccgcgggaatgtggcctcgctcatcatgacggccctgcagggcgagatggaatacgccacaggcgtgctcaagcagctgctttccgacctcatcgagaagaacctggagagcaagaaccaccccaagctgctactgcgccggactgagtcggtggcagagaagatgctaactaactggttcaccttcctcttgtataagttcctcaaggagtgcgctggggagccgctgttcatgctgtactgcgccatcaagcagcagatggagaagggccccattgacgccatcacgggtgaggcacgctactccctgagtgaggacaagctcatccggcagcagattgactacaagacactgaccctgaactgtgtgaaccctgagaatgagaatgcacctgaggtgccggtgaaggggctggactgtgacacggtcacccaggccaaggagaagctgctggacgctgcctacaagggcgtgccctactcccagcggcccaaggccgcggacatggacctggagtggcgccagggccgcatggcgcgcatcatcctgcaggacgaggacgtcaccaccaagattgacaacgattggaagaggctgaacacactggctcactaccaggtgacagacgggtcctcggtggcactggtgcccaagcagacgtccgcctacaacatctccaactcctccaccttcaccaagtccctcagcagatacgagagcatgctgcgcacggccagcagccccgacagcctgcgctcgcgcacgcccatgatcacgcccgacctggagagcggcaccaagctgtggcacctggtgaagaaccacgaccacctggaccagcgtgagggtgaccgcggcagcaagatggtctcggagatctacttgacacggctactggccaccaagggcacactgcagaagtttgtggacgacctgtttgagaccatcttcagcacggcacaccggggctcagccctgccgctggccatcaagtacatgttcgacttcctggatgagcaggccgacaagcaccagatccacgatgctgacgtgcgccacacctggaagagcaactgcctgcccctgcgcttctgggtgaacgtgatcaagaacccacagtttgtgttcgacattcacaagaacagcatcacggacgcctgcttgtcggtggtggcccagaccttcatggactcctgctccacctctgagcacaagctgggcaaggactcaccctccaacaagctgctctacgccaaggacatccccaactacaagagctgggtggagaggtactatgcagacatcgccaagatgccagccatcagcgaccaggacatgagtgcgtatctggctgagcagtcccgcctgcacctgagccagttcaacagcatgagcgccttgcacgagatctactcctacatcaccaagtacaaggatgagatcctggcagccctggagaaggatgagcaggcgcggcggcagcggctgcggagcaagctggagcaggtggtggacacgatggccctgagcagctgagccccagctgtgatcatccagcatgatgcagcgtgaggacagctgagcagggaccgggacagccctcaccgcatgcgtgtggagtgtccggtggtgctcgggccgccgcagtgcagcgactgcccggccctccctcccctgcctcacccggtcgggtcccggctcttcctgtgtggaggtgatggtacctgccacaccacagctgcgcacacagctgcttgctcaggggccgggacagcactgggtgctcaggctggccaaggaccttcattgcctggcaagagctgcccagtggccttcatgggagaagggctgacctctgaggggctgaggggtgaggccagggccctccagggggaggggtagccagcttgggctgtccccttgagaccaggacaagaggctgggggtgtcagcattcccagctttccaagctgcccccaggcggcagagtctgagggtcccggggcccggttggcagctggagaaagaggcaaaaagcccgtagccgggcaagaggagctcaagtcggtctgggcccgttgccaccgactcccacctccagcacccatgcccgctgcaccgctgccatcctcagattcaccgcgtgctctgcgcggccgaggccggagcaccacatccacctcgccccagagaggctctgctccctcctatggaggggctgtgggccaggctgctcagactcctgggtggcttccagacggaccgggcagcccctctccgtcctcagggctgtgcctctgggagccactgggccaggggccccgggtcgcagagagcacgttcccgttatttattcccctccgcgtcctacacaggctgccctggcagctgtcttcaagggtaggctgagctccccaccctggagcccctgagggcggcccctgagcactcctctctctccactctctctgtccctgccccagcggcttccagtgtggcatctcagcagtgtcctggcccctccagagcagtgggacatctggggactgtttttgtgtttaggggaaaaaattctgctgcactctgcttgggccttgaggtctgtggcagggctcctctggcccgcagtggcctggatctatctgggccatgagtgacgggcagtgaccagagggactggaggccagcggtgtccacccttgccctcagcaagagagaatgcattcttaaaagaaagctgtacatgtatatatatgcatatatatatatgtggctctagcctcaggctccagccccagtggggtactgtacagttaactgaagaagaattttaaagacgatttgaacaagaaaatgaaggcagtgggaaagcaatgccaaatggttgtggagaaagtggccggagcctccctggagtggagcagccctgaagcctgtgccccccgacctgcgggccgctgttttggtttgacatgacaaggaaaggacttcctgctgaccctgagagcctctggggtgccgcggcaccacggggcatgcatgattgtgctagcgtttagtctgagttgatctttttaaaactgcaagtgttgaatactagaggttgttagacccttttttatgttttttaattaatcagtcacttgtaaaagcaaacaagcggtccatccccttttcaaggtcacttttttgatggtaccgaagatcccatggacattaagggacagctaactgtggccagactcagccccatgtccttggccaggcccaaggagaggactcggccccatggggtgtgccagtcttgcagtccgccccagctgagtagcgtgagccagatgacgccacagagacccgcctcttccctgaacgcgggtcggtgtggagtcagtgactgctgactcagggagctccttggccccgtgggcactgtgccagggctggggccttctgctgctgccacacccagctcaggcctgggccagcccctgcccccagcccactgagggggtgggcttactccctgggcagtcttgggggccagagctgaggccagtccatattacagtggctgggctgtttttttcagtagcccctagcattggctgggattcctgttcctgggtgcgcctccacctcccttctgatgtttcctggctatggtggggtgggaacctcagtttcccccaaagtcttccctggatgctggcttcaggttgaagtccctggttcttccagttcctcacgggttaggtaggggctcctgcatcaccttcagaatccagttccaacccccactctccttaggccttgtgctctgctctgccctgccaggctgcccttgtccatgtgagtagcatgggcgggtggtggggacggcagtggtgatgaagggggtgcaccacaggcctcatgaagcagttcccacatgggcgtgtggctggggcgtggccaccacagagcacatggctgtgtctaggcgcaagcactttagcagtatctgtttacatgcgcaaggatcaagccgactacctgtgctgtctactgggacagcagtctccgagctactccgtacctccctctgccaggtcgtggagttaggccccagtccctacttgtcactggttcccactgtgctcctaactgtgcagcacctgggagctctggcctggggctggaggccctggtaggagctgcagttggaggccgttctgtgcccagcagcggtgagcggctcccatgggccctgtgtctgcagggagccagggctgcggcacatgtgctgtgaaactggcacccacctggcgtgctgctgccgccacttgcttcctgcagcacctcctaccctgctccgtgtcctccctctccccgcgcctggctcaggagtgctggaaaagctcacgcctcggcctgggagcctggcctcttgatatacctcgagcttcccctgtgctccccagccccaggaccactggccccttggcctgaggggctgggggccccacgacctgcagcgtcgagtccgggagagagcccggagcggcgtgccatctcggctcggccttgctgagagcctccgccctggctttctccctgtctggattcagtggctcacgttggtgctacacagctagaatagatatatttagagagagagatatttttaagacaaagcccacaattagctgtcctttaacaccgcagaaccccctcccagaagaagagcgatccctcggacggtccgggcgggcaccctcagccgggctctttgcagaagcagcaccgctgactgtgggcccggccctcagatgtgtacatatacggctatttcctattttactgttcttcagatttagtacttgtaaataaacacacacattaaggagagattaaacatttttgctaaaagct

SEQ ID NO: 22794 - DNA, 9066 bp, Homo sapiens; identical to SEQ ID NO: 22793
  source 1..9066: mol_type = unassigned DNA

SEQ ID NO: 22795 - DNA, 11444 bp, Homo sapiens
  source 1..11444: mol_type = unassigned DNA
cgccgccgccgccgccaccgcgggagccagagctgccgggaggagcggcatccgcgccagactggagcgggagggcggcggagggcagttgctgggaatttttcagccgagagggcgagcgatccggagagagaccccgagagcttgggagcggtagggcgtgcgagcgccgcagccagcggagcaaacctcgaaatagatctggaaagccaggctcccggaggaaatgggactgtgaacgaaccggagagcaagaagggaaggaagcgccgggattgctgatgtcagaggagcccggaaagtcgcgctggaaaaatctgaagacagccggggctctgcttcttcctcaggagagacaccgccggccgcccccacacgccccctcggcgcctccgggtgccccctgagagccggcgacagcgcccagccgggctgctgcggggcgacggaggactgaggggcgcgcggagcggagaccgaggagcgacttcaggaatacagataagtgtctggtggcttgacgtggattttaatgaatttggactccatgtggatttggtcgtctccctgattccgagctgcgggcagggagaggggcctcgcgccgccctcagcagccggcggcggccgaggtagaccgagcggggacggaaggacagaccgacgtcgccgagctggaatcatgtgagggccaaccggggaaggtggagcagatgagcacacacaggagccgtctcctcaccgccgcccctctcagcatggaacagaggcggccctggccccgggccctggaggtggacagccgctctgtggtcctgctctcagtggtctgggtgctgctggcccccccagcagccggcatgcctcagttcagcaccttccactctgagaatcgtgactggaccttcaaccacttgaccgtccaccaagggacgggggccgtctatgtgggggccatcaaccgggtctataagctgacaggcaacctgaccatccaggtggctcataagacagggccagaagaggacaacaagtcttgttacccgcccctcatcgtgcagccctgcagcgaagtgctcaccctcaccaacaatgtcaacaagctgctcatcattgactactctgagaaccgcctgctggcctgtgggagcctctaccagggggtctgcaagctgctgcggctggatgacctcttcatcctggtggagccatcccacaagaaggagcactacctgtccagtgtcaacaagacgggcaccatgtacggggtgattgtgcgctctgagggtgaggatggcaagctcttcatcggcacggctgtggatgggaagcaggattacttcccgaccctgtccagccggaagctgccccgagaccctgagtcctcagccatgctcgactatgagctacacagcgattttgtctcctctctcatcaagatcccttcagacaccctggccctggtctcccactttgacatcttctacatctacggctttgctagtgggggctttgtctactttctcactgtccagcccgagacccctgagggtgtggccatcaactccgctggagacctcttctacacctcacgcatcgtgcggctctgcaaggatgaccccaagttccactcatacgtgtccctgcccttcggctgcacccgggccggggtggaataccgcctcctgcaggctgcttacctggccaagcctggggactcactggcccaggccttcaatatcaccagccaggacgatgtactctttgccatcttctccaaagggcagaagcagtatcaccacccgcccgatgactctgccctgtgtgccttccctatccgggccatcaacttgcagatcaaggagcgcctgcagtcctgctaccagggcgagggcaacctggagctcaactggctgctggggaaggacgtccagtgcaccaaggcgcctgtccccatcgatgataacttctgtggactggacatcaaccagcccctgggaggctcaactccagtggagggcctgaccctgtacaccaccagcagggaccgcatgacctctgtggcctcctacgtttacaacggctacagcgtggtttttgtggggactaagagtggcaagctgaaaaagattcgggccgacggtcccccccatggtggggtccagtacgagatggtctctgtgctcaaggacggaagccccatcctccgggacatggccttctccattgatcagcgctacctgtacgtcatgtctgagagacaggtcaccagggtccccgtggagtcatgtgagcagtatacgacttgtggggagtgcctgagctctggggaccctcactgtggctggtgtgccctgcacaacatgtgctcccgcagggacaaatgccaacaggcctgggaacctaatcgatttgctgccagcatcagccagtgtgtgagccttgcagtgcatcccagcagcatctcagtatctgagcacagccggttgcttagcctggtagtgagtgatgctcctgatctatctgcgggtatcgcctgtgcctttgggaacctgacagaggtggaggggcaggtgtccgggagccaggtcatctgcatctcacctgggcccaaggatgtccctgtcatcccgctggatcaagactggtttgggctggagctacagctgaggtccaaggagacagggaagatatttgtcagcaccgagttcaagttttacaactgcagtgcccaccaactgtgcctgtcctgtgtcaacagcgccttccgctgccattggtgcaagtaccgcaacctctgcactcatgaccccaccacctgctccttccaggagggccggatcaatatttcagaggactgtccccagctggtgcccacagaggagatcttgattccagtcggggaggtaaagccaatcacccttaaggcgcgaaatctgccccagccgcagtccggccagcgaggctatgagtgtgtcctcaacatacaaggagccatccaccgggtccccgctctgcgcttcaacagctccagcgttcagtgtcagaacagctcgtaccagtatgatggcatggacatcagcaatctggccgtggatttcgctgtggtgtggaacggcaatttcatcattgacaaccctcaggacctgaaagtccatctctacaagtgtgcagcccagcgggagagctgcggcctctgcctcaaggccgaccggaagtttgagtgtggctggtgcagcggcgagcgcaggtgcaccctccaccagcactgtaccagcccttccagcccctggctcgactggtccagccacaatgtcaagtgctccaaccctcaaatcaccgagattttgacggtgtctggaccgccggaaggagggacgcgagtgaccatccatggcgtgaacctgggtctggacttctccgagatcgcccaccatgtgcaggtggctggggtgccctgcacgcccctcccaggggaatacatcatcgctgagcagattgtctgtgagatgggccatgccctcgtgggaaccacctccgggccagtacgcctgtgtattggcgagtgtaagccagagttcatgacgaagtcccatcagcagtacaccttcgtgaacccttctgtgctgtcactcaacccaatccgaggtcccgagtcaggaggcactatggtgaccattaccggccattaccttggggctgggagcagcgtggcagtctacctgggcaaccagacctgcgagttctacgggaggtcaatgagtgagatcgtgtgtgtctcacccccatcatccaatggccttggcccggtccctgtttctgtgagtgtcgaccgagcccatgtggatagcaacctgcagtttgagtacatagatgaccctcgggtccagcgcatcgagccagagtggagcattgccagtggccacacacccctgaccatcacaggcttcaacctggatgtcattcaggagccaaggatccgagtcaaattcaatggcaaagaatctgtcaatgtgtgtaaagttgtgaacacaaccaccctcacctgcctggcaccctctctgaccacggactaccgccctggcctggacactgtggaacgcccagatgagtttggatttgtctttaacaatgtccaatccttgctaatttacaacgacaccaagtttatctactaccccaacccgacctttgaactgcttagccctactggagtcttggatcaaaagccaggatcgcccatcattctgaagggcaaaaacctctgccctcctgcctctggaggggccaaactcaactacactgtgctcatcggagagaccccttgtgctgtcaccgtatctgagacccagcttctctgcgagcctcccaacctcaccgggcagcacaaggtcatggttcacgtgggcgggatggtgttctcgcctggctcggtgagtgtcatctcagacagcttgctgaccctgccagccatcgtcagcatcgcggccggcggcagcctcctcctcatcatcgtcatcatcgtcctcattgcctacaagcgcaagtctcgagaaaatgacctcactctcaagcggctgcaaatgcagatggacaatctggagtcccgtgtggccttggagtgcaaggaagcttttgctgagctccagacggatatcaatgagttgaccagtgacctggaccgctcaggaatcccttacctggactatcgtacctacgctatgcgagtcctgttcccgggcatcgaggaccaccccgtcctgcgggagctggaggtacaaggaaacgggcagcagcacgtggagaaggccctgaagctctttgcccagctcatcaacaacaaggtgttcctgctgaccttcatccgcaccctggagctgcagcgcagtttctccatgcgcgaccggggcaacgtggcttcgctcatcatgaccggcctgcagggccgcctggaatatgccactgatgtcctcaagcagctgctctctgacctcatcgataagaacctggagaacaagaaccaccccaagctgctactccggaggacagagtctgtggctgaaaagatgctgaccaattggttcgccttcctcctgcacaagttcctaaaggagtgcgcaggggagccactcttcatgctatactgtgccatcaagcagcagatggagaagggccccattgatgccatcacgggcgaggcccgctactccctgagcgaggacaagctcatccggcagcagatcgagtacaagaccctgatcctgaactgcgtcaaccctgacaacgagaacagtccagagatcccagtgaaggtgttaaactgtgacaccatcacacaggtcaaggagaagattcttgatgccgtgtataagaatgtgccctattcccagcggccgagggcagtggacatggacttggagtggcgccaaggccggatcgcccgggtcgtgctgcaagatgaggacatcaccaccaagattgagggtgactggaagcggctcaacacactgatgcattatcaggtgtcagacaggtcggtggtggctctggtccccaaacagacctcctcctacaacatccctgcctctgccagcatctcccggacgtccatcagcagatacgactcctccttcaggtatacgggcagccccgacagcctgcggtcccgggccccgatgatcaccccagacctggaaagtggggtcaaggtgtggcatctggtgaagaaccatgaccacggtgaccagaaggagggtgaccggggcagcaagatggtgtccgagatctacctgacccggctactggccaccaagggcaccctgcagaagtttgtggacgacttgtttgagaccttgttcagcactgtgcaccggggcagcgctctccccctggccatcaagtacatgtttgatttcctagatgagcaggcagacaggcacagcatccatgacacagatgtgcggcacacctggaaaagcaactgcctccctctgcgcttctgggtgaacgtgattaagaacccccagttcgtgtttgacatccacaagggcagcatcacggacgcctgcctctctgtggtggcccagaccttcatggactcttgttcaacgtcagagcaccggctgggcaaggactccccctccaacaagctgctctatgccaaggacatccccagctacaagagctgggtggagagatactacgcagacatcgccaagctcccagccatcagtgaccaggacatgaatgcctacctcgccgagcagtcccgcctgcacgccgtggagttcaacatgctgagtgccctcaatgagatctactcctatgtcagcaagtatagtgaggagctcatcggggccctagagcaggatgagcaggcacggcggcagcggctggcttataaggtggagcagctcattaatgccatgtccattgagagctgagaggaggagcctcgcattcctgggaagagggacctgtccaagctgtcacactgggagtctcagatggaaggacaagtgatggggatcaggccccagagcttgctgtcccctgagaccccatcctggggagaggggaggactcctctccctacgccagccaagtttcgtcatagccagttccagctgggagagacagtgggcgtcgtccatcctcagtgagaacaccagagaacccggggccgggagaaggtggttcttcaagccgagaggcacgagctggggacagttctgcctctgtgactgctgctttgcatgaaaactcatttgatgtatattggggaaataatgagaactttatttaatttttttaagaaaaagggaaaaaaacagaaataaaacaaaaagccgccctgttaatcccgtccaacttttgtttaattctgatttctgtctcccttccatcttttctcccattcctccttctttatataatgcctatttccaaatgccagagaaagcagagatgctgagagacattggagagaaaatgactgtctccttttccttgaaattaaaaaaaaaaaaaaaaagagaaagaggagaagaagaatgatgagcacaagtatgcaccaaacacttcgcaaaaacagaggccagtaaaacctggaattatcccggcagccagaggagtatggaacttccagaactttgcacaaattgcaaagccatcaagagctcaccctggctgactggaaactgagctttatctaccacacacctgtatattctcatcttttgagaggagatgtgtacctagatagtaccaatgctttttgctactgttttttgttttgttttatttaatcctaaacctcaacaaatgaggagctggtctttgatatgtttcctttcaatttccctaaagttactatgagaagtggggtgaggtgggcctctcccagaccagacacctggcagccctgcctcatatcaatccctgtcataaaccaggcaccctggggaaacggcctggaggtgtgtgggccaggcctccacgaggttccatttgaaagttgatttggagacataggtgtttgactttggagttcactccaatcatccagtggtccctggcaattaaaaagaaaacaaaaatcaaacactgtttacagcaagcaatacttgaagagcataggttacagaagctgcagtatttattattatgctttctttctttcattctctcgtgcctggagaggggagaccacccttcgctcatatacggaagctcctgaccatctgggcctacagcacttcctcagtagaaatgactgtggcatgcccacgttactaccttctgcctctctttctgcctctcacggacttgtgagtgtgaaggacaagtggatgacttctcactggactttccttctctgtctcttctgatgatgcctaaaactatggataaccaattctcctgagtgtagattccaaacaaagagaccaaagctccatgcccaggtccaaaggccccatagaagccagtgggagtcatcgagaggaaaggcgctctgtgagtgtcaggaccttggtggccaggatagccatcagagtgtccaggcctcccacattaccttggatccgagcagccagctccaactgttctgcaagcagcactggagtcagggggtaggaggacaagtggaagcaaaggtgtgggactggggaagacaaagaggaacaagctgcccttcctcacttttcaaagggtcaggaatcctaggctatgatgctgggaagctagaccagctcctccaagagagactagaccagggtcattttctctgttattaactctgggctccagcttctccgtgccctgctttacctccaagtggttccaatttccaaaggccctgctgaccacatgtgattcccaggagagggctgggggaggggagcgcagaggtctggcttccatccttggcgtgtagctttggatcgctgtctaaccacacagcagacgttgcccggtctccccagctctagtttcttgcctgaatgcggctgacaaatgggaagagaaaagcattcagcaaaatactcaggaaacttgctgttttcattataattcacaaccagccatgccaaggccactttcttttgaaaatccacttctttaaagtttctcaggccctattagtagcctgaaggaaatactaatgactggccttccgcactaagccaaagtgtttgctcttcatagcactcaaagcttatcagcgcagagcccataatttatggagataaaaggaaaggagatataggtaagaagagtgtgaccaggagaccttatgctacctgtaaaaaagttcagcccaccccatctaacttctgagctctgtttgggtgaagattttctggccgcatggctgctcagactggcatccaggctttgctccaccaagaagttaaaggcagtcggacatctcagtagcatctctaccagcccttaactcaatgcatctacctggcatctcccagcagttacttttggagacgattcactgcccctggggcgtttccttgaaggtttgtggagagcgtggagaatgatggggcaatggccaattggagggtggagagtgaagagccggagctggctgtgagtggtttggccacatttctcaggattccatgagagacttggggaacttgggctgacaaaggaagtagcctggggcatccttaaggaaggaattaagaaaagggaaaaagctggactcaagccacgccatgagggtgaaaggttataaggccctgccccctttccagctgcccacctgttcctcctccacacctcttcgctttgggccaccaagaaccaatgaagtccacaccctttggatgagaaaaagagggagttggttggcctctcttctccctgttatccaatttgaggatattttgaccttgggtaaggatgaagtgttaaagccacagctcctctccacaagaagccattcatcttgggggaggcagagagggaagtctctctccaaagtctatccagcttcgcttcgtttcattgatctgcacaagagacaatgctctggaaaaggaagaggaccccagaagggtgcttggcaagacagaggatgctaatgggcaatggagagcactccctccagctggcccctgctgctgcctcccgtcctctgcatggggtcaggtgcttctgtgcttgctgtcctacctctctccacagcagggctctcaaaaccattttgatcccccattggcagagggttcccctctttacagagttcagtcattaaaagcatggatcagctgttaatctcattggaggagggaactgtttcctgcattcattcatctgggaaccttcttgagtagccactgtctgccagccactgctctagagatgggaaaacagcacggaacaaaaccaaggtctttcttccagcgaatttatatccttcaggaagctggttcctgccaccaacttagcaggcaacagttctcctcccctagtggcacagggtaccagttttgtaggaaaagtggtccagcaaaggaagaaagcagaccaacccagctgccttaccttattctggggccattcccccagcgatgagagctgctcttgtttctactgccaccatctcttctggctgcacttcacctgctgcttgagcttctgaccttccttcagttccaccaaatgaggacaggaaatagcagtcaagacccctggccctgctgagcgtgaaacagaagcaatggatgagtgctggacgaagaatggcctgggcagaacaaatagggagcatttgaaagcttctggctgataaatctccaggtgcatcccggttgccacgcctgcccccattaacctgctcctggtaaatactgatccagcagctgctccaggagaggccgtctttttttcccagccacgctgtgtcttgcatgagactcctggggcctgggcacagagagaaaagaattgagactcaggaggctcagtgggtgagaaaatgcaaagtggcttcacagacacagggctgtgggagcagatcgacggggaacttgggagatgaacttcagggccttccgacgccttgtctcaggaacatgctttgagaaaaatggtagcatcctttccataactcagtctctcttccctagtttccctgaagtgtgacgttttagtatctggagctcagtgatccccatgaatgagggataaagtttcactcttggtattttctaactagtgctagggaaagtcctgagacacgatcacagccactgcttggcatacagggcctccacccaataagcaaactggagattcctcagcctctcgtggacacccacatctcattcttctcacagcagagaagctctcccttcagcctgagctgtcttctttctgctgcagtgcagcctgctccctcctaccctggcctcaaggaaggtaggaaacatcttctgcatttcaaagtcctcactttgacttatttggccttcatcttggcatggaaggtggcaggcagaatggaaatactccccccaaacagaacagatattcttgcgtgtgtaagggcagaagggacaagctctctatcccatgagactaggggccggagcccacctgcctttccccacaacttttcctgctcaaacccactcctcttgacacactggaatctgtattatatatatttttaagaaaatacaatgatggttgtctggttttgttgtttttacaggtgttgtggaataaaaactgtaagaaaattaagtatttaaaatgttccaataaagtggggttttttgttattctaatatattattgtgtacctattgtaaatatgaaacactcctattttgcaagctgaggacacaatttgtactgttgttatatataaataaagtttactgaattaaaaaaaccttaaatctttaaataaa

SEQ ID NO: 22796 - DNA, 13061 bp, Homo sapiens
  source 1..13061: mol_type = unassigned DNA
tgcgttcggggctggggctggaggaggcagccacacgcgcgcacacgcacacgttcagaggagggcgagaggcagcggcataggctccatctgcagtgtcaatgcggcgctcccgctgaaggagggaaacgcggcgcgtccagtaggggagactgcattgctgagtcctggccctctgaggggacgactgtgcctgagtgctgctgtgccactgggacccgcctctgccatgaaagccatgccctggaactggacctgccttctctcccacctcctcatggtgggcatgggctcctccactttgctcacccggcagccagccccgctgtcccagaagcagcggtcatttgtcacattccgaggagagcccgccgagggtttcaatcacctggtggtggatgagaggacaggacacatttacttgggggccgtcaatcggatttacaagctctccagcgacctgaaggtcttggtgacgcatgagacagggccggacgaggacaaccccaagtgttacccaccccgcatcgtccagacctgcaatgagcccctgaccaccaccaacaatgtcaacaagatgctcctcatagactacaaggagaacaggctgattgcctgtgggagcctgtaccaaggcatctgcaagctgctgaggctggaggacctcttcaagctgggggagccttatcataagaaggagcactatctgtcaggtgtcaacgagagcggctcagtctttggagtgatcgtctcctacagcaacctggatgacaagctgttcattgccacggcagtggatgggaagcccgagtattttcccaccatctccagccggaaactgaccaagaactctgaggcggatggcatgttcgcgtacgtcttccatgatgagttcgtggcctcgatgattaagatcccttcggacaccttcaccatcatccctgactttgatatctactatgtctatggttttagcagtggcaactttgtctactttttgaccctccaacctgagatggtgtctccaccaggctccaccaccaaggagcaggtgtatacatccaagctcgtgaggctttgcaaggaggacacagccttcaactcctatgtagaggtgcccattggctgtgagcgcagtggggtggagtaccgcctgctgcaggctgcctacctgtccaaagcgggggccgtgcttggcaggacccttggagtccatccagatgatgacctgctcttcaccgtcttctccaagggccagaagcggaaaatgaaatccctggatgagtcggccctgtgcatcttcatcttgaagcagataaatgaccgcattaaggagcggctgcagtcttgttaccggggcgagggcacgctggacctggcctggctcaaggtgaaggacatcccctgcagcagtgcgctcttaaccattgacgataacttctgtggcctggacatgaatgctcccctgggagtgtccgacatggtgcgtggaattcccgtcttcacggaggacagggaccgcatgacgtctgtcatcgcatatgtctacaagaaccactctctggcctttgtgggcaccaaaagtggcaagctgaagaagatccgggtggatggacccaggggcaacgccctccagtatgagacggtgcaggtggtggaccccggcccagtcctccgggatatggccttctccaaggaccacgagcaactctacatcatgtcagagaggcagctcaccagagtccctgtggagtcctgtggtcagtatcagagctgcggcgagtgccttggctcaggcgacccccactgtggctggtgtgtgctgcacaacacttgcacccggaaggagcggtgtgagcggtccaaggagccccgcaggtttgcctcggagatgaagcagtgtgtccggctgacggtccatcccaacaatatctccgtctctcagtacaacgtgctgctggtcctggagacgtacaatgtcccggagctgtcagctggcgtcaactgcacctttgaggacctgtcagagatggatgggctggtcgtgggcaatcagatccagtgctactcccctgcagccaaggaggtgccccggatcatcacagagaatggggaccaccatgtcgtacagcttcagctcaaatcaaaggagaccggcatgaccttcgccagcaccagctttgtcttctacaattgcagcgtccacaattcgtgcctgtcctgcgtggagagtccataccgctgccactggtgtaaataccggcatgtctgcacccatgaccccaagacctgctccttccaggaaggccgagtgaagctgcccgaggactgcccccagctgctgcgagtggacaagatcctggtgcccgtggaggtgatcaagcctatcacgctgaaggccaagaacctcccccagccccagtctgggcagcgtggctacgaatgcatcctcaacattcagggcagcgagcagcgagtgcccgccctgcgcttcaacagctccagcgtacagtgccagaacacctcttattcctatgaagggatggagatcaacaacctgcccgtggagttgacagtcgtgtggaatgggcacttcaacattgacaacccagctcagaataaagttcacctctacaagtgtggagccatgcgtgagagctgcgggctgtgcctcaaggctgacccagacttcgcatgtggctggtgccagggcccaggccagtgcaccctgcgccagcactgccctgcccaggagagccagtggctggagctgtctggtgccaaaagcaagtgcacaaacccccgcatcacagagataatcccggtgacaggcccccgggaagggggcaccaaggtcactatccgaggggagaacctgggcctggaatttcgcgacatcgcctcccatgtcaaggttgctggcgtggagtgcagccctttagtggatggttacatccctgcagaacagatcgtgtgtgagatgggggaggccaagcccagccagcatgcaggcttcgtggagatctgcgtggctgtgtgtcggcctgaattcatggcccggtcctcacagctctattacttcatgacactgactctctcagatctgaagcccagccgggggcccatgtccggagggacccaagtgaccatcacaggcaccaacctgaatgccggaagcaacgtggtggtgatgtttggaaagcagccctgtctcttccacaggcgatctccatcctacattgtctgcaacaccacatcctcagatgaggtgctagagatgaaggtgtcggtgcaggtggacagggccaagatccaccaggacctggtctttcagtatgtggaagaccccaccatcgtgcggattgagccagaatggagcattgtcagtggaaacacacccatcgccgtatgggggacccacctggacctcatacagaacccccagatccgtgccaagcatggagggaaggagcacatcaatatctgtgaggttctgaacgctactgagatgacctgtcaggcgcccgccctcgctctgggtcctgaccaccagtcagacctgaccgagaggcccgaggagtttggcttcatcctggacaacgtccagtccctgctcatcctcaacaagaccaacttcacctactatcccaacccggtgtttgaggcctttggtccctcaggaatcctggagctcaagcctggcacgcccatcatcctaaagggcaagaacctgatcccgcctgtggctgggggcaacgtgaagctgaactacactgtgctggttggggagaagccgtgcaccgtgaccgtgtcagatgtccagctgctctgcgagtcccccaacctcatcggcaggcacaaagtgatggcccgtgtcggtggcatggagtactccccggggatggtgtacattgccccggacagcccgctcagcctgcccgccatcgtcagcatcgcagtggctggcggcctcctcatcattttcatcgtggccgtgctcattgcctataaacgcaagtcccgcgaaagtgacctcacgctgaagcggctgcagatgcagatggacaacctggagtcccgtgtggccctggagtgcaaggaagcctttgccgagctgcagacggacatccatgagctgaccagtgacctggatggagccgggattccgttcctggactatagaacttacaccatgcgggtgctgttcccaggaattgaagaccaccctgtcctccgggaccttgaggtcccgggctaccggcaggagcgtgtggagaaaggcctgaagctcttcgcccagctcatcaacaacaaggtgttcctgctgtccttcatccgcacgcttgagtcccagcgtagcttctccatgcgcgaccgtggcaacgtggcctcactcatcatgaccgtgctgcagagcaagctggagtacgccactgatgtgctgaagcagctgctggccgacctcattgacaagaacctggagagcaagaaccaccctaagctgctgctcaggaggactgagtcagtggctgagaagatgctgaccaattggtttactttcctcctctacaagttcctcaaggagtgtgctggggagcccctcttctccctgttctgtgccatcaagcagcagatggagaagggccccattgacgccatcacgggcgaggcccgctactccttgagcgaggacaagctcatccgccagcagattgactacaaaaccctggtcctgagctgtgtcagcccagacaatgccaacagccccgaggtcccagtaaagatcctcaactgtgacaccatcactcaggtcaaggagaagattctggatgccatcttcaagaatgtgccttgctcccaccggcccaaagctgcagatatggatctggagtggcgacaaggaagtggggcaaggatgatcttgcaggatgaagacatcaccaccaagattgagaatgattggaagcgactgaacacactggcccactaccaggtgccagatggttccgtggtggcattagtgtccaagcaggtgacagcctataacgcagtgaacaactccaccgtctccaggacctcagcaagtaaatatgaaaacatgatccggtacacgggcagccccgacagcctccgctcacggacacctatgatcactcctgacctggagagtggagtcaagatgtggcacctagtgaagaaccacgagcacggagaccagaaggagggggaccgggggagcaagatggtgtctgaaatctacctgacccgactcctggccactaagggcacactgcagaagtttgtggatgacctctttgagaccatcttcagcacggcacaccgtggctctgccctgcccctggccatcaagtacatgtttgacttcctggatgagcaggctgataaacatggcattcatgacccgcacgtccgccatacctggaagagcaattgcctgcccctgaggttttgggtcaacatgatcaagaacccgcagtttgtgtttgacatccataagaacagcatcacagacgcctgcctctctgtggtggctcagaccttcatggactcttgctccacgtcagagcaccggctgggcaaggactcgccctccaacaagctgctgtatgccaaggacatccccagctacaagaattgggtggagaggtattactcagacatagggaagatgccagccatcagcgaccaagacatgaacgcatacctggctgagcagtcccggatgcacatgaatgagttcaacaccatgagtgcactctcagagatcttctcctatgtgggcaaatacagcgaggagatccttggacctctggaccacgatgaccagtgtgggaagcagaaactggcctacaaactagaacaagtcataaccctcatgagcttagacagctgagaaccgtccttccagggccgccctggagggggacacaccaagccgtgcctcagtctagattatcatctttaccaagtgcaagttccgactggcatcagcagcatcccctgagcagcgctgtttctctctctttctctctgcctctttccgtttctccctccttcctggatctcttctcttccagttgctctgccaacacgattggaccaagccactgaccctcagttagtccaagaatggccaggcccatggcaagggagctgaccagaagatgtcagagaggcctctgtctcccaggtgctcctgaccctgtgcatgtcagcagcagggtgcaaataacgaatgaggagccagggacaggggacatttctgtgctgctacttcaccttccactttggcagcccctgctttggtctgagccttggcctagggaagaggcaaggaaggacttcagtattatctttactgggaagacatcacctggctctcccttcccacagttccatctccagtggttcagccagtggtctgatcgctttgcagctgtgagaagaaaggctacacctcctgcatgtggctggagcagggcatgtgtgggcagctgggaggtgctccttgaggctccttctcccccactgggctggtgtccagaggcttcctgtccttttccaggtctccagagggacctgcctgccctgcctgctcccccgccagtagaaagccaggcaggagaaagaatagcaattacattccaccatggagatgctcctgaccttttcatctgaatcctagtagcagaaatgtaacacagggggagaaaaggaaagagagttgcatctaccctggaagcagaatttgttttccatttaccctcaaattcaaatgagtcacaatcatagtcataggtctagtccactaccagagccctgagtgctgtcaagagaaagcatctatctccaccctcctttgtcaaccttcatcaagggtcaacgtgaaatgcagagtgcatctaggagattctacctccagccatctccatggctccatccccatcatccttcctgagaactccatagacggctggggccaacagcctagtccctgttccctctgcagaatccggtgccattgctatgcagatgactttgtcactgggctgtccagacctctttgggaatgatttcatcaacatctcagctgtctctcatcattctccttcctcatctcttcagcagtcatccttgaaagaaacagacttaagcaaagcctcacggagacagcccaaaatgccagccaacctcagcctccagcttgtcagatctgggagggacaaagagtcgagctgatgggcctggctggaattaagaagagggacatacaaatgaccttggccttggcatccatctccccatctgttcttacatctacagatgcacgattttagccaggcaggcaaatgtgtgcctagaaattgatactaggtaagcagaggctatggggagagatggtctaatggagggttctaggaacctttcatcctaaggagaccttaggtgctgtctggtgcagtctcccatcctaagcaggagtctctgttggcacctctgctctggagttgttcaccactatgggagacaaggagaaacatcttaggtgaggttgaggagaaggattcacagtcttgccttcactccccaaacatcagacatcattccttgtcacccactcagaatgagccccccttggggaagaaaccacaccatttccagcaaagtccatggagcatccggtacttttaagaacacttgcccctttggatatgaatatgtgcacatgtgtgtgagcacatgtatgtgtgtgtgtgtgtctgccccaggtgtaggcggaaagctcaaaaggatttcttgtcctttgtaggaggatttttgaagtgttccccttctctttccccttgctcatccattcatcctgcagcttcaggacatttcaacacttacttgctttctatgctgagagctggtgggtggaaggagagggcgcttgtccataggaaatcagggtggtcgcctgccgaggcctggaccttggaacagggcatcatgtgacatcgcagaggacagatggtggaaaagacatgagcaacctaatgggaagaggaaaatgggaaacaatgcattggaagaggaagaaaaaaaataaataaccaaaggttttggcaagtgcagtaccaggtggagaagcttgacttttctatccttgatcattttattccctcccaagaagtcagtcacaggacctggaaggccagaaagggtacatgtgggagacggtctgaggaagtacctcggtcactacaatatttttgcacatataaagggttggggaggaaagagacacaaacgtatttaacacagatttgctggatggaagctgcgtgtgtgaacgtgtgtatgagtgagtgcattttgattttttttttttttttttgcacagttaagagaaaaaatcaaacaagcagaaaaaaaaaagaaaaaagacttatcacggttctgctgaagcttttattttttactggatgatgattattgttattgttactttggcggtacaggactttattttattccatgtttttgttataagaaaaatttcaaacacctcagagaaatagaaaggttaggaagaaagaggagacaaggacagacaaattttctggctgtccccatttctcctgggggaggggtttggggctggtttgactttaattggtgggtgggttgtttctgccgctctgtttgctgcagtccccgtggcctgcttggggactgagaaatttgagccaggtatccagagccacagcccatcttgcttataaaaattatcttctgctgtttgttttccatttcttccgtttggattcttggtgcacgtgtgatatggtatttaaaagcaaagacaagcaacattgtcaaaaagctgtccttgccccccatcccccacccaaatcttttttccaaactcccccagggatcttccttaccccactggcagagcaaacatccaggggctgtccatgtggcttgcgggctcccagagaaaggaattgggccaactttgtcctgtgggatggaggccccttcacggcctccctcgaggcaaagttaatttgtagggtcaccattatgttgagtcatgagcagacagaaggagagaaaaggccatcttccttaccttcccctccaacttatcccgtaccctcccagggaaaatggtaccagactgagccatcaaaatcactgacaaagtttaggtgggaattttttttgcatgttggagagagaagggcttaaggtagcagggaagaagggggctttgtggggtcctaaattttaaggaataagtagaggaagacaagaaacagagtggtaggctggtcatttctcctggccacaagtccccccagatgcagcttttacccattctttgtccttccccataaggagagaccctgacatttcttggtagctgcaaatagtgccactaagtgaaggtggccatcatgccagttacttcctcaggaaaatattttcttgccttcttctttcagtatggttttaaatttgggaacagtggataacccaagtgtcccacaggccaaggtacattccaatggcagcatgatccctgcacccaaagccagcccctaaagcctaccccttgtgcacccgcagcctggtaagtgagcttggctgcttgtgaggagctacaagtgaaagagaagttattttaaataaatcccaaagtttgaggcagactgtccaggactgttcccaggaagaagcaggagttacccacaggaaaagtctctgacctggtcccctcaggcccagctacctgcgcccaccagcagtgaaggttgatgtactggcccagcatctccacctcccccatgcaaccaggtccctggtaccgtgtctcccgttgcatgtctggcttctgcctgtgctcctcctgccacgagcatcctccctgtccctcctcattccaccgtgtctctcctgcacacatagcctctgtcccagggcgatttatccacttgagtacaggagctgctcagacctctcagcccagccctctgtgactgccccagccccatcctaccccacccaaagctgccttcctggctgtaggagctccctcgtctagccaaggccctatgggtccccatccgaggatccacaagcaatgacttcccaaatgacctccactgcaagaagaatccttaccactgtttccagagccgtgaacgatgctgtgatgggcccaggtctcagcaccaccctctgtgacctaaaaagaaaagctcaatttccatctgtcttctttcccaggaccaaggggacacagtaatgtgaagtcaaatacttaaccgagcaaagggccagtattgttatcagtcaaggacaaacctcccacctcacagacagccaagcagtgagggaaagacagacagacataggtaggaaggtgctctgcaggcacaaggcccagagaagcccctctccgggaacttcccctgctccttccaggaacagtgagcccagtgagcagccccagccagctcttcaaggccttcaaggggtctttccatgactgagtcacctccaggagctcacctgacccccagagaagacctaccccaggcagctccgtgccctggcttctccccatgccccaaatccccccccgccatccctcctggtcctcgtctacatcaagggcctcttcccctcttcctgccagctctcaggacaggtgactgggaggccttgaaccctcagcctcttcctttaaaaaaaacaaaacaaaacaaaactgtgggccatttatttgggattttggagttgtttggtttttgtttgtatatcttaatagttcgaaagtaagaagggagccctgctatggatgttaagtccaaattactcggttagtgggagcaaaacctatgacttccaaggggatgaggagaggttcagaggacaggaggagcctcccccattgaaaaaaaaaaatgggtcaggacattccctggatgaggacaatgctaggggtggcatctcacatggctgctgctattcctggtgcttccccacacttttgacagatggagtccttctcctaccgcctcctgccacctcaccctacaggcattctctatgtaggaaacaagagccttattttatagagtggggagctgagacacagcctcaggtaacactgacacagctcccgaatgaggctgggacactctgcaaacctctcctcatggtgctaagggtggcatgctcttgacaggaaacctaaatgaccactcctctcatttggaaagtaatccactgcagtaaaagtttcagacatgcaagagagagtttttttttttttactacaaatttttgctcccccataaaattattttattagagggagtatccaagttttaaaagtatatagaattttttggttgtaagagaaatacatactcattaggatcccgattaaattccttgagtagactggtgcctaccagaaagcaaagcaaagttaaacaaaacgaaacaaaatccttcatatacaaaaagaactttctgtttgtattggcagaggtagtgaggtgattcaggtaggctgaaaatcctgggttgcgggagcctcactttattccattcccacccgctttgatgtctatgcttggctctctgggctgcccctggtactgccgaatcctacacatctcttatcagctttcctcaaactttaaggaggctctgtgagggatgggtcatgggaagacccaagctttccctccgccaggattgcaaaagcaagtagacttggtctatgcagctcttcttccagcaatttctttatttggaattagaacttcctttgttagtatctttgatcttttgactcaagcacattttggaagggctcccttacaaaagtagaatttaaaacagaggatacagttaaagagcaacccaaaggacgcttaagaaaccgagaccacttcaccaaacaggactaaggaacactttcgtgcacagaagtcagccgcaatccaggcacaggacgaagatgggatacacgtgctcatctgtctgtcctcctttcctctccctccccgacgttctagttagcttgttgacttgttaaaccttctgttcttaaaatgaaaagctagcttacctcaaagaatcttgtttccattcggaaaccaacgattttgtgttttagaatggacagccctcccctcaccactccctaccttggcctggtgtccttgagacatacggtctttgcttagtcgtgtgttggctgctttgagcaggaacaaggcctccaggccctgaggtgggaaggaaggattggatgccactgccctcctccccactttagcatgtaggggccagcccatctcttccagcagggtcctgctgagttaccatagcaaccagcaactccagggtaccacaacagacaatggctcagcgagccgacgtgtggggatgatgcaggggttttggcccagccagaggacccagagttgagcttcaaatgctagagaaggggagaaacaggatggaagggtggtttaaggaaccggcaggggtctttgagtcacatagagaagccgttgaaggaggtagggcaggttatctctgttccagtcacccccttccagccccatcccacttctgtttcaaactaaagctcccacctcgaacattgaccctttgttagaacaaagcaaagcatatctttagacaacagtgttaaaatgagcctcaaatgtatgtggatgagatctctaagaagagggtcttctggttttgatttttaaagaagagtatcctagtaaaatattaaaaaaaaattaaaaagtttttaaaaaggaaacctgtgctatttaaattggagcccagttgtaacttggtaaaggcaagcttctgtacctttgttataattaattgtatacctgtgtatgtaaatataaggcattcctattttgcagttcagaacaaaaaaaacttatttgtaatatagaataaagtttattaaaaaataataaaaatgcagtttggga

SEQ ID NO: 22797 - DNA, 13786 bp, Homo sapiens
  source 1..13786: mol_type = unassigned DNA
gcgagccgcggcggcagcaggcagcccgggagctccggcggcggccgagccagcggcggccccgctccctgccccctgcaaactttgcgagcagcccgcccggggggccgggggcgcgcccgggaggcccggctcggcccgcggccgagctctccgccgccgcagcgccagccgccgcagccaccaccgccgcagccccgcgcctccccggggagcagccggcggctcccgcggccccccagccccggccccagggcactgcccggcgagtgtctcggcaagggtgggggctgccgcggcgcggccggccgcgggctgccggggggcggccgccgctacccagagaggcgcgcagaggcgccgagagcgctccccggcgggtcccccgcgcactcgccgcgcccgggcagcggcccgaccgggcgagcatgggcggcgcggagtgacgccgctgtgcccgcttggcatcaaggacattcagcccgcgggggtggggacgaaggggggcagcccggcgtcgccaccgcagcccccgagagccgccgccgctgctcgggctccggggctgggtggaggaaaggggtgttcggaatcgatccccattttccgacctttttgttggacattacgcccaccttggacgccgcaagagaagctgtcaagccccgcaggctctgattcggcgccctccgcgttcctcggctgctcccggcttccctgtgcctcggtggagtatttgcgttcggggctggggctggaggaggcagccacacgcgcgcacacgcacacgttcagaggagggcgagaggcagcggcataggctccatctgcagtgtcaatgcggcgctcccgctgaaggagggaaacgcggcgcgtccaggggagactgcattgctgagtcctggccctctgaggggacgactgtgcctgagtgctgctgtgccactgggacccgcctctgccatgaaagccatgccctggaactggacctgccttctctcccacctcctcatggtgggcatgggctcctccactttgctcacccggcagccagccccgctgtcccagaagcagcggtcatttgtcacattccgaggagagcccgccgagggtttcaatcacctggtggtggatgagaggacaggacacatttacttgggggccgtcaatcggatttacaagctctccagcgacctgaaggtcttggtgacgcatgagacagggccggacgaggacaaccccaagtgttacccaccccgcatcgtccagacctgcaatgagcccctgaccaccaccaacaatgtcaacaagatgctcctcatagactacaaggagaacaggctgattgcctgtgggagcctgtaccaaggcatctgcaagctgctgaggctggaggacctcttcaagctgggggagccttatcataagaaggagcactatctgtcaggtgtcaacgagagcggctcagtctttggagtgatcgtctcctacagcaacctggatgacaagctgttcattgccacggcagtggatgggaagcccgagtattttcccaccatctccagccggaaactgaccaagaactctgaggcggatggcatgttcgcgtacgtcttccatgatgagttcgtggcctcgatgattaagatcccttcggacaccttcaccatcatccctgactttgatatctactatgtctatggttttagcagtggcaactttgtctactttttgaccctccaacctgagatggtgtctccaccaggctccaccaccaaggagcaggtgtatacatccaagctcgtgaggctttgcaaggaggacacagccttcaactcctatgtagaggtgcccattggctgtgagcgcagtggggtggagtaccgcctgctgcaggctgcctacctgtccaaagcgggggccgtgcttggcaggacccttggagtccatccagatgatgacctgctcttcaccgtcttctccaagggccagaagcggaaaatgaaatccctggatgagtcggccctgtgcatcttcatcttgaagcagataaatgaccgcattaaggagcggctgcagtcttgttaccggggcgagggcacgctggacctggcctggctcaaggtgaaggacatcccctgcagcagtgcgctcttaaccattgacgataacttctgtggcctggacatgaatgctcccctgggagtgtccgacatggtgcgtggaattcccgtcttcacggaggacagggaccgcatgacgtctgtcatcgcatatgtctacaagaaccactctctggcctttgtgggcaccaaaagtggcaagctgaagaagatccgggtggatggacccaggggcaacgccctccagtatgagacggtgcaggtggtggaccccggcccagtcctccgggatatggccttctccaaggaccacgagcaactctacatcatgtcagagaggcagctcaccagagtccctgtggagtcctgtggtcagtatcagagctgcggcgagtgccttggctcaggcgacccccactgtggctggtgtgtgctgcacaacacttgcacccggaaggagcggtgtgagcggtccaaggagccccgcaggtttgcctcggagatgaagcagtgtgtccggctgacggtccatcccaacaatatctccgtctctcagtacaacgtgctgctggtcctggagacgtacaatgtcccggagctgtcagctggcgtcaactgcacctttgaggacctgtcagagatggatgggctggtcgtgggcaatcagatccagtgctactcccctgcagccaaggaggtgccccggatcatcacagagaatggggaccaccatgtcgtacagcttcagctcaaatcaaaggagaccggcatgaccttcgccagcaccagctttgtcttctacaattgcagcgtccacaattcgtgcctgtcctgcgtggagagtccataccgctgccactggtgtaaataccggcatgtctgcacccatgaccccaagacctgctccttccaggaaggccgagtgaagctgcccgaggactgcccccagctgctgcgagtggacaagatcctggtgcccgtggaggtgatcaagcctatcacgctgaaggccaagaacctcccccagccccagtctgggcagcgtggctacgaatgcatcctcaacattcagggcagcgagcagcgagtgcccgccctgcgcttcaacagctccagcgtacagtgccagaacacctcttattcctatgaagggatggagatcaacaacctgcccgtggagttgacagtcgtgtggaatgggcacttcaacattgacaacccagctcagaataaagttcacctctacaagtgtggagccatgcgtgagagctgcgggctgtgcctcaaggctgacccagacttcgcatgtggctggtgccagggcccaggccagtgcaccctgcgccagcactgccctgcccaggagagccagtggctggagctgtctggtgccaaaagcaagtgcacaaacccccgcatcacagagataatcccggtgacaggcccccgggaagggggcaccaaggtcactatccgaggggagaacctgggcctggaatttcgcgacatcgcctcccatgtcaaggttgctggcgtggagtgcagccctttagtggatggttacatccctgcagaacagatcgtgtgtgagatgggggaggccaagcccagccagcatgcaggcttcgtggagatctgcgtggctgtgtgtcggcctgaattcatggcccggtcctcacagctctattacttcatgacactgactctctcagatctgaagcccagccgggggcccatgtccggagggacccaagtgaccatcacaggcaccaacctgaatgccggaagcaacgtggtggtgatgtttggaaagcagccctgtctcttccacaggcgatctccatcctacattgtctgcaacaccacatcctcagatgaggtgctagagatgaaggtgtcggtgcaggtggacagggccaagatccaccaggacctggtctttcagtatgtggaagaccccaccatcgtgcggattgagccagaatggagcattgtcagtggaaacacacccatcgccgtatgggggacccacctggacctcatacagaacccccagatccgtgccaagcatggagggaaggagcacatcaatatctgtgaggttctgaacgctactgagatgacctgtcaggcgcccgccctcgctctgggtcctgaccaccagtcagacctgaccgagaggcccgaggagtttggcttcatcctggacaacgtccagtccctgctcatcctcaacaagaccaacttcacctactatcccaacccggtgtttgaggcctttggtccctcaggaatcctggagctcaagcctggcacgcccatcatcctaaagggcaagaacctgatcccgcctgtggctgggggcaacgtgaagctgaactacactgtgctggttggggagaagccgtgcaccgtgaccgtgtcagatgtccagctgctctgcgagtcccccaacctcatcggcaggcacaaagtgatggcccgtgtcggtggcatggagtactccccggggatggtgtacattgccccggacagcccgctcagcctgcccgccatcgtcagcatcgcagtggctggcggcctcctcatcattttcatcgtggccgtgctcattgcctataaacgcaagtcccgcgaaagtgacctcacgctgaagcggctgcagatgcagatggacaacctggagtcccgtgtggccctggagtgcaaggaagcctttgccgagctgcagacggacatccatgagctgaccagtgacctggatggagccgggattccgttcctggactatagaacttacaccatgcgggtgctgttcccaggaattgaagaccaccctgtcctccgggaccttgaggtcccgggctaccggcaggagcgtgtggagaaaggcctgaagctcttcgcccagctcatcaacaacaaggtgttcctgctgtccttcatccgcacgcttgagtcccagcgtagcttctccatgcgcgaccgtggcaacgtggcctcactcatcatgaccgtgctgcagagcaagctggagtacgccactgatgtgctgaagcagctgctggccgacctcattgacaagaacctggagagcaagaaccaccctaagctgctgctcaggaggactgagtcagtggctgagaagatgctgaccaattggtttactttcctcctctacaagttcctcaaggagtgtgctggggagcccctcttctccctgttctgtgccatcaagcagcagatggagaagggccccattgacgccatcacgggcgaggcccgctactccttgagcgaggacaagctcatccgccagcagattgactacaaaaccctggtcctgagctgtgtcagcccagacaatgccaacagccccgaggtcccagtaaagatcctcaactgtgacaccatcactcaggtcaaggagaagattctggatgccatcttcaagaatgtgccttgctcccaccggcccaaagctgcagatatggatctggagtggcgacaaggaagtggggcaaggatgatcttgcaggatgaagacatcaccaccaagattgagaatgattggaagcgactgaacacactggcccactaccaggtgccagatggttccgtggtggcattagtgtccaagcaggtgacagcctataacgcagtgaacaactccaccgtctccaggacctcagcaagtaaatatgaaaacatgatccggtacacgggcagccccgacagcctccgctcacggacacctatgatcactcctgacctggagagtggagtcaagatgtggcacctagtgaagaaccacgagcacggagaccagaaggagggggaccgggggagcaagatggtgtctgaaatctacctgacccgactcctggccactaagggcacactgcagaagtttgtggatgacctctttgagaccatcttcagcacggcacaccgtggctctgccctgcccctggccatcaagtacatgtttgacttcctggatgagcaggctgataaacatggcattcatgacccgcacgtccgccatacctggaagagcaattgcctgcccctgaggttttgggtcaacatgatcaagaacccgcagtttgtgtttgacatccataagaacagcatcacagacgcctgcctctctgtggtggctcagaccttcatggactcttgctccacgtcagagcaccggctgggcaaggactcgccctccaacaagctgctgtatgccaaggacatccccagctacaagaattgggtggagaggtattactcagacatagggaagatgccagccatcagcgaccaagacatgaacgcatacctggctgagcagtcccggatgcacatgaatgagttcaacaccatgagtgcactctcagagatcttctcctatgtgggcaaatacagcgaggagatccttggacctctggaccacgatgaccagtgtgggaagcagaaactggcctacaaactagaacaagtcataaccctcatgagcttagacagctgagaaccgtccttccagggccgccctggagggggacacaccaagccgtgcctcagtctagattatcatctttaccaagtgcaagttccgactggcatcagcagcatcccctgagcagcgctgtttctctctctttctctctgcctctttccgtttctccctccttcctggatctcttctcttccagttgctctgccaacacgattggaccaagccactgaccctcagttagtccaagaatggccaggcccatggcaagggagctgaccagaagatgtcagagaggcctctgtctcccaggtgctcctgaccctgtgcatgtcagcagcagggtgcaaataacgaatgaggagccagggacaggggacatttctgtgctgctacttcaccttccactttggcagcccctgctttggtctgagccttggcctagggaagaggcaaggaaggacttcagtattatctttactgggaagacatcacctggctctcccttcccacagttccatctccagtggttcagccagtggtctgatcgctttgcagctgtgagaagaaaggctacacctcctgcatgtggctggagcagggcatgtgtgggcagctgggaggtgctccttgaggctccttctcccccactgggctggtgtccagaggcttcctgtccttttccaggtctccagagggacctgcctgccctgcctgctcccccgccagtagaaagccaggcaggagaaagaatagcaattacattccaccatggagatgctcctgaccttttcatctgaatcctagtagcagaaatgtaacacagggggagaaaaggaaagagagttgcatctaccctggaagcagaatttgttttccatttaccctcaaattcaaatgagtcacaatcatagtcataggtctagtccactaccagagccctgagtgctgtcaagagaaagcatctatctccaccctcctttgtcaaccttcatcaagggtcaacgtgaaatgcagagtgcatctaggagattctacctccagccatctccatggctccatccccatcatccttcctgagaactccatagacggctggggccaacagcctagtccctgttccctctgcagaatccggtgccattgctatgcagatgactttgtcactgggctgtccagacctctttgggaatgatttcatcaacatctcagctgtctctcatcattctccttcctcatctcttcagcagtcatccttgaaagaaacagacttaagcaaagcctcacggagacagcccaaaatgccagccaacctcagcctccagcttgtcagatctgggagggacaaagagtcgagctgatgggcctggctggaattaagaagagggacatacaaatgaccttggccttggcatccatctccccatctgttcttacatctacagatgcacgattttagccaggcaggcaaatgtgtgcctagaaattgatactaggtaagcagaggctatggggagagatggtctaatggagggttctaggaacctttcatcctaaggagaccttaggtgctgtctggtgcagtctcccatcctaagcaggagtctctgttggcacctctgctctggagttgttcaccactatgggagacaaggagaaacatcttaggtgaggttgaggagaaggattcacagtcttgccttcactccccaaacatcagacatcattccttgtcacccactcagaatgagccccccttggggaagaaaccacaccatttccagcaaagtccatggagcatccggtacttttaagaacacttgcccctttggatatgaatatgtgcacatgtgtgtgagcacatgtatgtgtgtgtgtgtgtctgccccaggtgtaggcggaaagctcaaaaggatttcttgtcctttgtaggaggatttttgaagtgttccccttctctttccccttgctcatccattcatcctgcagcttcaggacatttcaacacttacttgctttctatgctgagagctggtgggtggaaggagagggcgcttgtccataggaaatcagggtggtcgcctgccgaggcctggaccttggaacagggcatcatgtgacatcgcagaggacagatggtggaaaagacatgagcaacctaatgggaagaggaaaatgggaaacaatgcattggaagaggaagaaaaaaaataaataaccaaaggttttggcaagtgcagtaccaggtggagaagcttgacttttctatccttgatcattttattccctcccaagaagtcagtcacaggacctggaaggccagaaagggtacatgtgggagacggtctgaggaagtacctcggtcactacaatatttttgcacatataaagggttggggaggaaagagacacaaacgtatttaacacagatttgctggatggaagctgcgtgtgtgaacgtgtgtatgagtgagtgcattttgattttttttttttttttttgcacagttaagagaaaaaatcaaacaagcagaaaaaaaaaagaaaaaagacttatcacggttctgctgaagcttttattttttactggatgatgattattgttattgttactttggcggtacaggactttattttattccatgtttttgttataagaaaaatttcaaacacctcagagaaatagaaaggttaggaagaaagaggagacaaggacagacaaattttctggctgtccccatttctcctgggggaggggtttggggctggtttgactttaattggtgggtgggttgtttctgccgctctgtttgctgcagtccccgtggcctgcttggggactgagaaatttgagccaggtatccagagccacagcccatcttgcttataaaaattatcttctgctgtttgttttccatttcttccgtttggattcttggtgcacgtgtgatatggtatttaaaagcaaagacaagcaacattgtcaaaaagctgtccttgccccccatcccccacccaaatcttttttccaaactcccccagggatcttccttaccccactggcagagcaaacatccaggggctgtccatgtggcttgcgggctcccagagaaaggaattgggccaactttgtcctgtgggatggaggccccttcacggcctccctcgaggcaaagttaatttgtagggtcaccattatgttgagtcatgagcagacagaaggagagaaaaggccatcttccttaccttcccctccaacttatcccgtaccctcccagggaaaatggtaccagactgagccatcaaaatcactgacaaagtttaggtgggaattttttttgcatgttggagagagaagggcttaaggtagcagggaagaagggggctttgtggggtcctaaattttaaggaataagtagaggaagacaagaaacagagtggtaggctggtcatttctcctggccacaagtccccccagatgcagcttttacccattctttgtccttccccataaggagagaccctgacatttcttggtagctgcaaatagtgccactaagtgaaggtggccatcatgccagttacttcctcaggaaaatattttcttgccttcttctttcagtatggttttaaatttgggaacagtggataacccaagtgtcccacaggccaaggtacattccaatggcagcatgatccctgcacccaaagccagcccctaaagcctaccccttgtgcacccgcagcctggtaagtgagcttggctgcttgtgaggagctacaagtgaaagagaagttattttaaataaatcccaaagtttgaggcagactgtccaggactgttcccaggaagaagcaggagttacccacaggaaaagtctctgacctggtcccctcaggcccagctacctgcgcccaccagcagtgaaggttgatgtactggcccagcatctccacctcccccatgcaaccaggtccctggtaccgtgtctcccgttgcatgtctggcttctgcctgtgctcctcctgccacgagcatcctccctgtccctcctcattccaccgtgtctctcctgcacacatagcctctgtcccagggcgatttatccacttgagtacaggagctgctcagacctctcagcccagccctctgtgactgccccagccccatcctaccccacccaaagctgccttcctggctgtaggagctccctcgtctagccaaggccctatgggtccccatccgaggatccacaagcaatgacttcccaaatgacctccactgcaagaagaatccttaccactgtttccagagccgtgaacgatgctgtgatgggcccaggtctcagcaccaccctctgtgacctaaaaagaaaagctcaatttccatctgtcttctttcccaggaccaaggggacacagtaatgtgaagtcaaatacttaaccgagcaaagggccagtattgttatcagtcaaggacaaacctcccacctcacagacagccaagcagtgagggaaagacagacagacataggtaggaaggtgctctgcaggcacaaggcccagagaagcccctctccgggaacttcccctgctccttccaggaacagtgagcccagtgagcagccccagccagctcttcaaggccttcaaggggtctttccatgactgagtcacctccaggagctcacctgacccccagagaagacctaccccaggcagctccgtgccctggcttctccccatgccccaaatccccccccgccatccctcctggtcctcgtctacatcaagggcctcttcccctcttcctgccagctctcaggacaggtgactgggaggccttgaaccctcagcctcttcctttaaaaaaaacaaaacaaaacaaaactgtgggccatttatttgggattttggagttgtttggtttttgtttgtatatcttaatagttcgaaagtaagaagggagccctgctatggatgttaagtccaaattactcggttagtgggagcaaaacctatgacttccaaggggatgaggagaggttcagaggacaggaggagcctcccccattgaaaaaaaaaaatgggtcaggacattccctggatgaggacaatgctaggggtggcatctcacatggctgctgctattcctggtgcttccccacacttttgacagatggagtccttctcctaccgcctcctgccacctcaccctacaggcattctctatgtaggaaacaagagccttattttatagagtggggagctgagacacagcctcaggtaacactgacacagctcccgaatgaggctgggacactctgcaaacctctcctcatggtgctaagggtggcatgctcttgacaggaaacctaaatgaccactcctctcatttggaaagtaatccactgcagtaaaagtttcagacatgcaagagagagtttttttttttttactacaaatttttgctcccccataaaattattttattagagggagtatccaagttttaaaagtatatagaattttttggttgtaagagaaatacatactcattaggatcccgattaaattccttgagtagactggtgcctaccagaaagcaaagcaaagttaaacaaaacgaaacaaaatccttcatatacaaaaagaactttctgtttgtattggcagaggtagtgaggtgattcaggtaggctgaaaatcctgggttgcgggagcctcactttattccattcccacccgctttgatgtctatgcttggctctctgggctgcccctggtactgccgaatcctacacatctcttatcagctttcctcaaactttaaggaggctctgtgagggatgggtcatgggaagacccaagctttccctccgccaggattgcaaaagcaagtagacttggtctatgcagctcttcttccagcaatttctttatttggaattagaacttcctttgttagtatctttgatcttttgactcaagcacattttggaagggctcccttacaaaagtagaatttaaaacagaggatacagttaaagagcaacccaaaggacgcttaagaaaccgagaccacttcaccaaacaggactaaggaacactttcgtgcacagaagtcagccgcaatccaggcacaggacgaagatgggatacacgtgctcatctgtctgtcctcctttcctctccctccccgacgttctagttagcttgttgacttgttaaaccttctgttcttaaaatgaaaagctagcttacctcaaagaatcttgtttccattcggaaaccaacgattttgtgttttagaatggacagccctcccctcaccactccctaccttggcctggtgtccttgagacatacggtctttgcttagtcgtgtgttggctgctttgagcaggaacaaggcctccaggccctgaggtgggaaggaaggattggatgccactgccctcctccccactttagcatgtaggggccagcccatctcttccagcagggtcctgctgagttaccatagcaaccagcaactccagggtaccacaacagacaatggctcagcgagccgacgtgtggggatgatgcaggggttttggcccagccagaggacccagagttgagcttcaaatgctagagaaggggagaaacaggatggaagggtggtttaaggaaccggcaggggtctttgagtcacatagagaagccgttgaaggaggtagggcaggttatctctgttccagtcacccccttccagccccatcccacttctgtttcaaactaaagctcccacctcgaacattgaccctttgttagaacaaagcaaagcatatctttagacaacagtgttaaaatgagcctcaaatgtatgtggatgagatctctaagaagagggtcttctggttttgatttttaaagaagagtatcctagtaaaatattaaaaaaaaattaaaaagtttttaaaaaggaaacctgtgctatttaaattggagcccagttgtaacttggtaaaggcaagcttctgtacctttgttataattaattgtatacctgtgtatgtaaatataaggcattcctattttgcagttcagaacaaaaaaaacttatttgtaatatagaataaagtttattaaaaaataataaaaatgc

SEQ ID NO: 22798 - DNA, 2004 bp, Homo sapiens
  source 1..2004: mol_type = unassigned DNA
atgagatgcagaccacatggagaccttaatgcatggagatcttgcccactagtagcgtggcccagcgttttgggacacagcccaatcagaccagtatttcccctctggagctggattgaggagggaacatggggactgaaaccttgaatgcttctgctttaattaccccgaaaagcaagtgccactgttagaaatggaaatcaggccagctgctggggcggcaagcagcaggaatgcaaatgtccatgacccctcagatccacacaaagccttctgaccttggaatttaagtaggggagactgcattgctgagtcctggccctctgaggggacgactgtgcctgagtgctgctgtgccactgggacccgcctctgccatgaaagccatgccctggaactggacctgccttctctcccacctcctcatggtgggcatgggctcctccactttgctcacccggcagccagccccgctgtcccagaagcagcggtcatttgtcacattccgaggagagcccgccgagggtttcaatcacctggtggtggatgagaggacaggacacatttacttgggggccgtcaatcggatttacaagctctccagcgacctgaaggtcttggtgacgcatgagacagggccggacgaggacaaccccaagtgttacccaccccgcatcgtccagacctgcaatgagcccctgaccaccaccaacaatgtcaacaagatgctcctcatagactacaaggagaacaggctgattgcctgtgggagcctgtaccaaggcatctgcaagctgctgaggctggaggacctcttcaagctgggggagccttatcataagaaggagcactatctgtcaggtgtcaacgagagcggctcagtctttggagtgatcgtctcctacagcaacctggatgacaagctgttcattgccacggcagtggatgggaagcccgagtattttcccaccatctccagccggaaactgaccaagaactctgaggcggatggcatgttcgcgtacgtcttccatgatgagttcgtggcctcgatgattaagatcccttcggacaccttcaccatcatccctgactttgatatctactatgtctatggttttagcagtggcaactttgtctactttttgaccctccaacctgagatggtgtctccaccaggctccaccaccaaggagcaggtgtatacatccaagctcgtgaggctttgcaaggaggacacagccttcaactcctatgtagaggtgcccattggctgtgagcgcagtggggtggagtaccgcctgctgcaggctgcctacctgtccaaagcgggggccgtgcttggcaggacccttggagtccatccagatgatgacctgctcttcaccgtcttctccaagggccagaagcggaaaatgaaatccctggatgagtcggccctgtgcatcttcatcttgaagcagataaatgaccgcattaaggagcggctgcagtcttgttaccggggcgagggcacgctggacctggcctggctcaaggtgaaggacatcccctgcagcagtgcgctcttaaccattgacgataacttctgtggcctggacatgaatgctcccctgggagtgtccgacatggtgcgtggaattcccgtcttcacggaggacagggaccgcatgacgtctgtcatcgcatatgtctacaagaaccactctctggcctttgtgggcaccaaaagtggcaagctgaagaagtccttcggcacaggtccacaagggggaatcacccaggagtggattggagtggagggagacccacctggggcgaacattgcttctcaggaacagatgctgtgtgtgtatcttcagtgctcaagtcacaaagcaatatcagatcagagagtccagcctctgctttgttgcttcctaaatgtacctgggaattcttcctaaaattactctggaaatttgaatccactttaactaaaaataaatattcatagcacagaaa

SEQ ID NO: 22799 - DNA, 3314 bp, Homo sapiens
  source 1..3314: mol_type = unassigned DNA
agtgtcaatgcggcgctcccgctgaaggagggaaacgcggcgcgtccagtaggggagactgcattgctgagtcctggccctctgaggggacgactgtgcctgagtgctgctgtgccactgggacccgcctctgccatgaaagccatgccctggaactggacctgccttctctcccacctcctcatggtgggcatgggctcctccactttgctcacccggcagccagccccgctgtcccagaagcagcggtcatttgtcacattccgaggagagcccgccgagggtttcaatcacctggtggtggatgagaggacaggacacatttacttgggggccgtcaatcggatttacaagctctccagcgacctgaaggtcttggtgacgcatgagacagggccggacgaggacaaccccaagtgttacccaccccgcatcgtccagacctgcaatgagcccctgaccaccaccaacaatgtcaacaagatgctcctcatagactacaaggagaacaggctgattgcctgtgggagcctgtaccaaggcatctgcaagctgctgaggctggaggacctcttcaagctgggggagccttatcataagaaggagcactatctgtcaggtgtcaacgagagcggctcagtctttggagtgatcgtctcctacagcaacctggatgacaagctgttcattgccacggcagtggatgggaagcccgagtattttcccaccatctccagccggaaactgaccaagaactctgaggcggatggcatgttcgcgtacgtcttccatgatgagttcgtggcctcgatgattaagatcccttcggacaccttcaccatcatccctgactttgatatctactatgtctatggttttagcagtggcaactttgtctactttttgaccctccaacctgagatggtgtctccaccaggctccaccaccaaggagcaggtgtatacatccaagctcgtgaggctttgcaaggaggacacagccttcaactcctatgtagaggtgcccattggctgtgagcgcagtggggtggagtaccgcctgctgcaggctgcctacctgtccaaagcgggggccgtgcttggcaggacccttggagtccatccagatgatgacctgctcttcaccgtcttctccaagggccagaagcggaaaatgaaatccctggatgagtcggccctgtgcatcttcatcttgaagcagataaatgaccgcattaaggagcggctgcagtcttgttaccggggcgagggcacgctggacctggcctggctcaaggtgaaggacatcccctgcagcagtgcgctcttaaccattgacgataacttctgtggcctggacatgaatgctcccctgggagtgtccgacatggtgcgtggaattcccgtcttcacggaggacagggaccgcatgacgtctgtcatcgcatatgtctacaagaaccactctctggcctttgtgggcaccaaaagtggcaagctgaagaagatgcctggtaccagcctctgccctacccttgagctacagacgggaccccgatcccacagagcaacagtgactctggaactcctgttctccagctgttcatcaaactgagaaaaacttcagagctgtgtaggcttatttagtgtgttgtcagccttggatattggaaaatggaaacagatgagacacatctacctccctgtgaccccagccatacatcatagctcatgtcctgccaccccaagtccttagggaaaaaagactttggagaatgtgtctctgcttagcttggctaggtagttggtctcttttctctgccccaagcgtcccatgggtaattttggacaatggagtgtaggcatgtttgactcttgtggtgttatcacttgtatatgtcagtgaaactaactgattctcccatcggaatatagttatctcttgggcctgatatatggtaggataaccttatgctcatctgtccacttctgcagccaagtcgcctggccagtgtgtgtgtgtgtgtgtgtgtgtgtgtgtgtgtgtgtgtgtgtgtatgcttatctgtgtttaaaggtgtgtgtgcatacacagggcagagaggatggagcccaccgtactgcagcatcatgtaattaactcagtgctcagaaccatcccagcctctgcgggaaagagaaaaggaagccaacagtgcctgatgagctgatcatatgtgcaaaagctctgttggcatctggtccaggagagcacccaaaaaaagttaattggtgttgtccagtctcctttccttaagactatggttacaacaaagcgtgagcagtgtctcctgcatggccactatccagcacaattccataattcccccatagagccggtggggaggaggaggtgagtggcgaaggaagtggaaacacttggtgtcatgtgctcctatcatttctactagcttactgggaaataaagtgtagtcaagagtgtatgaaggcaagatgtaaaattagcgactggtgctaatctggttacttgaaaacaagtgaaagtgctgtagatttgttctgttgctaagaaccaccacactaaacctcgtatagttcctggaggatacacaacagtgtaattctctttagggtgtgccacaggttcctggcctgtgggagggaatgaatcaggagggctcttgagaaccttcatctgtgtgcttgcactgaaagtgagtcccaaagctggagatttagtgagagcaggcaacccctctgtgtctcactgtccatattctggaggcagaggtttgtaacaggccatgtgcacctgcatagggatgggtaaagcaaggactttgaaagagttgaaaagcattataaacagttgttcagaaatacgtcccaggagttccatgtgaaactggctctgtgtgcattgaagcatggctgttgggaattctaactggtccaacactcctgcaaaacaatgtgtaaatatttaggaagaaacttgaaaatagtcaaatcctttgaactggtgacaattttttaaagaatcaattctaatttgtttcaagggtaataatcaccaagatacacatttcagcatttatttagtctatcaaaaattggaattgatatatacactcatttataggagaatggttaggtagatttggtatatttatgtagtcattgaaaacttagtttataaaggccaatcttgtaactgattcttgtgtgataacattcagtgaaaaagcatgagacaattagaaagcatgatacaatgaataaaataaaaactggaaagagaaccatcaaaatgct

SEQ ID NO: 22800 - DNA, 6351 bp, Homo sapiens
  source 1..6351: mol_type = unassigned DNA
cccgggcgccatcgagccttggcggcggacgtgcagagaatctcgatgctggcctggagcagaaactgagctggaccactggagcctcggtgagggggtgcggggggcaatggcactgcagctctgggccctgaccctgctgggcctgctgggcgcaggtgccagcctgaggccccgcaagctggacttcttccgcagcgagaaagagctgaaccacctggctgtggatgaggcctcaggcgtggtgtacctgggggcggtgaatgccctctaccagctggatgcgaagctgcagctggagcagcaggtggccacgggcccggccctggacaacaagaagtgcacgccgcccatcgaggccagccagtgccatgaggctgagatgactgacaatgtcaaccagctgctgctgctcgaccctcccaggaagcgcctggtggagtgcggcagcctcttcaagggcatctgcgctctgcgcgccctgagcaacatctccctccgcctgttctacgaggacggcagcggggagaagtctttcgtggccagcaatgatgagggcgtggccacagtggggctggtgagctccacgggtcctggtggtgaccgcgtgctgtttgtgggcaaaggcaatgggccacacgacaacggcatcatcgtgagcactcggctgttggaccggactgacagcagggaggcctttgaagcctacacggaccacgccacctacaaggccggctacctgtccaccaacacacagcagttcgtggcggccttcgaggacggcccctacgtcttctttgtcttcaaccagcaggacaagcacccggcccggaaccgcacgctgctggcacgcatgtgcagagaagaccccaactactactcctacctggagatggacctgcagtgccgggaccccgacatccacgccgctgcctttggcacctgcctggccgcctccgtggctgcgcctggctctggcagggtgctatatgctgtcttcagcagagacagccggagcagtggggggcccggtgcgggcctctgcctgttcccgctggacaaggtgcacgccaagatggaggccaaccgcaacgcctgttacacaggcacccgggaggcccgtgacatcttctacaagcccttccacggcgatatccagtgcggcggccacgcgccgggctccagcaagagcttcccatgtggctcggagcacctgccctacccgctgggcagccgcgacgggctcagaggcacagccgtgctgcagcgtggaggcctgaacctcacggccgtgacggtcgccgccgagaacaaccacactgttgcttttctgggcacctctgatggccggatcctcaaggtgtacctcaccccagatggcacctcctcagagtacgactctatccttgtggagataaacaagagagtcaagcgcgacctggtactgtctggagacctgggcagcctgtacgccatgacccaggacaaggtgttccggctgccggtgcaggagtgcctgagctacccgacctgcacccagtgccgcgactcccaggacccctactgcggctggtgcgtcgtcgagggacgatgcacccggaaggccgagtgtccgcgggccgaggaggccagccactggctgtggagccgaagcaagtcctgcgtggccgtcaccagcgcccagccacagaacatgagccggcgggcccagggggaggtgcagctgaccgtcagccccctccctgccctgagcgaggaggacgagttgctgtgcctttttggggagtcgccgccacaccccgcccgcgtggagggcgaggccgtcatctgcaactccccaagcagcatccccgtcacaccgccaggccaggaccacgtggccgtgaccatccagctcctccttagacgaggcaacatcttcctcacgtcctaccagtaccccttctacgactgccgccaggccatgagcctggaggagaacctgccgtgcatctcctgcgtgagcaaccgctggacctgccagtgggacctgcgctaccacgagtgccgggaggcttcgcccaaccctgaggacggcatcgtccgtgcccacatggaggacagctgtccccagttcctgggacccagccccctggtgatccccatgaaccacgagacagatgtgaacttccagggcaagaacctggacaccgtgaagggttcctccctgcacgtgggcagtgacttgctcaagttcatggagccggtgaccatgcaggaatctgggaccttcgcctttcggaccccaaagctgtcccacgatgccaacgagacgctgcccctgcacctctacgtcaagtcttacggcaagaatatcgacagcaagctccatgtgaccctctacaactgctcctttggccgcagcgactgcagcctgtgccgggccgctaaccccgactacaggtgtgcgtggtgcgggggccagagcaggtgcgtgtatgaggccctgtgcaacaccacctccgagtgcccgccgcccgtcatcaccaggatccagcctgagacgggccccctgggtgggggcatccgcatcaccatcctggggtccaatttgggcgtccaagcaggggacatccagaggatctctgtggccggccggaactgctcctttcagccggaacgttactccgtgtccacccggatcgtgtgtgtgatcgaggctgcggagacgcctttcacggggggtgtcgaggtggacgtcttcgggaaactgggccgttcgcctcccaatgtccagttcaccttccaacagcccaagcctctcagtgtggagccgcagcagggaccgcaggcgggcggcaccacactgaccatccacggcacccacctggacacgggctcccaggaggacgtgcgggtgaccctcaacggcgtcccgtgtaaagtgacgaagtttggggcgcagctccagtgtgtcactggcccccaggcgacacggggccagatgcttctggaggtctcctacggggggtcccccgtgcccaaccccggcatcttcttcacctaccgcgaaaaccccgtactgcgagccttcgagccgctacgaagctttgccagtggtggccgcagcatcaacgtcacgggtcagggcttcagcctgatccagaggtttgccatggtggtcatcgcggagcccctgcagtcctggcagccgccgcgggaggctgaatccctgcagcccatgacggtggtgggtacagactacgtgttccacaatgacaccaaggtcgtcttcctgtccccggctgtgcctgaggagccagaggcctacaacctcacggtgctgatcgagatggacgggcaccgtgccctgctcagaacagaggccggggccttcgagtacgtgcctgaccccacctttgagaacttcacaggtggcgtcaagaagcaggtcaacaagctcatccacgcccggggcaccaatctgaacaaggcgatgacgctgcaggaggccgaggccttcgtgggtgccgagcgctgcaccatgaagacgctgacggagaccgacctgtactgtgagcccccggaggtgcagcccccgcccaagcggcggcagaaacgagacaccacacacaacctgcccgagttcattgtgaagttcggctctcgcgagtgggtgctgggccgcgtggagtacgacacacgggtgagcgacgtgccgctcagcctcatcttgccgctggtcatcgtgcccatggtggtcgtcatcgcggtgtctgtctactgctactggaggaagagccagcaggccgaacgagagtatgagaagatcaagtcccagctggagggcctggaggagagcgtgcgggaccgctgcaagaaggaattcacagacctgatgatcgagatggaggaccagaccaacgacgtgcacgaggccggcatccccgtgctggactacaagacctacaccgaccgcgtcttcttcctgccctccaaggacggcgacaaggacgtgatgatcaccggcaagctggacatccctgagccgcggcggccggtggtggagcaggccctctaccagttctccaacctgctgaacagcaagtctttcctcatcaatttcatccacaccctggagaaccagcgggagttctcggcccgcgccaaggtctacttcgcgtccctgctgacggtggcgctgcacgggaaactggagtactacacggacatcatgcacacgctcttcctggagctcctggagcagtacgtggtggccaagaaccccaagctgatgctgcgcaggtctgagactgtggtggagaggatgctgtccaactggatgtccatctgcctgtaccagtacctcaaggacagtgccggggagcccctgtacaagctcttcaaggccatcaaacatcaggtggaaaagggcccggtggatgcggtacagaagaaggccaagtacactctcaacgacacggggctgctgggggatgatgtggagtacgcacccctgacggtgagcgtgatcgtgcaggacgagggagtggacgccatcccggtgaaggtcctcaactgtgacaccatctcccaggtcaaggagaagatcattgaccaggtgtaccgtgggcagccctgctcctgctggcccaggccagacagcgtggtcctggagtggcgtccgggctccacagcgcagatcctgtcggacctggacctgacgtcacagcgggagggccggtggaagcgcgtcaacacccttatgcactacaatgtccgggatggagccaccctcatcctgtccaaggtgggggtctcccagcagccggaggacagccagcaggacctgcctggggagcgccatgccctcctggaggaggagaaccgggtgtggcacctggtgcggccgaccgacgaggtggacgagggcaagtccaagagaggcagcgtgaaagagaaggagcggacgaaggccatcaccgagatctacctgacgcggctgctctcagtcaagggcacactgcagcagtttgtggacaacttcttccagagcgtgctggcgcctgggcacgcggtgccacctgcagtcaagtacttcttcgacttcctggacgagcaggcagagaagcacaacatccaggatgaagacaccatccacatctggaagacgaacagcttaccgctccggttctgggtgaacatcctcaagaacccccacttcatctttgacgtgcatgtccacgaggtggtggacgcctcgctgtcagtcatcgcgcagaccttcatggatgcctgcacgcgcacggagcataagctgagccgcgattctcccagcaacaagctgctgtacgccaaggagatctccacctacaagaagatggtggaggattactacaaggggatccggcagatggtgcaggtcagcgaccaggacatgaacacacacctggcagagatttcccgggcgcacacggactccttgaacaccctcgtggcactccaccagctctaccaatacacgcagaagtactatgacgagatcatcaatgccttggaggaggatcctgccgcccagaagatgcagctggccttccgcctgcagcagattgccgctgcactggagaacaaggtcactgacctctgacctacaatctccagtgctgccttgggacataggtacctgaggtacctgagagcccctcaggggaggaggccgagtggctgtggctgaggcccccaccctcccctggaacgcgccccaagccggagtgggtgcagccggaacccgcccagcgtctagactgtagcatcttcctctgagcaataccgccgggcaccgcaccagcaccagccccagccccagctccctccggccgcagaaccagcatcgggtgttcactgtcgagtctccagtgatttgaaaatgtgccttacgctgccacgctgggggcagctggcctccgcctccgcccacgcaccagcagccgcctccatgccctaggttgggcccctgggggatctgagggcctgtggcccccagggcaagttcccagatcctatgtctgtctgtccaccacgagatgggaggaggagaaaaagcggtacgatgccttcctgacctcaccggcctccccaagggtgccggcactctgggtggactcacggctgctgggccccacgtcaaaggtcaagtgagacgtaggtcaagtcctacgtcggggcccagacatcctggggtcctggtctgtcagacaggctgccctagagccccacccagtccggggggactgggagcagttccaagaccaccccacccctttttgtaaatcttgttcattgtaaatcaaatacagcgtctttttcactctg

SEQ ID NO: 22801 - DNA, 1387 bp, Homo sapiens
  source 1..1387: mol_type = unassigned DNA
cccagacctgatgatcgagatggaggaccagaccaacgacgtgcacgaggccggcatccccgtgctggactacaagacctacaccgaccgcgtcttcttcctgccctccaaggacggcgacaaggacgtgatgatcaccggcaagctggacatccctgagccgcggcggccggtggtggagcaggccctctaccagttctccaacctgctgaacagcaagtctttcctcatcaatttcatccacaccctggagaaccagcgggagttctcggcccgcgccaaggtctacttcgcgtccctgctgacggtggcgctgcacgggaaactggagtactacacggacatcatgcacacgctcttcctggagctcctggagcagtacgtggtggccaagaaccccaagctgatgctgcgcaggtctgagactgtggtggagaggatgctgtccaactggatgtccatctgcctgtaccagtacctcaaggacagtgccggggagcccctgtacaagctcttcaaggccatcaaacatcaggtggaaaagggcccggtggatgcggtacagaagaaggccaagtacactctcaacgacacggggctgctgggggatgatgtggagtacgcacccctgacggtgagcgtgatcgtgcaggacgagggagtggacgccatcccggtgaaggtcctcaactgtgacaccatctcccaggtcaaggagaagatcattgaccaggtgtaccgtgggcagccctgctcctgcggcccaggccagacagcgtggtcctggagtggcgtccgggctccacagcgcagatccgtcggacctggacctgacgtcacagcgggagggccggtggaagcgcgtcaacacccttatgcactacaatgtccgggatggagccaccctcatcctgtccaaggtgggggtctcccagcagccggaggacagccagcaggacctgcctggagcgccatgcctcctggaggaggagaaccgggtgtggcacctggtgcggccgaccgacgaggtggacgagggcaagtccaagagaggcagcgtgaaagagaaggagcggacgaaggccatcaccgagatctacctgacgcggctgctctcagtcaagggcacactgcagcagtttgtggacaacttcttccagagcgtgctggcgcctggcacgcggtgccacctgcagtcaagtacttcttcgacttcctggacgagcaggcagagaagcacaacatccaggatgaagacaccatccacatctggaagacgaacagcttaccgctccggttctgggtgaacatcctcaagaacccccacttcatctttgacgtgcatgtcacgaggtggtggacgcctcgctgtcagtcatcgcgcaga

SEQ ID NO: 22802 - DNA, 3701 bp, Homo sapiens
  source 1..3701: mol_type = unassigned DNA
ttcagccggaacgttactccgtgtccacccggatcgtgtgtgtgatcgaggctgcggagacgcctttcacggggggtgtcgaggtggacgtcttcgggaaactgggccgttcgcctcccaatgtccagttcaccttccaacagcccaagcctctcagtgtggagccgcagcagggaccgcaggcgggcggcaccacactgaccatccacggcacccacctggacacgggctcccaggaggacgtgcgggtgaccctcaacggcgtcccgtgtaaagtgacgaagtttggggcgcagctccagtgtgtcactggcccccaggcgacacggggccagatgcttctggaggtctcctacggggggtcccccgtgcccaaccccggcatcttcttcacctaccgcgaaaaccccgtactgcgagccttcgagccgctacgaagctttgccagtggtggccgcagcatcaacgtcacgggtcagggcttcagcctgatccagaggtttgccatggtggtcatcgcggagcccctgcagtcctggcagccgccgcgggaggctgaatccctgcagcccatgacggtggtgggtacagactacgtgttccacaatgacaccaaggtcgtcttcctgtccccggctgtgcctgaggagccagaggcctacaacctcacggtgctgatcgagatggacgggcaccgtgccctgctcagaacagaggccggggccttcgagtacgtgcctgaccccacctttgagaacttcacaggtggcgtcaagaagcaggtcaacaagctcatccacgcccggggcaccaatctgaacaaggcgatgacgctgcaggaggccgaggccttcgtgggtgccgagcgctgcaccatgaagacgctgacggagaccgacctgtactgtgagcccccggaggtgcagcccccgcccaagcggcggcagaaacgagacaccacacacaacctgcccgagttcattgtgaagttcggctctcgcgagtgggtgctgggccgcgtggagtacgacacacgggtgagcgacgtgccgctcagcctcatcttgccgctggtcatcgtgcccatggtggtcgtcatcgcggtgtctgtctactgctactggaggaagagccagcaggccgaacgagagtatgagaagatcaagtcccagctggagggcctggaggagagcgtgcgggaccgctgcaagaaggaattcacagacctgatgatcgagatggaggaccagaccaacgacgtgcacgaggccggcatccccgtgctggactacaagacctacaccgaccgcgtcttcttcctgccctccaaggacggcgacaaggacgtgatgatcaccggcaagctggacatccctgagccgcggcggccggtggtggagcaggccctctaccagttctccaacctgctgaacagcaagtctttcctcatcaatttcatccacaccctggagaaccagcgggagttctcggcccgcgccaaggtctacttcgcgtccctgctgacggtggcgctgcacgggaaactggagtactacacggacatcatgcacacgctcttcctggagctcctggagcagtacgtggtggccaagaaccccaagctgatgctgcgcaggtctgagactgtggtggagaggatgctgtccaactggatgtccatctgcctgtaccagtacctcaaggacagtgccggggagcccctgtacaagctcttcaaggccatcaaacatcaggtggaaaagggcccggtggatgcggtacagaagaaggccaagtacactctcaacgacacggggctgctgggggatgatgtggagtacgcacccctgacggtgagcgtgatcgtgcaggacgagggagtggacgccatcccggtgaaggtcctcaactgtgacaccatctcccaggtcaaggagaagatcattgaccaggtgtaccgtgggcagccctgctcctgctggcccaggccagacagcgtggtcctggagtggcgtccgggctccacagcgcagatcctgtcggacctggacctgacgtcacagcgggagggccggtggaagcgcgtcaacacccttatgcactacaatgtccgggatggagccaccctcatcctgtccaaggtgggggtctcccagcagccggaggacagccagcaggacctgcctggggagcgccatgccctcctggaggaggagaaccgggtgtggcacctggtgcggccgaccgacgaggtggacgagggcaagtccaagagaggcagcgtgaaagagaaggagcggacgaaggccatcaccgagatctacctgacgcggctgctctcagtcaagggcacactgcagcagtttgtggacaacttcttccagagcgtgctggcctgggcacgcggtgccacctgcagtcaagtacttcttcgacttcctggacgagcaggcagagaagcacaacatccaggatgaagacaccatccacatctggaagacgaacagcttaccgctccggttctgggtgaacatcctcaagaacccccacttcatctttgacgtgcatgtccacgaggtggtggacgcctcgctgtcagtcatcgcgcagaccttcatggatgcctgcacgcgcacggagcataagctgagccgcgattctcccagcaacaagctgctgtacgccaaggagatctccacctacaagaagatggtggaggattactacaaggggatccggcagatggtgcaggtcagcgaccaggacatgaacacacacctggcagagatttcccgggcgcacacggactccttgaacaccctcgtggcactccaccagctctaccaatacacgcagaagtactatgacgagatcatcaatgccttggaggaggatcctgccgcccagaagatgcagctggccttccgcctgcagcagattgccgctgcactggagaacaaggtcactgacctctgacctacaatctccagtgctgccttgggacataggtacctgaggtacctgagagcccctcaggggaggaggccgagtggctgtggctgaggcccccaccctcccctggaacgcgccccaagccggagtgggtgcagccggaacccgcccagcgtctagactgtagcatcttcctctgagcaataccgccgggcaccgcaccagcaccagccccagccccagctccctccggccgcagaaccagcatcgggtgttcactgtcgagtctccagtgatttgaaaatgtgccttacgctgccacgctgggggcagctggcctccgcctccgcccacgcaccagcagccgcctccatgccctaggttgggcccctgggggatctgagggcctgtggcccccagggcaagttcccagatcctatgtctgtctgtccaccacgagatgggaggaggagaaaaagcggtacgatgccttcctgacctcaccggcctccccaagggtgccggcactctgggtggactcacggctgctgggccccacgtcaaaggtcaagtgagacgtaggtcaagtcctacgtcggggcccagacatcctggggtcctggtctgtcagacaggctgccctagagccccacccagtccggggggactgggagcagttccaagaccaccccacccctttttgtaaatcttgttcattgtaaatcaaatacagcgtctttttcactctg

SEQ ID NO: 22803 - DNA, 1835 bp, Homo sapiens
  source 1..1835: mol_type = unassigned DNA
atgtcctgtcctgatgagttggtggttcctgctgtagccatcggcctcgtgtgccccgagcgcctggcggtgcccacccctcccacaggaggtcctcaggaagcacggagacatcgagaatctcgatgctggcctggagcagaaactgagctggaccactggagcctcggtgagggggtgcggggggcaatggcactgcagctctgggccctgaccctgctgggcctgctgggcgcaggtgccagcctgaggccccgcaagctggacttcttccgcagcgagaaagagctgaaccacctggctgtggatgaggcctcaggcgtggtgtacctgggggcggtgaatgccctctaccagctggatgcgaagctgcagctggagcagcaggtggccacgggcccggccctggacaacaagaagtgcacgccgcccatcgaggccagccagtgccatgaggctgagatgactgacaatgtcaaccagctgctgctgctcgaccctcccaggaagcgcctggtggagtgcggcagcctcttcaagggcatctgcgctctgcgcgccctgagcaacatctccctccgcctgttctacgaggacggcagcggggagaagtctttcgtggccagcaatgatgagggcgtggccacagtggggctggtgagctccacgggtcctggtggtgaccgcgtgctgtttgtgggcaaaggcaatgggccacacgacaacggcatcatcgtgagcactcggctgttggaccggactgacagcagggaggcctttgaagcctacacggaccacgccacctacaaggccggctacctgtccaccaacacacagcagttcgtggcggccttcgaggacggcccctacgtcttctttgtcttcaaccagcaggacaagcacccggcccggaaccgcacgctgctggcacgcatgtgcagagaagaccccaactactactcctacctggagatggacctgcagtgccgggaccccgacatccacgccgctgcctttggcacctgcctggccgcctccgtggctgcgcctggctctggcagggtgctatatgctgtcttcagcagagacagccggagcagtggggggcccggtgcgggcctctgcctgttcccgctggacaaggtgcacgccaagatggaggccaaccgcaacgcctgttacacaggcacccgggaggcccgtgacatcttctacaagcccttccacggcgatatccagtgcggcggccacgcgccgggctccagcaagagcttcccatgtggctcggagcacctgccctacccgctgggcagccgcgacgggctcagaggcacagccgtgctgcagcgtggaggcctgaacctcacggccgtgacggtcgccgccgagaacaaccacactgttgcttttctgggcacctctgatggccggatcctcaaggtgtacctcaccccagatggcacctcctcagagtacgactctatccttgtggagataaacaagagagtcaagcgcgacctggtactgtctggagacctgggcagcctgtacgccatgacccaggacaaggtgttccggctgccggtgcaggagtgcctgagctacccgacctgcacccagctccctccggccgcagaaccagcatcgggtgttcactgtcgagtctccagtgatttgaaaatgtgccttacgctgccacgctgggggcagctggcctccgcctccgcccacgcaccagcagccgcctccatgccctaggttgggcccctgggggatctgagggcctgtggcccccagggcaagttcccagatcctatgtctgtctgtccaccacg

SEQ ID NO: 22804 - DNA, 609 bp, Homo sapiens
  source 1..609: mol_type = unassigned DNA
cagcgccgagcgcggcccgggcgccatcgagccttggcggcggacgtgcagagaatctcgatgctggcctggagcagaaactgagctggaccactggagcctcggtgagggggtgcggggggcaatggcactgcagctctgggccctgaccctgctgggcctgctgggcgcaggtgccagcctgaggccccgcaagctggacttcttccgcagcgagaaagagctgaaccacctggctgtggatgaggcctcaggcgtggtgtacctgggggcggtgaatgccctctaccagctggatgcgaagctgcagctggagcagcaggtggccacgggcccggccctggacaacaagaagtgcacgccgcccatcgaggccagccagtgccatgaggctgagatgactgacaatgtcaaccagctgctgctgctcgaccctcccaggaagcgcctggtggagtgcggcagcctcttcaagggcatctgcgctctgcgcgccctgagcaacatctccctccgcctgttctacgaggacggcagcggggagaagtctttcgtggccagcaatgatgagggcgtggccacagtggggctggtgagctccacgggtcc

SEQ ID NO: 22805 - DNA, 1620 bp, Homo sapiens
  source 1..1620: mol_type = unassigned DNA
atgtcctgtcctgatgagttggtggttcctgctgtagccatcggcctcgtgtgccccgagcgcctggcggtgcccacccctcccacaggaggtcctcaggaagcacggagacatcgagaatctcgatgctggcctggagcagaaactgagctggaccactggagcctcggtgagggggtgcggggggcaatggcactgcagctctgggccctgaccctgctgggcctgctgggcgcaggtgccagcctgaggccccgcaagctggacttcttccgcagcgagaaagagctgaaccacctggctgtggatgaggcctcaggcgtggtgtacctgggggcggtgaatgccctctaccagctggatgcgaagctgcagctggagcagcaggtggccacgggcccggccctggacaacaagaagtgcacgccgcccatcgaggccagccagtgccatgaggctgagatgactgacaatgtcaaccagctgctgctgctcgaccctcccaggaagcgcctggtggagtgcggcagcctcttcaagggcatctgcgctctgcgcgccctgagcaacatctccctccgcctgttctacgaggacggcagcggggagaagtctttcgtggccagcaatgatgagggcgtggccacagtggggctggtgagctccacgggtcctggtggtgaccgcgtgctgtttgtgggcaaaggcaatgggccacacgacaacggcatcatcgtgagcactcggctgttggaccggactgacagcagggaggcctttgaagcctacacggaccacgccacctacaaggccggctacctgtccaccaacacacagcagttcgtggcggccttcgaggacggcccctacgtcttctttgtcttcaaccagcaggacaagcacccggcccggaaccgcacgctgctggcacgcatgtgcagagaagaccccaactactactcctacctggagatggacctgcagtgccgggaccccgacatccacgccgctgcctttggcacctgcctggccgcctccgtggctgcgcctggctctggcagggtgctatatgctgtcttcagcagagacagccggagcagtggggggcccggtgcgggcctctgcctgttcccgctggacaaggtgcacgccaagatggaggccaaccgcaacgcctgttacacaggcacccgggaggcccgtgacatcttctacaagcccttccacggcgatatccagtgcggcggccacgcgccgggctccagcaagagcttcccatgtggctcggagcacctgccctacccgctgggcagccgcgacgggctcagaggcacagccgtgctgcagcgtggaggcctgaacctcacggccgtgacggtcgccgccgagaacaaccacactgttgcttttctgggcacctctgatggccggatcctcaaggtgtacctcaccccagatggcacctcctcagagtacgactctatccttgtggagataaacaagagagtcaagcgcgacctggtactgtctggagacctgggcagcctgtacgccatgacccaggacaaggtgttccggctgccggtgcaggagtgcctgagctacccgacctgcacccag

SEQ ID NO: 22806 - DNA, 6383 bp, Homo sapiens
  source 1..6383: mol_type = unassigned DNA
atggcagcagcgcgggccagagcgcagcgccgagcgcggcccgggcgccatcgagccttggcggcggacgtgcagagaatctcgatgctggcctggagcagaaactgagctggaccactggagcctcgggtgcggggggcaatggcactgcagctctgggccctgaccctgctgggcctgctgggcgcaggtgccagcctgaggccccgcaagctggacttcttccgcagcgagaaagagctgaaccacctggctgtggatgaggcctcaggcgtggtgtacctgggggcggtgaatgccctctaccagctggatgcgaagctgcagctggagcagcaggtggccacgggcccggccctggacaacaagaagtgcacgccgcccatcgaggccagccagtgccatgaggctgagatgactgacaatgtcaaccagctgctgctgctcgaccctcccaggaagcgcctggtggagtgcggcagcctcttcaagggcatctgcgctctgcgcgccctgagcaacatctccctccgcctgttctacgaggacggcagcggggagaagtctttcgtggccagcaatgatgagggcgtggccacagtggggctggtgagctccacgggtcctggtggtgaccgcgtgctgtttgtgggcaaaggcaatgggccacacgacaacggcatcatcgtgagcactcggctgttggaccggactgacagcagggaggcctttgaagcctacacggaccacgccacctacaaggccggctacctgtccaccaacacacagcagttcgtggcggccttcgaggacggcccctacgtcttctttgtcttcaaccagcaggacaagcacccggcccggaaccgcacgctgctggcacgcatgtgcagagaagaccccaactactactcctacctggagatggacctgcagtgccgggaccccgacatccacgccgctgcctttggcacctgcctggccgcctccgtggctgcgcctggctctggcagggtgctatatgctgtcttcagcagagacagccggagcagtggggggcccggtgcgggcctctgcctgttcccgctggacaaggtgcacgccaagatggaggccaaccgcaacgcctgttacacaggcacccgggaggcccgtgacatcttctacaagcccttccacggcgatatccagtgcggcggccacgcgccgggctccagcaagagcttcccatgtggctcggagcacctgccctacccgctgggcagccgcgacgggctcagaggcacagccgtgctgcagcgtggaggcctgaacctcacggccgtgacggtcgccgccgagaacaaccacactgttgcttttctgggcacctctgatggccggatcctcaaggtgtacctcaccccagatggcacctcctcagagtacgactctatccttgtggagataaacaagagagtcaagcgcgacctggtactgtctggagacctgggcagcctgtacgccatgacccaggacaaggtgttccggctgccggtgcaggagtgcctgagctacccgacctgcacccagtgccgcgactcccaggacccctactgcggctggtgcgtcgtcgagggacgatgcacccggaaggccgagtgtccgcgggccgaggaggccagccactggctgtggagccgaagcaagtcctgcgtggccgtcaccagcgcccagccacagaacatgagccggcgggcccagggggaggtgcagctgaccgtcagccccctccctgccctgagcgaggaggacgagttgctgtgcctttttggggagtcgccgccacaccccgcccgcgtggagggcgaggccgtcatctgcaactccccaagcagcatccccgtcacaccgccaggccaggaccacgtggccgtgaccatccagctcctccttagacgaggcaacatcttcctcacgtcctaccagtaccccttctacgactgccgccaggccatgagcctggaggagaacctgccgtgcatctcctgcgtgagcaaccgctggacctgccagtgggacctgcgctaccacgagtgccgggaggcttcgcccaaccctgaggacggcatcgtccgtgcccacatggaggacagctgtccccagttcctgggacccagccccctggtgatccccatgaaccacgagacagatgtgaacttccagggcaagaacctggacaccgtgaagggttcctccctgcacgtgggcagtgacttgctcaagttcatggagccggtgaccatgcaggaatctgggaccttcgcctttcggaccccaaagctgtcccacgatgccaacgagacgctgcccctgcacctctacgtcaagtcttacggcaagaatatcgacagcaagctccatgtgaccctctacaactgctcctttggccgcagcgactgcagcctgtgccgggccgctaaccccgactacaggtgtgcgtggtgcgggggccagagcaggtgcgtgtatgaggccctgtgcaacaccacctccgagtgcccgccgcccgtcatcaccaggatccagcctgagacgggccccctgggtgggggcatccgcatcaccatcctggggtccaatttgggcgtccaagcaggggacatccagaggatctctgtggccggccggaactgctcctttcagccggaacgttactccgtgtccacccggatcgtgtgtgtgatcgaggctgcggagacgcctttcacggggggtgtcgaggtggacgtcttcgggaaactgggccgttcgcctcccaatgtccagttcaccttccaacagcccaagcctctcagtgtggagccgcagcagggaccgcaggcgggcggcaccacactgaccatccacggcacccacctggacacgggctcccaggaggacgtgcgggtgaccctcaacggcgtcccgtgtaaagtgacgaagtttggggcgcagctccagtgtgtcactggcccccaggcgacacggggccagatgcttctggaggtctcctacggggggtcccccgtgcccaaccccggcatcttcttcacctaccgcgaaaaccccgtactgcgagccttcgagccgctacgaagctttgccagtggtggccgcagcatcaacgtcacgggtcagggcttcagcctgatccagaggtttgccatggtggtcatcgcggagcccctgcagtcctggcagccgccgcgggaggctgaatccctgcagcccatgacggtggtgggtacagactacgtgttccacaatgacaccaaggtcgtcttcctgtccccggctgtgcctgaggagccagaggcctacaacctcacggtgctgatcgagatggacgggcaccgtgccctgctcagaacagaggccggggccttcgagtacgtgcctgaccccacctttgagaacttcacaggtggcgtcaagaagcaggtcaacaagctcatccacgcccggggcaccaatctgaacaaggcgatgacgctgcaggaggccgaggccttcgtgggtgccgagcgctgcaccatgaagacgctgacggagaccgacctgtactgtgagcccccggaggtgcagcccccgcccaagcggcggcagaaacgagacaccacacacaacctgcccgagttcattgtgaagttcggctctcgcgagtgggtgctgggccgcgtggagtacgacacacgggtgagcgacgtgccgctcagcctcatcttgccgctggtcatcgtgcccatggtggtcgtcatcgcggtgtctgtctactgctactggaggaagagccagcaggccgaacgagagtatgagaagatcaagtcccagctggagggcctggaggagagcgtgcgggaccgctgcaagaaggaattcacagacctgatgatcgagatggaggaccagaccaacgacgtgcacgaggccggcatccccgtgctggactacaagacctacaccgaccgcgtcttcttcctgccctccaaggacggcgacaaggacgtgatgatcaccggcaagctggacatccctgagccgcggcggccggtggtggagcaggccctctaccagttctccaacctgctgaacagcaagtctttcctcatcaatttcatccacaccctggagaaccagcgggagttctcggcccgcgccaaggtctacttcgcgtccctgctgacggtggcgctgcacgggaaactggagtactacacggacatcatgcacacgctcttcctggagctcctggagcagtacgtggtggccaagaaccccaagctgatgctgcgcaggtctgagactgtggtggagaggatgctgtccaactggatgtccatctgcctgtaccagtacctcaaggacagtgccggggagcccctgtacaagctcttcaaggccatcaaacatcaggtggaaaagggcccggtggatgcggtacagaagaaggccaagtacactctcaacgacacggggctgctgggggatgatgtggagtacgcacccctgacggtgagcgtgatcgtgcaggacgagggagtggacgccatcccggtgaaggtcctcaactgtgacaccatctcccaggtcaaggagaagatcattgaccaggtgtaccgtgggcagccctgctcctgctggcccaggccagacagcgtggtcctggagtggcgtccgggctccacagcgcagatcctgtcggacctggacctgacgtcacagcgggagggccggtggaagcgcgtcaacacccttatgcactacaatgtccgggatggagccaccctcatcctgtccaaggtgggggtctcccagcagccggaggacagccagcaggacctgcctggggagcgccatgccctcctggaggaggagaaccgggtgtggcacctggtgcggccgaccgacgaggtggacgagggcaagtccaagagaggcagcgtgaaagagaaggagcggacgaaggccatcaccgagatctacctgacgcggctgctctcagtcaagggcacactgcagcagtttgtggacaacttcttccagagcgtgctggcgcctgggcacgcggtgccacctgcagtcaagtacttcttcgacttcctggacgagcaggcagagaagcacaacatccaggatgaagacaccatccacatctggaagacgaacagcttaccgctccggttctgggtgaacatcctcaagaacccccacttcatctttgacgtgcatgtccacgaggtggtggacgcctcgctgtcagtcatcgcgcagaccttcatggatgcctgcacgcgcacggagcataagctgagccgcgattctcccagcaacaagctgctgtacgccaaggagatctccacctacaagaagatggtggaggattactacaaggggatccggcagatggtgcaggtcagcgaccaggacatgaacacacacctggcagagatttcccgggcgcacacggactccttgaacaccctcgtggcactccaccagctctaccaatacacgcagaagtactatgacgagatcatcaatgccttggaggaggatcctgccgcccagaagatgcagctggccttccgcctgcagcagattgccgctgcactggagaacaaggtcactgacctctgacctacaatctccagtgctgccttgggacataggtacctgaggtacctgagagcccctcaggggaggaggccgagtggctgtggctgaggcccccaccctcccctggaacgcgccccaagccggagtgggtgcagccggaacccgcccagcgtctagactgtagcatcttcctctgagcaataccgccgggcaccgcaccagcaccagccccagccccagctccctccggccgcagaaccagcatcgggtgttcactgtcgagtctccagtgatttgaaaatgtgccttacgctgccacgctgggggcagctggcctccgcctccgcccacgcaccagcagccgcctccatgccctaggttgggcccctgggggatctgagggcctgtggcccccagggcaagttcccagatcctatgtctgtctgtccaccacgagatgggaggaggagaaaaagcggtacgatgccttcctgacctcaccggcctccccaagggtgccggcactctgggtggactcacggctgctgggccccacgtcaaaggtcaagtgagacgtaggtcaagtcctacgtcggggcccagacatcctggggtcctggtctgtcagacaggctgccctagagccccacccagtccggggggactgggagcagttccaagaccaccccacccctttttgtaaatcttgttcattgtaaatcaaatacagcgtctttttcactctg

SEQ ID NO: 22807 - DNA, 6146 bp, Homo sapiens
  source 1..6146: mol_type = unassigned DNA
gctcctggcaccgccagctgctacttggccctcgccggtggcccaccaggacaatgcccccccgcagccatctcatgcccatcgccactgccctggggcagctgaactgagcgtatgtgccacgccgcccaggagacccctctgctgcaccacttcatggcccccgtgatggctcgctggcctcccttcggcctctgcctcctcctgctgctgctgtccccaccgccactgcccttgacaggggcccatcgcttctccgcacctaataccactctcaaccacttggcactggcacctggccgaggcacactctatgtcggcgcagtgaaccgcctcttccagctcagccccgagctgcagctcgaggccgtggctgtcactggccctgtaatcgacagccctgactgcgtgcccttccgtgacccagccgagtgcccacaggcccagctcactgacaatgccaaccagctgctgctggtgagcagccgcgcccaggagctggtggcctgcgggcaggtgcggcagggcgtgtgtgagacacggcgccttggggatgtggccgaggtgctgtaccaggctgaggaccctggtgacgggcagtttgtggctgccaataccccgggagtggcaacggtggggctggtggtgcccttgcccggccgggacctcctgcttgtggccagaggcctggcgggcaagctgtcggcaggggtgccacccctggccatccgccagctggccgggtctcagcccttctccagcgagggcctgggccgcctggtggtgggcgacttctccgactacaacaacagctacgtcggggcctttgccgacgcccgctccgcctacttcgtgttccgccgccgcggggcccgggcccaggctgagtaccgctcctacgtggcccgcgtctgcctgggggacaccaacctgtactcctacgtggaggtccccctcgcctgccagggccagggcctcatccaggccgccttccttgccccgggcaccttgctaggggtgtttgccgcgggcccaaggggcacccaggcggcgctctgtgccttccccatggtggagctgggtgccagcatggagcaggcccggagactctgctacacggcgggcggccggggccccagcggcgcagaggaagccaccgtggagtacggcgtcacgtcgcgctgcgtcaccctgccccttgattcccccgagtcgtacccctgtggcgacgagcacacccccagccccattgctggccgccagcccctggaggtccagcctctgctgaagctcgggcagccggtcagcgccgtggcagctctccaggcagatgggcacatgatagccttcctgggggacacccagggccagctgtacaaggtctttctccacggctcccagggccaggtttaccactcccagcaagtggggcctccaggctcagccatcagcccagacctgctgctggacagcagtggcagtcacctctatgtcctgactgcccaccaggtggaccggatacctgtggcagcctgcccccagttccctgactgtgccagctgcctccaggcccaggacccgctgtgtggctggtgtgtcctccagggcaggtgtacccggaagggccagtgcgggcgggcaggccagctgaaccagtggctgtggagttatgaggaggacagccactgcctgcacatccagagcctgctgccgggccaccacccccgccaggagcagggccaggtcactttgtctgtcccccggctgcccatcctggatgcagatgaatacttccattgtgcgttcggggactatgacagcttggctcatgtggaagggccccacgtggcctgtgtcacccctccccaagaccaggtgccacttaaccctccaggcacagaccacgtcactgtgcccctggccctgatgttcgaggacgtgactgtggctgccaccaacttctccttttatgactgcagtgccgtccaggccttggaggcggctgccccgtgtcgcgcttgcgtgggcagcatctggcggtgtcactggtgcccgcagagtagccactgcgtgtacggagagcactgcccagagggcgagaggaccatctacagcgcccaggaggtggacatccaggtgcgtggcccaggggcttgcccacaggtcgaaggcctggcaggtccccacctggtgcctgtgggctgggagagccatttggccctacgcgtgcggaaccttcaacatttccgaggcctgcctgcctccttccactgctggctggagctgcctggagaacttcggggactgccggccaccctggaggagacagcaggggattcaggcctcatccactgccaggcccaccagttttatccctccatgtcccagcgggagctcccagtgcccatctacgtcacccagggtgaagcccagaggctggacaacacccatgctctttatgtgatcctgtacgactgcgccatgggccacccggactgcagccactgccaagcggccaacaggagcctgggctgcctgtggtgtgctgacggccagcctgcctgtcgctatgggcccttgtgcccgccgggggctgtggagctgctgtgtcctgcgcccagcattgatgcagtcgagcccctgaccggtccccctgagggaggcttggccctcaccatcctgggctccaacctgggccgggccttcgccgatgtgcagtacgccgtgagcgtggccagccggccctgcaaccctgagccctctctctaccgcacgtcggcccggattgtgtgtgtgacatctcctgcccccaatggcaccactgggcccgtccgggtggccattaagagccagccaccaggcatctcaagccagcacttcacctaccaggaccctgtcctgctgagcctgagtcctcgctggggcccccaggcagggggcacccagctcaccatccgaggtcagcacctccagacaggtggcaacaccagtgccttcgtgggtggccaaccctgtcccatcctggagccagtgtgtccggaggccatcgtgtgccgtaccaggccccaggctgccccaggagaagcagcggtccttgtggtctttggccatgcccagcgcacactgctcgccagccccttccgctacaccgccaacccccagcttgtagcggcggagcccagtgccagcttccgggggggtgggcgactgatccgtgtcaggggcaccggcctagacgtggtgcagcggcccctactgtctgtgtggctggaggctgacgcagaggtgcaggcttccagggcccagccccaggacccacagccaaggaggagctgtggagcccctgctgcggacccccaggcttgtatccagctcggtggggggctgctgcagtgctccaccgtctgctccgtcaactcgtccagcctcctcctgtgccggagccctgctgtaccagacagagcccacccgcagcgggtcttcttcaccctagacaacgtgcaagtggacttcgccagtgccagtgggggccagggcttcctgtaccagcccaacccccgcctggcacccctcagccgcgaggggcctgcccgcccctaccgcctcaagccaggccatgtcctggatgtggagggcgagggcctcaacctgggcatcagcaaggaggaggtgcgcgtgcacatcggccgcggcgagtgcctggtgaagacgctcacgcgcacccacctgtactgcgagccgcctgcgcacgccccgcagcctgccaatggctccggcctgccacagttcgtggtgcagatgggcaatgtgcagctggccctgggccctgtgcagtacgaggctgaacccccgctgtctgcctttcccgtggaggcccaggcaggcgtgggcatgggtgctgcagtgctgattgccgccgtgctcctcctcaccctcatgtacaggcacaagagcaagcaggccctgcgggactaccagaaggtgctagtgcagctggagagcctggagaccggcgtgggagaccagtgccgcaaggagttcacagacctcatgacggagatgaccgacctcagcagcgacctggagggcagcgggatccccttcctggactaccgcacctacgccgagcgcgccttcttccctggccatggcggttgcccgctgcagcccaagcctgaggggccaggggaggacggccactgtgccactgtgcgccagggcctcacgcagctctccaacctgctcaacagcaagctcttcctcctcacgctcatccacaccctggaggagcagcccagcttttcccagagggatcgctgccatgtggcttcgctgctgtcgctagcgctacacggcaagctggagtacctgacggacatcatgaggaccctgctgggtgacctggcggcccattacgtgcacaggaaccccaagctcatgctacgcaggacagagaccatggtggagaaactgctcaccaactggctgtccatctgcctgtacgccttcctgagggaggtggctggtgaaccactgtacatgctcttccgggccatccagtaccaggtggacaaaggccccgtggacgccgtgacaggcaaggccaaacggaccctgaatgatagccgcttgctgcgggaggacgtggagttccagcccctgacgctgatggtgctggtggggcccggggctggcggggccgcaggcagcagcgagatgcagcgcgtgccagcccgggtgctcgacacggacaccatcacccaggtcaaggagaaggtgttggaccaagtctacaagggcacccccttctcccagaggccctcagtgcatgccctagaccttgagtggcgctcaggcctggctggtcacctgaccctatcggacgaagacttgacctccgtgacccaaaaccactggaagagactcaacaccttgcaacactacaaggtcccagatggagcaacagtggggctcgtccctcagctgcaccgtggcagcaccatctcccagagcctggcccagaggtgccccttgggagagaacatacccacgctggaggatggcgaggaggggggggtgtgcctctggcacctggtgaaagccaccgaggagccagaaggggccaaggtgcggtgcagcagcctgcgggagcgcgagccagcaagggccaaggccattccggaaatctacctcacccgtctgctgtccatgaagggcacgctgcagaagtttgtggacgacaccttccaggccattctcagcgtgaaccggcccatccccatcgccgtcaagtacctgtttgaccttctggatgagctagcagagaagcacggcatcgaggacccagggaccctgcacatctggaagaccaacagtctgctgctgcggttctgggtgaatgccttgaagaacccacagctcatctttgatgtacgggtgtcggacaatgtggacgccatccttgctgtcatcgcccagaccttcattgactcctgtaccacctcggagcataaagtgggccgggattccccagtgaacaaactgctctacgcccgggagatcccacgctacaagcagatggtggagaggtactatgcggacattcgccagagctctccggcgagctaccaggagatgaactctgctttggctgagctctccgggaactacacttctgctccccactgtctggaggctctgcaagaactctacaaccacatccacaggtactatgatcagattatcagtgccctggaggaggaccctgtgggccagaagctgcagctggcctgccgcctgcagcaggtcgccgccctggtggaaaacaaagtgactgacctgtgagctctggctcagacagcagcaagccggatccaccaacaccgcagcgccttatgaccccggaaccgagccagccactgaggggagctggcagagcctgggggcacagggtgcaaagccaggcactgtgcccagcagtgggctccctgcctgccacctcccctgccagcccacccaccttccccccacctgagattgtttctaatttataaggatccccctccttccccctctccccattgtatttatttgcctgctggaaaatcacatccggaaataaaatagaaatatgtctttttatttta

SEQ ID NO: 22808 - DNA, 774 bp, Homo sapiens
  source 1..774: mol_type = unassigned DNA
agagcctggagaccggcgtgggagaccagtgccgcaaggagttcacagacctcatgacggagatgaccgacctcagcagcgacctggagggcagcgggatccccttcctggactaccgcacctacgccgagcgcgccttcttccctggccatggcggttgcccgctgcagcccaagcctgaggggccaggggaggacggccactgtgccactgtgcgccagggcctcacgcagctctccaacctgctcaacagcaagctcttcctcctcacgctcatccacaccctggaggagcagcccagcttttcccagagggatcgctgccatgtggcttcgctgctgtcgctagcgctacacggcaagctggagtacctgacggacatcatgaggaccctgctgggtgacctggcggcccattacgtgcacaggaaccccaagctcatgctacgcaggacagagaccatggtggagaaactgctcaccaactggctgtccatctgcctgtacgccttcctgagggaggtggctggtgaaccactgtacatgctcttccgggccatccagtaccaggtggacaaaggccccgtggacgccgtgacagagtggcgctcaggcctggctggtcacctgaccctatcggacgaagacttgacctccgtgacccaaaaccactggaagagactcaacaccttgcaacactacaaggtcccagatggagcaacagtggggctcgtccctcagctgcaccgtggcagcaccatctcccagagcctgg

SEQ ID NO: 22809 - DNA, 526 bp, Homo sapiens
  source 1..526: mol_type = unassigned DNA
ctgcctcgcagggcacgctgcagaagtttgtggacgacaccttccaggccattctcagcgtgaaccggcccatccccatcgccgtcaagtacctgtttgaccttctggatgagctagcagagaagcacggcatcgaggacccagggaccctgcacatctggaagaccaacagtctgctgctgcggttctgggtgaatgccttgaagaacccacagctcatctttgatgtacgggtgtcggacaatgtggacgccatccttgctgtcatcgcccagaccttcattgactcctgtaccacctcggagcataaagtgggccgggtgagagcagtgccagcagcagcagctggcaggggcttgaggaggaaaggcttatgggggaagcctagagggctgtgcacagagctctgggtgggcagtggcagcatcatgggggcaccttcacctccgagctcatgcctagcgcctcccctccctccggagcaggattccccagtgaacaaactgctctacgcccgggagatccc

SEQ ID NO: 22810 - DNA, 489 bp, Homo sapiens
  source 1..489: mol_type = unassigned DNA
caaacggaccctgaatgatagccgcttgctgcgggaggacgtggagttccagcccctgacgctgatggtgctggtggggcccggggctggcggggccgcaggcagcagcgagatgcagcgcgtgccagcccgggtgctcgacacggacaccatcacccaggtcaaggagaaggtgttggaccaagtctacaagggcacccccttctcccagaggccctcagtgcatgccctagaccttgagtggcgctcaggcctggctggtcacctgaccctatcggacgaagacttgacctccgtgacccaaaaccactggaagagactcaacaccttgcaacactacaaggtcccagatggagcaacagtggggctcgtccctcagctgcaccgtggcagcaccatctcccagagcctggcccagaggtgccccttgggagagagtgagtccctcggccctgacctggggccactggagtccaggctgggcaggca

SEQ ID NO: 22811 - DNA, 3106 bp, Homo sapiens
  source 1..3106: mol_type = unassigned DNA
atcgccactgccctggggcagctgaactgagcgtatgtgccacgccgcccaggagacccctctgctgcaccacttcatggattcccccgagtcgtacccctgtggcgacgagcacacccccagccccattgctggccgccagcccctggaggtccagcctctgctgaagctcgggcagccggtcagcgccgtggcagctctccaggcagatgggcacatgatagccttcctgggggacacccagggccagctgtacaaggtggaccggatacctgtggcagcctgcccccagttccctgactgtgccagctgcctccaggcccaggacccgctgtgtggctggtgtgtcctccagggcaggtgtacccggaagggccagtgcgggcgggcaggccagctgaaccagtggctgtggagttatgaggaggacagccactgcctgcacatccagagcctgctgccgggccaccacccccgccaggagcagggccaggtcactttgtctgtcccccggctgcccatcctggatgcagatgaatacttccattgtgcgttcggggactatgacagcttggctcatgtggaagggccccacgtggcctgtgtcacccctccccaagaccaggtgccacttaaccctccaggcacagaccacgtcactgtgcccctggccctgatgttcgaggacgtgactgtggctgccaccaacttctccttttatgactgcagtgccgtccaggccttggaggcggctgccccgtgtcgcgcttgcgtgggcagcatctggcggtgtcactggtgcccgcagagtagccactgcgtgtacggagagcactgcccagagggcgagaggaccatctacagcgcccaggaggtggacatccaggtgcgtggcccaggggcttgcccacaggtcgaaggcctggcaggtccccacctggtgcctgtgggctgggagagccatttggccctacgcgtgcggaaccttcaacatttccgaggcctgcctgcctccttccactgctggctggagctgcctggagaacttcggggactgccggccaccctggaggagacagcaggggattcaggcctcatccactgccaggcccaccagttttatccctccatgtcccagcgggagctcccagtgcccatctacgtcacccagggtgaagcccagaggctggacaacacccatgctctttatgtgatcctgtacgactgcgccatgggccacccggactgcagccactgccaagcggccaacaggagcctgggctgcctgtggtgtgctgacggccagcctgcctgtcgctatgggcccttgtgcccgccgggggctgtggagctgctgtgtcctgcgcccagcattgatgcagtcgagcccctgaccggtccccctgagggaggcttggccctcaccatcctgggctccaacctgggccgggccttcgccgatgtgcagtacgccgtgagcgtggccagccggccctgcaaccctgagccctctctctaccgcacgtcggcccggattgtgtgtgtgacatctcctgcccccaatggcaccactgggcccgtccgggtggccattaagagccagccaccaggcatctcaagccagcacttcacctaccaggaccctgtcctgctgagcctgagtcctcgctggggcccccaggcagggggcacccagctcaccatccgaggtcagcacctccagacaggtggcaacaccagtgccttcgtgggtggccaaccctgtcccatcctggagccagtgtgtccggaggccatcgtgtgccgtaccaggccccaggctgccccaggagaagcagcggtccttgtggtctttggccatgcccagcgcacactgctcgccagccccttccgctacaccgccaacccccagcttgtagcggcggagcccagtgccagcttccgggggggtgggcgactgatccgtgtcaggggcaccggcctagacgtggtgcagcggcccctactgtctgtgtggctggaggctgacgcagaggtgcaggcttccagggcccagccccaggacccacagccaaggaggagctgtggagcccctgctgcggacccccaggcttgtatccagctcggtggggggctgctgcagtgctccaccgtctgctccgtcaactcgtccagcctcctcctgtgccggagccctgctgtaccagacagagcccacccgcagcgggtcttcttcaccctagacaacgtgcaagtggacttcgccagtgccagtgggggccagggcttcctgtaccagcccaacccccgcctggcacccctcagccgcgaggggcctgcccgcccctaccgcctcaagccaggccatgtcctggatgtggagggcgagggcctcaacctgggcatcagcaaggaggaggtgcgcgtgcacatcggccgcggcgagtgcctggtgaagacgctcacgcgcacccacctgtactgcgagccgcctgcgcacgccccgcagcctgccaatggctccggcctgccacagttcgtggtgcagatgggcaatgtgcagctggccctgggccctgtgcagtacgaggctgaacccccgctgtctgcctttcccgtggaggcccaggcaggcgtgggcatgggtgctgcagtgctgattgccgccgtgctcctcctcaccctcatgtacaggcacaagagcaagcaggccctgcgggactaccagaaggtgctagtgcagctggagagcctggagaccggcgtgggagaccagtgccgcaaggagttcacaggtgggtgcggaggcggggggacagggtacccacgaggcctgaactcacacctcggcgcctcctggccccgcagacctcatgacggagatgaccgacctcagcagcgacctggagggcagcgggatccccttcctggactaccgcacctacgccgagcgcgccttcttccctggccatggcggttgcccgctgcagcccaagcctgaggggccaggggaggacggccactgtgccactgtgcgccagggcctcacgcagctctccaacctgctcaacagcaagctcttcctcctcacgctcatccacaccct

SEQ ID NO: 22812 - DNA, 961 bp, Homo sapiens
  source 1..961: mol_type = unassigned DNA
agctgctacttggccctcgccggtggcccaccaggacaatgcccccccgcagccatctcatgcccatcgccactgccctggggcagctgaactgagcgtatgtgccacgccgcccaggagacccctctgctgcaccacttcatggtggaccggatacctgtggcagcctgcccccagttccctgactgtgccagctgcctccaggcccaggacccgctgtgtggctggtgtgtcctccagggcaggtgtacccggaagggccagtgcgggcgggcaggccagctgaaccagtggctgtggagttatgaggaggacagccactgcctgcacatccagagcctgctgccgggccaccacccccgccaggagcagggccaggtcactttgtctgtcccccggctgcccatcctggatgcagatgaatacttccattgtgcgttcggggactatgacagcttggctcatgtggaagggccccacgtggcctgtgtcacccctccccaagaccaggtgccacttaaccctccaggcacagaccacgtcactgtgcccctggccctgatgttcgaggacgtgactgtggctgccaccaacttctccttttatgactgcagtgccgtccaggccttggaggcggctgccccggcctgcctgcctccttccactgctggctggagctgcctggagaacttcggggactgccggccaccctggaggagacagcaggggattcaggcctcatccactgccaggcccaccaggtcgagcccctgaccggtccccctgagggaggcttggccctcaccatcctgggctccaacctgggccgggccttcgccgatgtgcagtacgccgtgagcgtggccagccggccctgcaaccctgagccctctctctaccgcacgtcggcccggtgaggcacttggagggtgaagatgggtggggaggccctcagagatgg

SEQ ID NO: 22813 - DNA, 5089 bp, Homo sapiens
  source 1..5089: mol_type = unassigned DNA
agctgctacttggccctcgccggtggcccaccaggacaatgcccccccgcagccatctcatgcccatcgccactgccctggggcagctgaactgagcgtatgtgccacgccgcccaggagacccctctgctgcaccacttcatggattcccccgagtcgtacccctgtggcgacgagcacacccccagccccattgctggccgccagcccctggaggtccagcctctgctgaagctcgggcagccggtcagcgccgtggcagctctccaggcagatgggcacatgatagccttcctgggggacacccagggccagctgtacaaggtctttctccacggctcccagggccaggtttaccactcccagcaagtggggcctccaggctcagccatcagcccagacctgctgctggacagcagtggcagtcacctctatgtcctgactgcccaccaggtggaccggatacctgtggcagcctgcccccagttccctgactgtgccagctgcctccaggcccaggacccgctgtgtggctggtgtgtcctccagggcaggtgtacccggaagggccagtgcgggcgggcaggccagctgaaccagtggctgtggagttatgaggaggacagccactgcctgcacatccagagcctgctgccgggccaccacccccgccaggagcagggccaggtcactttgtctgtcccccggctgcccatcctggatgcagatgaatacttccattgtgcgttcggggactatgacagcttggctcatgtggaagggccccacgtggcctgtgtcacccctccccaagaccaggtgccacttaaccctccaggcacagaccacgtcactgtgcccctggccctgatgttcgaggacgtgactgtggctgccaccaacttctccttttatgactgcagtgccgtccaggccttggaggcggctgccccgtgtcgcgcttgcgtgggcagcatctggcggtgtcactggtgcccgcagagtagccactgcgtgtacggagagcactgcccagagggcgagaggaccatctacagcgcccaggaggtggacatccaggtgcgtggcccaggggcttgcccacaggtcgaaggcctggcaggtccccacctggtgcctgtgggctgggagagccatttggccctacgcgtgcggaaccttcaacatttccgaggcctgcctgcctccttccactgctggctggagctgcctggagaacttcggggactgccggccaccctggaggagacagcaggggattcaggcctcatccactgccaggcccaccagttttatccctccatgtcccagcgggagctcccagtgcccatctacgtcacccagggtgaagcccagaggctggacaacacccatgctctttatgtgatcctgtacgactgcgccatgggccacccggactgcagccactgccaagcggccaacaggagcctgggctgcctgtggtgtgctgacggccagcctgcctgtcgctatgggcccttgtgcccgccgggggctgtggagctgctgtgtcctgcgcccagcattgatgcagtcgagcccctgaccggtccccctgagggaggcttggccctcaccatcctgggctccaacctgggccgggccttcgccgatgtgcagtacgccgtgagcgtggccagccggccctgcaaccctgagccctctctctaccgcacgtcggcccggattgtgtgtgtgacatctcctgcccccaatggcaccactgggcccgtccgggtggccattaagagccagccaccaggcatctcaagccagcacttcacctaccaggaccctgtcctgctgagcctgagtcctcgctggggcccccaggcagggggcacccagctcaccatccgaggtcagcacctccagacaggtggcaacaccagtgccttcgtgggtggccaaccctgtcccatcctggagccagtgtgtccggaggccatcgtgtgccgtaccaggccccaggctgccccaggagaagcagcggtccttgtggtctttggccatgcccagcgcacactgctcgccagccccttccgctacaccgccaacccccagcttgtagcggcggagcccagtgccagcttccgggggggtgggcgactgatccgtgtcaggggcaccggcctagacgtggtgcagcggcccctactgtctgtgtggctggaggctgacgcagaggtgcaggcttccagggcccagccccaggacccacagccaaggaggagctgtggagcccctgctgcggacccccaggcttgtatccagctcggtggggggctgctgcagtgctccaccgtctgctccgtcaactcgtccagcctcctcctgtgccggagccctgctgtaccagacagagcccacccgcagcgggtcttcttcaccctagacaacgtgcaagtggacttcgccagtgccagtgggggccagggcttcctgtaccagcccaacccccgcctggcacccctcagccgcgaggggcctgcccgcccctaccgcctcaagccaggccatgtcctggatgtggagggcgagggcctcaacctgggcatcagcaaggaggaggtgcgcgtgcacatcggccgcggcgagtgcctggtgaagacgctcacgcgcacccacctgtactgcgagccgcctgcgcacgccccgcagcctgccaatggctccggcctgccacagttcgtggtgcagatgggcaatgtgcagctggccctgggccctgtgcagtacgaggctgaacccccgctgtctgcctttcccgtggaggcccaggcaggcgtgggcatgggtgctgcagtgctgattgccgccgtgctcctcctcaccctcatgtacaggcacaagagcaagcaggccctgcgggactaccagaaggtgctagtgcagctggagagcctggagaccggcgtgggagaccagtgccgcaaggagttcacagacctcatgacggagatgaccgacctcagcagcgacctggagggcagcgggatccccttcctggactaccgcacctacgccgagcgcgccttcttccctggccatggcggttgcccgctgcagcccaagcctgaggggccaggggaggacggccactgtgccactgtgcgccagggcctcacgcagctctccaacctgctcaacagcaagctcttcctcctcacgctcatccacaccctggaggagcagcccagcttttcccagagggatcgctgccatgtggcttcgctgctgtcgctagcgctacacggcaagctggagtacctgacggacatcatgaggaccctgctgggtgacctggcggcccattacgtgcacaggaaccccaagctcatgctacgcaggacagagaccatggtggagaaactgctcaccaactggctgtccatctgcctgtacgccttcctgagggaggtggctggtgaaccactgtacatgctcttccgggccatccagtaccaggtggacaaaggccccgtggacgccgtgacaggcaaggccaaacggaccctgaatgatagccgcttgctgcgggaggacgtggagttccagcccctgacgctgatggtgctggtggggcccggggctggcggggccgcaggcagcagcgagatgcagcgcgtgccagcccgggtgctcgacacggacaccatcacccaggtcaaggagaaggtgttggaccaagtctacaagggcacccccttctcccagaggccctcagtgcatgccctagaccttgagtggcgctcaggcctggctggtcacctgaccctatcggacgaagacttgacctccgtgacccaaaaccactggaagagactcaacaccttgcaacactacaaggtcccagatggagcaacagtggggctcgtccctcagctgcaccgtggcagcaccatctcccagagcctggcccagaggtgccccttgggagagaacatacccacgctggaggatggcgaggaggggggggtgtgcctctggcacctggtgaaagccaccgaggagccagaaggggccaaggtgcggtgcagcagcctgcgggagcgcgagccagcaagggccaaggccattccggaaatctacctcacccgtctgctgtccatgaagggcacgctgcagaagtttgtggacgacaccttccaggccattctcagcgtgaaccggcccatccccatcgccgtcaagtacctgtttgaccttctggatgagctagcagagaagcacggcatcgaggacccagggaccctgcacatctggaagaccaacagtctgctgctgcggttctgggtgaatgccttgaagaacccacagctcatctttgatgtacgggtgtcggacaatgtggacgccatccttgctgtcatcgcccagaccttcattgactcctgtaccacctcggagcataaagtgggccgggattccccagtgaacaaactgctctacgcccgggagatcccacgctacaagcagatggtggagaggtactatgcggacattcgccagagctctccggcgagctaccaggagatgaactctgctttggctgagctctccgggaactacacttctgctccccactgtctggaggctctgcaagaactctacaaccacatccacaggtactatgatcagattatcagtgccctggaggaggaccctgtgggccagaagctgcagctggcctgccgcctgcagcaggtcgccgccctggtggaaaacaaagtgactgacctgtgagctctggctcagacagcagcaagccggatccaccaacaccgcagcgccttatgaccccggaaccgagccagccactgaggggagctggcagagcctgggggcacagggtgcaaagccaggcactgtgcccagcagtgggctccctgcctgccacctcccctgccagcccacccaccttccccccacctgagattgtttctaatttataaggatccccctccttccccctctccccattgtatttatttgcctgctggaaaatcacatccggaaataaaatagaaatatgtctttttatttt

SEQ ID NO: 22814 - DNA, 6377 bp, Homo sapiens
  source 1..6377: mol_type = unassigned DNA
gatgagtcggactgggcacgattgcattgtggggagggaggctggggctctgtgagacgtgctcctggcaccgccagctgctacttggccctcgccggtggcccaccaggacaatgcccccccgcagccatctcatgcccatcgccactgccctggggcagctgaactgagcgtatgtgccacgccgcccaggagacccctctgctgcaccacttcatgcacccccgctgccttgccccagtgcttcctcgccctggagctgggcgccagcatggagctcacccctgcctcttcgctgacttgctccttgctcagcccgcggctgcctggctctttcccccagctgcggagggttcctccttgcagccggccctggctgcccaaggcccccgtgatggctcgctggcctcccttcggcctctgcctcctcctgctgctgctgtccccaccgccactgcccttgacaggggcccatcgcttctccgcacctaataccactctcaaccacttggcactggcacctggccgaggcacactctatgtcggcgcagtgaaccgcctcttccagctcagccccgagctgcagctcgaggccgtggctgtcactggccctgtaatcgacagccctgactgcgtgcccttccgtgacccagccgagtgcccacaggcccagctcactgacaatgccaaccagctgctgctggtgagcagccgcgcccaggagctggtggcctgcgggcaggtgcggcagggcgtgtgtgagacacggcgccttggggatgtggccgaggtgctgtaccaggctgaggaccctggtgacgggcagtttgtggctgccaataccccgggagtggcaacggtggggctggtggtgcccttgcccggccgggacctcctgcttgtggccagaggcctggcgggcaagctgtcggcaggggtgccacccctggccatccgccagctggccgggtctcagcccttctccagcgagggcctgggccgcctggtggtgggcgacttctccgactacaacaacagctacgtcggggcctttgccgacgcccgctccgcctacttcgtgttccgccgccgcggggcccgggcccaggctgagtaccgctcctacgtggcccgcgtctgcctgggggacaccaacctgtactcctacgtggaggtccccctcgcctgccagggccagggcctcatccaggccgccttccttgccccgggcaccttgctaggggtgtttgccgcgggcccaaggggcacccaggcggcgctctgtgccttccccatggtggagctgggtgccagcatggagcaggcccggagactctgctacacggcgggcggccggggccccagcggcgcagaggaagccaccgtggagtacggcgtcacgtcgcgctgcgtcaccctgccccttgattcccccgagtcgtacccctgtggcgacgagcacacccccagccccattgctggccgccagcccctggaggtccagcctctgctgaagctcgggcagccggtcagcgccgtggcagctctccaggcagatgggcacatgatagccttcctgggggacacccagggccagctgtacaaggtctttctccacggctcccagggccaggtttaccactcccagcaagtggggcctccaggctcagccatcagcccagacctgctgctggacagcagtggcagtcacctctatgtcctgactgcccaccaggtggaccggatacctgtggcagcctgcccccagttccctgactgtgccagctgcctccaggcccaggacccgctgtgtggctggtgtgtcctccagggcaggtgtacccggaagggccagtgcgggcgggcaggccagctgaaccagtggctgtggagttatgaggaggacagccactgcctgcacatccagagcctgctgccgggccaccacccccgccaggagcagggccaggtcactttgtctgtcccccggctgcccatcctggatgcagatgaatacttccattgtgcgttcggggactatgacagcttggctcatgtggaagggccccacgtggcctgtgtcacccctccccaagaccaggtgccacttaaccctccaggcacagaccacgtcactgtgcccctggccctgatgttcgaggacgtgactgtggctgccaccaacttctccttttatgactgcagtgccgtccaggccttggaggcggctgccccgtgtcgcgcttgcgtgggcagcatctggcggtgtcactggtgcccgcagagtagccactgcgtgtacggagagcactgcccagagggcgagaggaccatctacagcgcccaggaggtggacatccaggtgcgtggcccaggggcttgcccacaggtcgaaggcctggcaggtccccacctggtgcctgtgggctgggagagccatttggccctacgcgtgcggaaccttcaacatttccgaggcctgcctgcctccttccactgctggctggagctgcctggagaacttcggggactgccggccaccctggaggagacagcaggggattcaggcctcatccactgccaggcccaccagttttatccctccatgtcccagcgggagctcccagtgcccatctacgtcacccagggtgaagcccagaggctggacaacacccatgctctttatgtgatcctgtacgactgcgccatgggccacccggactgcagccactgccaagcggccaacaggagcctgggctgcctgtggtgtgctgacggccagcctgcctgtcgctatgggcccttgtgcccgccgggggctgtggagctgctgtgtcctgcgcccagcattgatgcagtcgagcccctgaccggtccccctgagggaggcttggccctcaccatcctgggctccaacctgggccgggccttcgccgatgtgcagtacgccgtgagcgtggccagccggccctgcaaccctgagccctctctctaccgcacgtcggcccggattgtgtgtgtgacatctcctgcccccaatggcaccactgggcccgtccgggtggccattaagagccagccaccaggcatctcaagccagcacttcacctaccaggaccctgtcctgctgagcctgagtcctcgctggggcccccaggcagggggcacccagctcaccatccgaggtcagcacctccagacaggtggcaacaccagtgccttcgtgggtggccaaccctgtcccatcctggagccagtgtgtccggaggccatcgtgtgccgtaccaggccccaggctgccccaggagaagcagcggtccttgtggtctttggccatgcccagcgcacactgctcgccagccccttccgctacaccgccaacccccagcttgtagcggcggagcccagtgccagcttccgggggggtgggcgactgatccgtgtcaggggcaccggcctagacgtggtgcagcggcccctactgtctgtgtggctggaggctgacgcagaggtgcaggcttccagggcccagccccaggacccacagccaaggaggagctgtggagcccctgctgcggacccccaggcttgtatccagctcggtggggggctgctgcagtgctccaccgtctgctccgtcaactcgtccagcctcctcctgtgccggagccctgctgtaccagacagagcccacccgcagcgggtcttcttcaccctagacaacgtgcaagtggacttcgccagtgccagtgggggccagggcttcctgtaccagcccaacccccgcctggcacccctcagccgcgaggggcctgcccgcccctaccgcctcaagccaggccatgtcctggatgtggagggcgagggcctcaacctgggcatcagcaaggaggaggtgcgcgtgcacatcggccgcggcgagtgcctggtgaagacgctcacgcgcacccacctgtactgcgagccgcctgcgcacgccccgcagcctgccaatggctccggcctgccacagttcgtggtgcagatgggcaatgtgcagctggccctgggccctgtgcagtacgaggctgaacccccgctgtctgcctttcccgtggaggcccaggcaggcgtgggcatgggtgctgcagtgctgattgccgccgtgctcctcctcaccctcatgtacaggcacaagagcaagcaggccctgcgggactaccagaaggtgctagtgcagctggagagcctggagaccggcgtgggagaccagtgccgcaaggagttcacagacctcatgacggagatgaccgacctcagcagcgacctggagggcagcgggatccccttcctggactaccgcacctacgccgagcgcgccttcttccctggccatggcggttgcccgctgcagcccaagcctgaggggccaggggaggacggccactgtgccactgtgcgccagggcctcacgcagctctccaacctgctcaacagcaagctcttcctcctcacgctcatccacaccctggaggagcagcccagcttttcccagagggatcgctgccatgtggcttcgctgctgtcgctagcgctacacggcaagctggagtacctgacggacatcatgaggaccctgctgggtgacctggcggcccattacgtgcacaggaaccccaagctcatgctacgcaggacagagaccatggtggagaaactgctcaccaactggctgtccatctgcctgtacgccttcctgagggaggtggctggtgaaccactgtacatgctcttccgggccatccagtaccaggtggacaaaggccccgtggacgccgtgacaggcaaggccaaacggaccctgaatgatagccgcttgctgcgggaggacgtggagttccagcccctgacgctgatggtgctggtggggcccggggctggcggggccgcaggcagcagcgagatgcagcgcgtgccagcccgggtgctcgacacggacaccatcacccaggtcaaggagaaggtgttggaccaagtctacaagggcacccccttctcccagaggccctcagtgcatgccctagaccttgagtggcgctcaggcctggctggtcacctgaccctatcggacgaagacttgacctccgtgacccaaaaccactggaagagactcaacaccttgcaacactacaaggtcccagatggagcaacagtggggctcgtccctcagctgcaccgtggcagcaccatctcccagagcctggcccagaggtgccccttgggagagaacatacccacgctggaggatggcgaggaggggggggtgtgcctctggcacctggtgaaagccaccgaggagccagaaggggccaaggtgcggtgcagcagcctgcgggagcgcgagccagcaagggccaaggccattccggaaatctacctcacccgtctgctgtccatgaagggcacgctgcagaagtttgtggacgacaccttccaggccattctcagcgtgaaccggcccatccccatcgccgtcaagtacctgtttgaccttctggatgagctagcagagaagcacggcatcgaggacccagggaccctgcacatctggaagaccaacagtctgctgctgcggttctgggtgaatgccttgaagaacccacagctcatctttgatgtacgggtgtcggacaatgtggacgccatccttgctgtcatcgcccagaccttcattgactcctgtaccacctcggagcataaagtgggccgggattccccagtgaacaaactgctctacgcccgggagatcccacgctacaagcagatggtggagaggtactatgcggacattcgccagagctctccggcgagctaccaggagatgaactctgctttggctgagctctccgggaactacacttctgctccccactgtctggaggctctgcaagaactctacaaccacatccacaggtactatgatcagattatcagtgccctggaggaggaccctgtgggccagaagctgcagctggcctgccgcctgcagcaggtcgccgccctggtggaaaacaaagtgactgacctgtgagctctggctcagacagcagcaagccggatccaccaacaccgcagcgccttatgaccccggaaccgagccagccactgaggggagctggcagagcctgggggcacagggtgcaaagccaggcactgtgcccagcagtgggctccctgcctgccacctcccctgccagcccacccaccttccccccacctgagattgtttctaatttataaggatccccctccttccccctctccccattgtatttatttgcctgctggaaaatcacatccggaaataaaatagaaatatgtctttttattttattttg

SEQ ID NO: 22815 - DNA, 7094 bp, Homo sapiens
  source 1..7094: mol_type = unassigned DNA
ccgggctgcgcggcgaggctgacccgggcccgggcgccggggtcgggggcggctggcgcgggcaggaagcgcatcgcggcccgggcccgccccccgcctcccgccgcctccgggctcccggctcccggccgcgcctcgccccatgcactcgccgcgccgcgcagcccgcgcacgcccggatggctcctcgcgccgcgggcggcgcaccccttagcgcccgggccgccgccgccagccccccgccgttccagacgccgccgcggtgcccggtgccgctgctgttgctgctgctcctgggggcggcgcgggccggcgccctggagatccagcgtcggttcccctcgcccacgcccaccaacaacttcgccctggacggcgcggcggggaccgtgtacctggcggccgtcaaccgcctctatcagctgtcgggcgccaacctgagcctggaggccgaggcggccgtgggcccggtgcccgacagcccgctgtgtcacgctccgcagctgccgcaggcctcgtgcgagcacccgcggcgcctcacggacaactacaacaagatcctgcagctggaccccggccagggcctggtagtcgtgtgcgggtccatctaccagggcttctgccagctgcggcgccggggcaacatctcggccgtggccgtgcgcttcccgcccgccgcgccgcccgccgagcccgtcacggtgttccccagcatgctgaacgtggcggccaaccacccgaacgcgtccaccgtggggctagttctgcctcccgccgcgggcgcggggggcagccgcctgctcgtgggcgccacgtacaccggttacggcagctccttcttcccgcgcaaccgcagcctggaggaccaccgcttcgagaacacgcccgagatcgccatccgctccctggacacgcgcggcgacctggccaagctcttcaccttcgacctcaacccctccgacgacaacatcctcaagatcaagcagggcgccaaggagcagcacaagctgggcttcgtgagcgccttcctgcacccgtccgacccgccgccgggtgcacagtcctacgcgtacctggcgctcaacagcgaggcgcgcgcgggcgacaaggagagccaggcgcggagcctgctggcgcgcatctgcctgccccacggcgccggcggcgacgccaagaagctcaccgagtcctacatccagttgggcttgcagtgcgcgggcggcgcgggccgcggcgacctctacagccgcctggtgtcggtcttcccagcccgggagcggctctttgctgtcttcgagcggccccaggggtcccccgcggcccgcgctgctccggccgcactctgcgccttccgcttcgccgacgtgcgagccgccatccgagctgcgcgcaccgcctgcttcgtggaaccggcgcccgacgtggtggcggtgctcgacagcgtggtgcagggcacgggaccggcctgtgagcgcaagctcaacatccagctccagccagagcagctggactgtggagctgctcacctgcagcacccgctgtccatcctgcagcccctgaaggccacgcccgtgttccgcgccccgggcctcacctccgtggccgtggccagcgtcaacaactacacagcggtcttcctgggcacggtcaacgggaggcttctcaagatcaacctgaacgagagcatgcaggtggtgagcaggcgggtggtgactgtggcctatggggagcccgtgcaccatgtcatgcagtttgacccagcagactccggttacctttacctgatgacgtcccaccagatggccagggtgaaggtcgccgcctgcaacgtgcactccacctgtggggactgcgtgggtgcggcggacgcctactgcggctggtgtgccctggagacgcggtgcaccttgcagcaggactgcaccaattccagccagcagcatttctggaccagtgccagcgagggccccagccgctgtcctgccatgaccgtcctgccttccgagatcgatgtgcgccaggagtacccaggcatgatcctgcagatctcgggcagcctgcccagcctcagtggcatggagatggcctgtgactatgggaacaacatccgcactgtggctcgggtcccaggccctgcctttggtcaccagattgcctactgcaacctcctgccgagggaccagtttccgcccttcccccccaaccaggaccacgtgactgttgagatgtctgtgagggtcaatgggcggaacatcgtcaaggccaatttcaccatctacgactgcagccgcactgcacaagtgtacccccacacagcctgtaccagctgcctgtcggcacagtggccctgtttctggtgcagccagcagcactcctgtgtttccaaccagtctcggtgcgaggcctcaccaaaccccacgagccctcaggactgcccccggaccctgctctcacccctggcacccgtgcctacgggtggctcccagaacatcctggtgcctctggccaacactgcctttttccagggtgcagccctggagtgtagttttgggctggaggagatcttcgaggctgtgtgggtgaatgagtctgttgtacgctgtgaccaggtggtgctgcacacgacccggaagagccaggtgttcccgctcagcctccaactaaaggggcggccagcccgattcctggacagccctgagcccatgacagtcatggtctataactgtgccatgggcagccccgactgttcccagtgcctgggccgcgaagacctgggtcacctgtgcatgtggagtgatggctgccgcctgcgggggcctctgcagcccatggctggcacctgccccgcccccgagatccacgcgattgagcccctgagtggcccgttggacggtgggaccctgctgaccatccgaggaaggaacctgggccggcggctcagtgacgtggcccacggcgtgtggattggtggtgtggcctgtgagccactgcctgacagatacacggtgtcggaggagatcgtgtgtgtcacagggccagccccaggaccactctcaggtgtggtgaccgtgaacgcctctaaggagggcaagtcccgggaccgcttctcctacgtgctgcccctggtccactccctggagcctaccatgggccccaaggccgggggcaccaggatcaccatccatgggaatgacctccatgtaggctccgagctccaggtcctggtgaacgacacagacccctgcacggagctgatgcgcacagataccagcatcgcctgcaccatgcctgagggggccctgccggctccggtgcctgtgtgtgtgcgcttcgagcgtcggggctgcgtgcacggcaacctcaccttctggtacatgcagaacccggtcatcacggccatcagtccccgccgcagccctgtcagtggcggcaggaccatcacagtggctggtgagcgtttccacatggtgcagaatgtgtccatggccgtccaccacattggccgggagcccacgctctgcaaggttctcaactccaccctcatcacctgcccgtcccccggggccctgagcaacgcatcagcgccagtggacttcttcatcaatgggcgggcctacgcagacgaggtggctgtggctgaggagctactggaccccgaggaggcacagcggggcagcaggttccgcctggactacctccccaacccacagttctctacggccaagagggagaagtggatcaagcaccaccccggggagcctctcaccctcgttatccacaaggagcaggacagcctggggctccagagtcacgagtaccgggtcaagataggccaagtaagctgcgacatccagattgtctctgacagaatcatccactgctcggtcaacgagtccctgggcgcggccgtggggcagctgcccatcacaatccaggtagggaacttcaaccagaccatcgccacactgcagctggggggcagcgagacggccatcatcgtgtccatcgtcatctgcagcgtcctgctgctgctctccgtggtggccctgttcgtcttctgtaccaagagccgacgtgctgagcgttactggcagaagacgctgctgcagatggaggagatggaatctcagatccgagaggaaatccgcaaaggcttcgctgagctgcagacagacatgacagatctcaccaaggagctgaaccgcagccagggcatccccttcctggagtataagcacttcgtgacccgcaccttcttccccaagtgttcctccctttatgaagagcgttacgtgctgccctcccagaccctcaactcccagggcagctcccaggcacaggaaacccacccactgctgggagagtggaagattcctgagagctgccggcccaacatggaagagggaattagcttgttctcctcactactcaacaacaagcacttcctcatcgtctttgtccacgcgctggagcagcagaaggactttgcggtgcgcgacaggtgcagcctggcctcgctgctgaccatcgcgctgcacggcaagctggagtactacaccagcatcatgaaggagctgctggtggacctcattgacgcctcggccgccaagaaccccaagctcatgctgcggcgcacagagtctgtggtggagaagatgctcaccaactggatgtccatctgcatgtacagctgtctgcgggagacggtgggggagccattcttcctgctgctgtgtgccatcaagcagcaaatcaacaagggctccatcgacgccatcacaggcaaggcccgctacacactcagtgaggagtggctgctgcgggagaacatcgaggccaagccccggaacctgaacgtgtccttccagggctgtggcatggactcgctgagcgtgcgggccatggacaccgacacgctgacacaggtcaaggagaagatcctggaggccttctgcaagaatgtgccctactcccagtggccgcgtgcagaggacgtcgaccttgagtggttcgcctccagcacacagagctacatccttcgggacctggacgacacctcagtggtggaagacggccgcaagaagcttaacacgctggcccattacaagatccctgaaggtgcctccctggccatgagtctcatagacaagaaggacaacacactgggccgagtgaaagacttggacacagagaagtatttccatttggtgctgcctacggacgagctggcggagcccaagaagtctcaccggcagagccatcgcaagaaggtgctcccggaaatctacctgacccgcctgctctccaccaagggcacgttgcagaagtttctggatgacctgttcaaggccattctgagtatccgtgaagacaagcccccactggctgtcaagtactttttcgacttcctggaggagcaggctgagaagaggggaatctccgaccccgacaccctacacatctggaagaccaacagccttcctctccggttctgggtgaacatcctgaagaacccccagtttgtctttgacatcgacaagacagaccacatcgacgcctgcctttcagtcatcgcgcaggccttcatcgacgcctgctccatctctgacctgcagctgggcaaggattcgccaaccaacaagctcctctacgccaaggagattcctgagtaccggaagatcgtgcagcgctactacaagcagatccaggacatgacgccgctcagcgagcaagagatgaatgcccatctggccgaggagtcgaggaaataccagaatgagttcaacaccaatgtggccatggcagagatttataagtacgccaagaggtatcggccgcagatcatggccgcgctggaggccaaccccacggcccggaggacacaactgcagcacaagtttgagcaggtggtggctttgatggaggacaacatctacgagtgctacagtgaggcctgagacacatggagagttggtcaggctgctgctgggagaaatggacgcccactgggcctcaacttgatcttctaccccgtgcctgtgactcagactgggaaatactgagcagagacggctggggcgggggcaggaggaggggctgctctctgagacaggggcgcccccgccttgacccctgggcacctccatcccctcccacctgtccccagatcagtctctgggatggaggccagagagctggtcaggctcccccatctgcccagcacggcctgcactgtgcccacccacttgctccacaacgtccagttggtcctgctgccaagagccccgtgcatccaggcggccaagcacaaactgggggagaggaggccgccagcccggaggctgcagcccagaaactctacctcatccacactggtgcagggagccctccttgaactgacctttgattggtttctgcttcaactaccaaaatgttatctccacttccccctcacccgtagaggatcctggccacagacagtttcaagtagtgtcagatttttgttgcttgggcggctgttggtagagtgggcagtgcccgcgccatggggtgctctgtgggcttctccaggagcagggagggtggaggggagggatggggggcacaggagctgggagccccgtctccaggaaaaggagaggggttaagatgcaccgaggctgtagctgggctacttgatcttgctgaaagtgtttctaaagatagcaccacttttttttttaaagcttttatatattaaaaaacgtatcatgcaccaactgtgaatagctgccgcttgcgcagaggacccggggaggggtcccgagaggctccccatgcaacactggaaatgactgttccagagagcgggcagacctggcagagcgcccctggcgcctgagactaccacccactccgttcctgccagaaacgaccctctgtggccgatgggccatgcgggcccctcgcagccaactcagccagtgttgggactggctcagagcccatgggggctggaggggggcagctgggactctggaatcttctttataataaaagccttacggacaaacctactgtgggctccagcctttgtcctgagatagccaagcggg

SEQ ID NO: 22816 - DNA, 7101 bp, Homo sapiens
  source 1..7101: mol_type = unassigned DNA
ccgggctgcgcggcgaggctgacccgggcccgggcgccggggtcgggggcggctggcgcgggcaggaagcgcatcgcggcccgggcccgccccccgcctcccgccgcctccgggctcccggctcccggccgcgcctcgccccatgcactcgccgcgccgcgcagcccgcgcacgcccggatggctcctcgcgccgcgggcggcgcaccccttagcgcccgggccgccgccgccagccccccgccgttccagacgccgccgcggtgcccggtgccgctgctgttgctgctgctcctgggggcggcgcgggccggcgccctggagatccagcgtcggttcccctcgcccacgcccaccaacaacttcgccctggacggcgcggcggggaccgtgtacctggcggccgtcaaccgcctctatcagctgtcgggcgccaacctgagcctggaggccgaggcggccgtgggcccggtgcccgacagcccgctgtgtcacgctccgcagctgccgcaggcctcgtgcgagcacccgcggcgcctcacggacaactacaacaagatcctgcagctggaccccggccagggcctggtagtcgtgtgcgggtccatctaccagggcttctgccagctgcggcgccggggcaacatctcggccgtggccgtgcgcttcccgcccgccgcgccgcccgccgagcccgtcacggtgttccccagcatgctgaacgtggcggccaaccacccgaacgcgtccaccgtggggctagttctgcctcccgccgcgggcgcggggggcagccgcctgctcgtgggcgccacgtacaccggttacggcagctccttcttcccgcgcaaccgcagcctggaggaccaccgcttcgagaacacgcccgagatcgccatccgctccctggacacgcgcggcgacctggccaagctcttcaccttcgacctcaacccctccgacgacaacatcctcaagatcaagcagggcgccaaggagcagcacaagctgggcttcgtgagcgccttcctgcacccgtccgacccgccgccgggtgcacagtcctacgcgtacctggcgctcaacagcgaggcgcgcgcgggcgacaaggagagccaggcgcggagcctgctggcgcgcatctgcctgccccacggcgccggcggcgacgccaagaagctcaccgagtcctacatccagttgggcttgcagtgcgcgggcggcgcgggccgcggcgacctctacagccgcctggtgtcggtcttcccagcccgggagcggctctttgctgtcttcgagcggccccaggggtcccccgcggcccgcgctgctccggccgcactctgcgccttccgcttcgccgacgtgcgagccgccatccgagctgcgcgcaccgcctgcttcgtggaaccggcgcccgacgtggtggcggtgctcgacagcgtggtgcagggcacgggaccggcctgtgagcgcaagctcaacatccagctccagccagagcagctggactgtggagctgctcacctgcagcacccgctgtccatcctgcagcccctgaaggccacgcccgtgttccgcgccccgggcctcacctccgtggccgtggccagcgtcaacaactacacagcggtcttcctgggcacggtcaacgggaggcttctcaagatcaacctgaacgagagcatgcaggtggtgagcaggcgggtggtgactgtggcctatggggagcccgtgcaccatgtcatgcagtttgacccagcagactccggttacctttacctgatgacgtcccaccagatggccagggtgaaggtcgccgcctgcaacgtgcactccacctgtggggactgcgtgggtgcggcggacgcctactgcggctggtgtgccctggagacgcggtgcaccttgcagcaggactgcaccaattccagccagcagcatttctggaccagtgccagcgagggccccagccgctgtcctgccatgaccgtcctgccttccgagatcgatgtgcgccaggagtacccaggcatgatcctgcagatctcgggcagcctgcccagcctcagtggcatggagatggcctgtgactatgggaacaacatccgcactgtggctcgggtcccaggccctgcctttggtcaccagattgcctactgcaacctcctgccgagggaccagtttccgcccttcccccccaaccaggaccacgtgactgttgagatgtctgtgagggtcaatgggcggaacatcgtcaaggccaatttcaccatctacgactgcagccgcactgcacaagtgtacccccacacagcctgtaccagctgcctgtcggcacagtggccctgtttctggtgcagccagcagcactcctgtgtttccaaccagtctcggtgcgaggcctcaccaaaccccacgagccctcaggactgcccccggaccctgctctcacccctggcacccgtgcctacgggtggctcccagaacatcctggtgcctctggccaacactgcctttttccagggtgcagccctggagtgtagttttgggctggaggagatcttcgaggctgtgtgggtgaatgagtctgttgtacgctgtgaccaggtggtgctgcacacgacccggaagagccaggtgttcccgctcagcctccaactaaaggggcggccagcccgattcctggacagccctgagcccatgacagtcatggtctataactgtgccatgggcagccccgactgttcccagtgcctgggccgcgaagacctgggtcacctgtgcatgtggagtgatggctgccgcctgcgggggcctctgcagcccatggctggcacctgccccgcccccgagatccacgcgattgagcccctgagtggcccgttggacggtgggaccctgctgaccatccgaggaaggaacctgggccggcggctcagtgacgtggcccacggcgtgtggattggtggtgtggcctgtgagccactgcctgacagatacacggtgtcggaggagatcgtgtgtgtcacagggccagccccaggaccactctcaggtgtggtgaccgtgaacgcctctaaggagggcaagtcccgggaccgcttctcctacgtgctgcccctggtccactccctggagcctaccatgggccccaaggccgggggcaccaggatcaccatccatgggaatgacctccatgtaggctccgagctccaggtcctggtgaacgacacagacccctgcacggagctgatgcgcacagataccagcatcgcctgcaccatgcctgagggggccctgccggctccggtgcctgtgtgtgtgcgcttcgagcgtcggggctgcgtgcacggcaacctcaccttctggtacatgcagaacccggtcatcacggccatcagtccccgccgcagccctgtcagtggcggcaggaccatcacagtggctggtgagcgtttccacatggtgcagaatgtgtccatggccgtccaccacattggccgggagcccacgctctgcaaggttctcaactccaccctcatcacctgcccgtcccccggggccctgagcaacgcatcagcgccagtggacttcttcatcaatgggcgggcctacgcagacgaggtggctgtggctgaggagctactggaccccgaggaggcacagcggggcagcaggttccgcctggactacctccccaacccacagttctctacggccaagagggagaagtggatcaagcaccaccccggggagcctctcaccctcgttatccacaaggagcaggacagcctggggctccagagtcacgagtaccgggtcaagataggccaagtaagctgcgacatccagattgtctctgacagaatcatccactgctcggtcaacgagtccctgggcgcggccgtggggcagctgcccatcacaatccaggtagggaacttcaaccagaccatcgccacactgcagctggggggcagcgagacggccatcatcgtgtccatcgtcatctgcagcgtcctgctgctgctctccgtggtggccctgttcgtcttctgtaccaagagccgacgtgctgagcgttactggcagaagacgctgctgcagatggaggagatggaatctcagatccgagaggaaatccgcaaaggcttcgctgagctgcagacagacatgacagatctcaccaaggagctgaaccgcagccagggcatccccttcctggagtataagcacttcgtgacccgcaccttcttccccaagtgttcctccctttatgaagagcgttacgtgctgccctcccagaccctcaactcccagggcagctcccaggcacaggaaacccacccactgctgggagagtggaagattcctgagagctgccggcccaacatggaagagggaattagcttgttctcctcactactcaacaacaagcacttcctcatcgtctttgtccacgcgctggagcagcagaaggactttgcggtgcgcgacaggtgcagcctggcctcgctgctgaccatcgcgctgcacggcaagctggagtactacaccagcatcatgaaggagctgctggtggacctcattgacgcctcggccgccaagaaccccaagctcatgctgcggcgcacagagtctgtggtggagaagatgctcaccaactggatgtccatctgcatgtacagctgtctgcgggagacggtgggggagccattcttcctgctgctgtgtgccatcaagcagcaaatcaacaagggctccatcgacgccatcacaggcaaggcccgctacacactcagtgaggagtggctgctgcgggagaacatcgaggccaagccccggaacctgaacgtgtccttccagggctgtggcatggactcgctgagcgtgcgggccatggacaccgacacgctgacacaggtcaaggagaagatcctggaggccttctgcaagaatgtgccctactcccagtggccgcgtgcagaggacgtcgaccttgagtggttcgcctccagcacacagagctacatccttcgggacctggacgacacctcagtggtggaagacggccgcaagaagcttaacacgctggcccattacaagatccctgaaggtgcctccctggccatgagtctcatagacaagaaggacaacacactgggccgagtgaaagacttggacacagagaagtatttccatttggtgctgcctacggacgagctggcggagcccaagaagtctcaccggcagagccatcgcaagaaggtgctcccggaaatctacctgacccgcctgctctccaccaagggcacgttgcagaagtttctggatgacctgttcaaggccattctgagtatccgtgaagacaagcccccactggctgtcaagtactttttcgacttcctggaggagcaggctgagaagaggggaatctccgaccccgacaccctacacatctggaagaccaacaggtggcggccttcctctccggttctgggtgaacatcctgaagaacccccagtttgtctttgacatcgacaagacagaccacatcgacgcctgcctttcagtcatcgcgcaggccttcatcgacgcctgctccatctctgacctgcagctgggcaaggattcgccaaccaacaagctcctctacgccaaggagattcctgagtaccggaagatcgtgcagcgctactacaagcagatccaggacatgacgccgctcagcgagcaagagatgaatgcccatctggccgaggagtcgaggaaataccagaatgagttcaacaccaatgtggccatggcagagatttataagtacgccaagaggtatcggccgcagatcatggccgcgctggaggccaaccccacggcccggaggacacaactgcagcacaagtttgagcaggtggtggctttgatggaggacaacatctacgagtgctacagtgaggcctgagacacatggagagttggtcaggctgctgctgggagaaatggacgcccactgggcctcaacttgatcttctaccccgtgcctgtgactcagactgggaaatactgagcagagacggctggggcgggggcaggaggaggggctgctctctgagacaggggcgcccccgccttgacccctgggcacctccatcccctcccacctgtccccagatcagtctctgggatggaggccagagagctggtcaggctcccccatctgcccagcacggcctgcactgtgcccacccacttgctccacaacgtccagttggtcctgctgccaagagccccgtgcatccaggcggccaagcacaaactgggggagaggaggccgccagcccggaggctgcagcccagaaactctacctcatccacactggtgcagggagccctccttgaactgacctttgattggtttctgcttcaactaccaaaatgttatctccacttccccctcacccgtagaggatcctggccacagacagtttcaagtagtgtcagatttttgttgcttgggcggctgttggtagagtgggcagtgcccgcgccatggggtgctctgtgggcttctccaggagcagggagggtggaggggagggatggggggcacaggagctgggagccccgtctccaggaaaaggagaggggttaagatgcaccgaggctgtagctgggctacttgatcttgctgaaagtgtttctaaagatagcaccacttttttttttaaagcttttatatattaaaaaacgtatcatgcaccaactgtgaatagctgccgcttgcgcagaggacccggggaggggtcccgagaggctccccatgcaacactggaaatgactgttccagagagcgggcagacctggcagagcgcccctggcgcctgagactaccacccactccgttcctgccagaaacgaccctctgtggccgatgggccatgcgggcccctcgcagccaactcagccagtgttgggactggctcagagcccatgggggctggaggggggcagctgggactctggaatcttctttataataaaagccttacggacaaacctactgtgggctccagcctttgtcctgagatagccaagcggg

SEQ ID NO: 22817 - DNA, 6218 bp, Homo sapiens
  source 1..6218: mol_type = unassigned DNA
agctccgctcgcgctctcgccgctcctgccggctcgcccggccccgcgctccgccgtctcctcgccgcccgcccctccgccagccccggggaccgcgcggccgcagcctgagccagggccccctccctcgtcaggaccggggcagcaagcaggccgggggcaggtccgggcacccaccatgcgaggcgagctctggctcctggtgctggtgctcagggaggctgcccgggcgctgagcccccagcccggagcaggtcacgatgagggcccaggctctggatgggctgccaaagggaccgtgcggggctggaaccggagagcccgagagagccctgggcatgtgtcagagccggacaggacccagctgagccaggacctgggtgggggcaccctggccatggacacgctgccagataacaggaccagggtggtggaggacaaccacagctattatgtgtcccgtctctatggccccagcgagccccacagccgggaactgtgggtagatgtggccgaggccaaccggagccaagtgaagatccacacaatactctccaacacccaccggcaggcttcgagagtggtcttgtcctttgatttccctttctacgggcatcctctgcggcagatcaccatagcaactggaggcttcatcttcatgggggacgtgatccatcggatgctcacagctactcagtatgtggcgcccctgatggccaacttcaaccctggctactccgacaactccacagttgtttactttgacaatgggacagtctttgtggttcagtgggaccacgtttatctccaaggctgggaagacaagggcagtttcaccttccaggcagctctgcaccatgacggccgcattgtctttgcctataaagagatccctatgtctgtcccggaaatcagctcctcccagcatcctgtcaaaaccggcctatcggatgccttcatgattctcaatccatccccggatgtgccagaatctcggcgaaggagcatctttgaatatcaccgcatagagctggaccccagcaaggtcaccagcatgtcggccgtggagttcaccccattgccgacctgcctgcagcataggagctgtgacgcctgcatgtcctcagacctgaccttcaactgcagctggtgccatgtcctccagagatgctccagtggctttgaccgctatcgccaggagtggatggactatggctgtgcacaggaggcagagggcaggatgtgcgaggacttccaggatgaggaccacgactcagcctcccctgacacttccttcagcccctatgatggagacctcaccactacctcctcctccctcttcatcgacagcctcaccacagaagatgacaccaagttgaatccctatgcaggaggagacggccttcagaacaacctgtcccccaagacaaagggcactcctgtgcacctgggcaccatcgtgggcatcgtgctggcagtcctcctcgtggcggccatcatcctggctggaatttacatcaatggccaccccacatccaatgctgcgctcttcttcatcgagcgtagacctcaccactggccagccatgaagtttcgcagccaccctgaccattccacctatgcggaggtggagccctcgggccatgagaaggagggcttcatggaggctgagcagtgctgagaacaccaagtctcccctttgaagactttgaggccacagaaaagacagttaaagcaaagaagagaagtgacttttcctggcctctcccagcatgccctgggctgagatgagatggtggtttatggctccagagctgctgctcgcttcgtcagcacaccccgaatattgaagagggggccaaaaaacaaccacatggattttttataggaacaacaacctaatctcatcctgttttgatgcaagggttctcttctgtgtcttgtaaccatgaaacagcagaagaactaacataactaactccatttttgtttaaggggcctttacctattcctgcacctaggctaggataactttagagcactgacataaaacgcaaaaacaggaatcatgccgtttgcaaaactaactctgggattaaaggggaagcatgtaaacagctaactgtttttgttaaagatttataggaatgaggaggtttggctattgtcacatgacagactgttagccaaggacaaagaagttctgcaaacctcccctggacccttgctggtgtccagatgtctgcggttgtcagccccttcctttcccccgacctaaacataaaagacaaggcaaagcccgcataattttaagacggttctttaggacattagtccaccatcttcttggtttgctggctctccgaaataaagtccctttccttgctccaactccttgtctctcaacgtattggctatgacgcagcaagcagaatgaatttggactcagttacaggctgtcaatggtctgctctgtagcagtctcagagcctccccgacccactacctggagatagccagatagccagatgccctgctcctggccacctttaaagcccctgcatatgacacaggttaactaaagtcaagattggggctgctgcattccaggttccctagactcacaagctggtccttggccaggtgcagtggctcacgcctgtaatcccagcactttgggaggctgaggcaggcggatcacctgaagtcagaagtttgagaccagcctggccaacataattaaaatgtctctactaaaaatacaaaaaattagctgggtgtggtgacgcttgcctgtatcccagctactcaggaagctgagacacgagaatcacttgaacctgggaggcagaggttgcagtgagctcagatagtgccactgcactccagcctgggtgacagagcgagactccgtctcaaaaaaaaaaaaagaaagcagatcctcatggctatagagttggcattttagccccagcttctgtagctctgaaagcctaaagaaggtattctctccatctgttaaacacagtatagtggctctcagcccttggggcatgttatcatgggagggaagtcaaataagaggagagaaaagaactcaagggggaaactgcatttttaggctttgctctcttaccttgccctttctactcagaaccaataacttctgcatcaaaacatgttacagcctgcatcaagggctttaccccaacctgcagcccagccttccctgggtgagcttgctatgcgcagccacatttaccatgtggggctccctattctgatggcctgttcggtgccgggtttactcactgccctgttctgatgtcagtgcctgtacatacctccaaaggcaggacttgcctgataaatatttttcctcctctgaactggattttataggcattaaagacaagtcgggtggctagagggctccttgagacatacctagcagggaactgcaggtggattctgttgagaggcaaagcacctgagtggttgggacacaggcagctggcatgggagggactttttttgagacagggtctcactgtgtcgcccagggcaaggatgcccaaagacaccaggttggagaggcacctgccaactacttgctttccctggagcctgcatgtgcctgtggggtggggaggcgtaggggtctacggctgcctgagatgggtgtgcacagtgtgtgaagtacctacctccttgccttgctggactgtcagccagtcgcagggccggccacaagacccatgtctccatctggtcatactccatagctaccaagttaacctgctctaaactttggagaactggatctgtccaataaacgcttatttggccaagcctgatggctcgtgcctgtactcccagcactttgggaggctgaggtgggagggttgcttgagcccaggggtttgagaccagcttgggcaacaacaacaaaaatgccaggtgtggtggggtgcacctgtagtcccagctactagggaggctgagccaggaggatcacttgagcccgggaggttgaggctgcagtggggggtcataatcatgccactgtactccagcctgggtgacagagtgagaccctgtctccgaaaaaaaaaaaaaaaaaaagaacggaaaaagaaatgcttacattgtcagggatcctgtagacaatcattaactctatgagatgcttggttctatttttttgggagactttgtccaagtgttttggcttaagaaatccataggcctctcttggtgacacatctctagtactttttgtcataaacaaacaggccatctgccgccaaatacatccactccccatgccactgacatcctatgggtcagccaggcttgctttgactgaggccgaggcatctggaactttctctgcctgcaggggctagcagcagaggcttcaccgcatcaccaccccttcctccactcctgacattctttcccttcagggatccaaaatggttggccgagctcccagtgggaaaacgtgtgctagagttggggagtgagatgagtggtgctgtccatggaatcaggccacagcaggaactgccccactggccatttgagacacacacaggtggtaaatgctctgctggtgggctgtgcttccctcattcagagagctctgttacagcccactgtgtcctttagaagcttgaaaggaacccaactctttgctgcactgtcctttttcttcctcaaattcagaccctccttccaccggcacccccctactccaccctcagctcttccttgcctggtttatcaagcagagctgaggccccacgtttccaactctgattgtcacttgcatcttcacaaaggataaaccacggagcaactggaaaaccatcagccaagcgttcggatgagtctggttattggtccacccccgaccagattcccttacacttaactcacttctttctttggcaatgaccctcatgacatgtataaatgggtatgactaagaagaggctgtgatctaacatttatttgctgccattttttactctggggagaagcagccccaactcatcactgggaaagaactccccctgcaaaccagctaaatttgataatttaaaccccctgcccctaaaacttctcacagagctggggagttggtggcaactttccaagtcaaggtcttgcttagaaagtccttcactacatggccaggtgcagtggctcacgcctgtagtcccaggtacttgggagcctgaggcaggaggattgcttgagctcaggagttcaaggctgcagagagctatgatcatcccactgcatttgtttaaaaataaatttttaaaatttgtgtgttttatcaggggtctcctgtacagtgtatctgtgtatgtttgtgtgtgtgtttgtatacagccttgtttaatgttttgagcaataagatatgcacacacaggtattttgttgctaaagagattggacaaggttgtagctgtgctcaggcttcagcttggtttgttaaattgagagataaacaatgacaagagctgccagccaaccacactattcaaaaagcaaagtgttcaccactaaagctaaccattcatctggttgcaggcaaggctaaggctctctctcctctagttcctggaacagactcacagattggcatgaagcactgatcaggggctgcactcagactccctggccaagcaaacctacaccagaagagtcagtgtcacagatatgatgcggccaatctctgtctccaaaaacctacctgaacttaatggtagaattcaaagatctggggactgagggcacccagccttctaaaacacaatgtattcatgtgtttagtgtaaactctctgcatggattctcagtgttaataataaaaggaagcattcttttacaactcctgctgtgtgcaaaagaaagtgcaaaggatttggagtggcattccgaagatcaccacacataccttggttctgatggctgctgaactccgacttcttcgctgagacatgactgtgggaacagcctccagctatctgctcatcagaggtgctttcctcaacctcctgcaccacctccaagagaaacagcctaaaaagaaaccccagctgtttacttatattggtctgtaaatccctggaagtaaaccccatgcatttttatctactgtctgaggacatacaataaatctgagaaagtctatgctgtca

SEQ ID NO: 22818 - DNA, 1226 bp, Homo sapiens
  source 1..1226: mol_type = unassigned DNA
agctccccgcctgctcccggaggccgcagcctccagctccgctcgcgctctcgccgctcctgccggctcgcccggccccgcgctccgccgtctcctcgccgcccgcccctccgccagccccggggaccgcgcggccgcagcctgagccagggccccctccctcgtcaggaccggggcagcaagcaggccgggggcaggtccgggcacccaccatgcgaggcgagctctggctcctggtgctggtgctcagggaggctgcccgggcgctgagcccccagcccggagcaggtcacgatgagggcccaggctctggatgggctgccaaagggaccgtgcggggctggaaccggagagcccgagagagccctgggcatgtgtcagagccggacaggacccagctgagccaggacctgggtgggggcaccctggccatggacacgctgccagataacaggaccagggtggtggaggacaaccacagctattatgtgtcccgtctctatggccccagcgagccccacagccgggaactgtgggtagatgtggccgaggccaaccggagccaagtgaagatccacacaatactctccaacacccaccggcaggcttcgagagtggtcttgtcctttgatttccctttctacgggcatcctctgcggcagatcaccatagcaactggaggcttcatcttcatgggggacgtgatccatcggatgctcacagctactcagtatgtggcgcccctgatggccaacttcaaccctggctactccgacaactccacagttgtttactttgacaatgggacagtctttgtggttcagtgggaccacgtttatctccaaggctgggaagacaagggcagtttcaccttccaggcagctctgcaccatgacggccgcattgtctttgcctataaagagatccctatgtctgtcccggaaatcagctcctcccagcatcctgtcaaaaccggcctatcggatgccttcatgattctcaatccatccccggatgtgccagaatctcggcgaaggagcatctttgaatatcaccgcatagagctggaccccagcaaggtcaccagcatgtcggccgtggagttcaccccattgccgacctgcctgcagcataggagctgtgacgcctgcatgtcctcagacctgaccttcaactgcagctggtgccatgtcctccagagtagagatgaggtttcaccgtgttag

SEQ ID NO: 22819 - DNA, 6251 bp, Homo sapiens
  source 1..6251: mol_type = unassigned DNA
agctccccgcctgctcccggaggccgcagcctccagctccgctcgcgctctcgccgctcctgccggctcgcccggccccgcgctccgccgtctcctcgccgcccgcccctccgccagccccggggaccgcgcggccgcagcctgagccagggccccctccctcgtcaggaccggggcagcaagcaggccgggggcaggtccgggcacccaccatgcgaggcgagctctggctcctggtgctggtgctcagggaggctgcccgggcgctgagcccccagcccggagcaggtcacgatgagggcccaggctctggatgggctgccaaagggaccgtgcggggctggaaccggagagcccgagagagccctgggcatgtgtcagagccggacaggacccagctgagccaggacctgggtgggggcaccctggccatggacacgctgccagataacaggaccagggtggtggaggacaaccacagctattatgtgtcccgtctctatggccccagcgagccccacagccgggaactgtgggtagatgtggccgaggccaaccggagccaagtgaagatccacacaatactctccaacacccaccggcaggcttcgagagtggtcttgtcctttgatttccctttctacgggcatcctctgcggcagatcaccatagcaactggaggcttcatcttcatgggggacgtgatccatcggatgctcacagctactcagtatgtggcgcccctgatggccaacttcaaccctggctactccgacaactccacagttgtttactttgacaatgggacagtctttgtggttcagtgggaccacgtttatctccaaggctgggaagacaagggcagtttcaccttccaggcagctctgcaccatgacggccgcattgtctttgcctataaagagatccctatgtctgtcccggaaatcagctcctcccagcatcctgtcaaaaccggcctatcggatgccttcatgattctcaatccatccccggatgtgccagaatctcggcgaaggagcatctttgaatatcaccgcatagagctggaccccagcaaggtcaccagcatgtcggccgtggagttcaccccattgccgacctgcctgcagcataggagctgtgacgcctgcatgtcctcagacctgaccttcaactgcagctggtgccatgtcctccagaggtccctcaacaaccaggatgaaaacacgtatgtgaattgcctggattctcagcagtgtcacggcagctcagagtcaaggcgacctttccaggatgaggaccacgactcagcctcccctgacacttccttcagcccctatgatggagacctcaccactacctcctcctccctcttcatcgacagcctcaccacagaagatgacaccaagttgaatccctatgcaggaggagacggccttcagaacaacctgtcccccaagacaaagggcactcctgtgcacctgggcaccatcgtgggcatcgtgctggcagtcctcctcgtggcggccatcatcctggctggaatttacatcaatggccaccccacatccaatgctgcgctcttcttcatcgagcgtagacctcaccactggccagccatgaagtttcgcagccaccctgaccattccacctatgcggaggtggagccctcgggccatgagaaggagggcttcatggaggctgagcagtgctgagaacaccaagtctcccctttgaagactttgaggccacagaaaagacagttaaagcaaagaagagaagtgacttttcctggcctctcccagcatgccctgggctgagatgagatggtggtttatggctccagagctgctgctcgcttcgtcagcacaccccgaatattgaagagggggccaaaaaacaaccacatggattttttataggaacaacaacctaatctcatcctgttttgatgcaagggttctcttctgtgtcttgtaaccatgaaacagcagaagaactaacataactaactccatttttgtttaaggggcctttacctattcctgcacctaggctaggataactttagagcactgacataaaacgcaaaaacaggaatcatgccgtttgcaaaactaactctgggattaaaggggaagcatgtaaacagctaactgtttttgttaaagatttataggaatgaggaggtttggctattgtcacatgacagactgttagccaaggacaaagaagttctgcaaacctcccctggacccttgctggtgtccagatgtctgcggttgtcagccccttcctttcccccgacctaaacataaaagacaaggcaaagcccgcataattttaagacggttctttaggacattagtccaccatcttcttggtttgctggctctccgaaataaagtccctttccttgctccaactccttgtctctcaacgtattggctatgacgcagcaagcagaatgaatttggactcagttacaggctgtcaatggtctgctctgtagcagtctcagagcctccccgacccactacctggagatagccagatagccagatgccctgctcctggccacctttaaagcccctgcatatgacacaggttaactaaagtcaagattggggctgctgcattccaggttccctagactcacaagctggtccttggccaggtgcagtggctcacgcctgtaatcccagcactttgggaggctgaggcaggcggatcacctgaagtcagaagtttgagaccagcctggccaacataattaaaatgtctctactaaaaatacaaaaaattagctgggtgtggtgacgcttgcctgtatcccagctactcaggaagctgagacacgagaatcacttgaacctgggaggcagaggttgcagtgagctcagatagtgccactgcactccagcctgggtgacagagcgagactccgtctcaaaaaaaaaaaaagaaagcagatcctcatggctatagagttggcattttagccccagcttctgtagctctgaaagcctaaagaaggtattctctccatctgttaaacacagtatagtggctctcagcccttggggcatgttatcatgggagggaagtcaaataagaggagagaaaagaactcaagggggaaactgcatttttaggctttgctctcttaccttgccctttctactcagaaccaataacttctgcatcaaaacatgttacagcctgcatcaagggctttaccccaacctgcagcccagccttccctgggtgagcttgctatgcgcagccacatttaccatgtggggctccctattctgatggcctgttcggtgccgggtttactcactgccctgttctgatgtcagtgcctgtacatacctccaaaggcaggacttgcctgataaatatttttcctcctctgaactggattttataggcattaaagacaagtcgggtggctagagggctccttgagacatacctagcagggaactgcaggtggattctgttgagaggcaaagcacctgagtggttgggacacaggcagctggcatgggagggactttttttgagacagggtctcactgtgtcgcccagggcaaggatgcccaaagacaccaggttggagaggcacctgccaactacttgctttccctggagcctgcatgtgcctgtggggtggggaggcgtaggggtctacggctgcctgagatgggtgtgcacagtgtgtgaagtacctacctccttgccttgctggactgtcagccagtcgcagggccggccacaagacccatgtctccatctggtcatactccatagctaccaagttaacctgctctaaactttggagaactggatctgtccaataaacgcttatttggccaagcctgatggctcgtgcctgtactcccagcactttgggaggctgaggtgggagggttgcttgagcccaggggtttgagaccagcttgggcaacaacaacaaaaatgccaggtgtggtggggtgcacctgtagtcccagctactagggaggctgagccaggaggatcacttgagcccgggaggttgaggctgcagtggggggtcataatcatgccactgtactccagcctgggtgacagagtgagaccctgtctccgaaaaaaaaaaaaaaaaaaagaacggaaaaagaaatgcttacattgtcagggatcctgtagacaatcattaactctatgagatgcttggttctatttttttgggagactttgtccaagtgttttggcttaagaaatccataggcctctcttggtgacacatctctagtactttttgtcataaacaaacaggccatctgccgccaaatacatccactccccatgccactgacatcctatgggtcagccaggcttgctttgactgaggccgaggcatctggaactttctctgcctgcaggggctagcagcagaggcttcaccgcatcaccaccccttcctccactcctgacattctttcccttcagggatccaaaatggttggccgagctcccagtgggaaaacgtgtgctagagttggggagtgagatgagtggtgctgtccatggaatcaggccacagcaggaactgccccactggccatttgagacacacacaggtggtaaatgctctgctggtgggctgtgcttccctcattcagagagctctgttacagcccactgtgtcctttagaagcttgaaaggaacccaactctttgctgcactgtcctttttcttcctcaaattcagaccctccttccaccggcacccccctactccaccctcagctcttccttgcctggtttatcaagcagagctgaggccccacgtttccaactctgattgtcacttgcatcttcacaaaggataaaccacggagcaactggaaaaccatcagccaagcgttcggatgagtctggttattggtccacccccgaccagattcccttacacttaactcacttctttctttggcaatgaccctcatgacatgtataaatgggtatgactaagaagaggctgtgatctaacatttatttgctgccattttttactctggggagaagcagccccaactcatcactgggaaagaactccccctgcaaaccagctaaatttgataatttaaaccccctgcccctaaaacttctcacagagctggggagttggtggcaactttccaagtcaaggtcttgcttagaaagtccttcactacatggccaggtgcagtggctcacgcctgtagtcccaggtacttgggagcctgaggcaggaggattgcttgagctcaggagttcaaggctgcagagagctatgatcatcccactgcatttgtttaaaaataaatttttaaaatttgtgtgttttatcaggggtctcctgtacagtgtatctgtgtatgtttgtgtgtgtgtttgtatacagccttgtttaatgttttgagcaataagatatgcacacacaggtattttgttgctaaagagattggacaaggttgtagctgtgctcaggcttcagcttggtttgttaaattgagagataaacaatgacaagagctgccagccaaccacactattcaaaaagcaaagtgttcaccactaaagctaaccattcatctggttgcaggcaaggctaaggctctctctcctctagttcctggaacagactcacagattggcatgaagcactgatcaggggctgcactcagactccctggccaagcaaacctacaccagaagagtcagtgtcacagatatgatgcggccaatctctgtctccaaaaacctacctgaacttaatggtagaattcaaagatctggggactgagggcacccagccttctaaaacacaatgtattcatgtgtttagtgtaaactctctgcatggattctcagtgttaataataaaaggaagcattcttttacaactcctgctgtgtgcaaaagaaagtgcaaaggatttggagtggcattccgaagatcaccacacataccttggttctgatggctgctgaactccgacttcttcgctgagacatgactgtgggaacagcctccagctatctgctcatcagaggtgctttcctcaacctcctgcaccacctccaagagaaacagcctaaaaagaaaccccagctgtttacttatattggtctgtaaatccctggaagtaaaccccatgcatttttatctactgtctgaggacatacaataaatctgagaaagtctatgctgtc

SEQ ID NO: 22820 - DNA, 619 bp, Homo sapiens
  source 1..619: mol_type = unassigned DNA
cagctccttgccgtcacaagaacgaagtaggtcaggggagggaagaggcatcttcgtgtcctgacctgattccttgccgtctattaaatatcctacattgcgggtcacgatgagggcccaggctctggatgggctgccaaagggaccgtgcggggctggaaccggagagcccgagagagccctgggcatgtgtcagagccggacaggacccagctgagccaggacctgggtgggggcaccctggccatggacacgctgccagataacaggaccagggtggtggaggacaaccacagctattatgtgtcccgtctctatggccccagcgagccccacagccgggaactgtgggtagatgtggccgaggccaaccggagccaagtgaagatccacacaatactctccaacacccaccggcaggcttcgagagtggtcttgtcctttgatttccctttctacgggcatcctctgcggcagatcaccatagcaactggaggcttcatcttcatgggggacgtgatccatcggatgctcacagctactcagtatgtggcgcccctgatggccaacttcaaccctggctactccgacaactccacagttgtttactttgacaatg

SEQ ID NO: 22821 - DNA, 876 bp, Homo sapiens
  source 1..876: mol_type = unassigned DNA
ccaggatgccccctcaccccgtctcccactctccagcgccccagctccttgccgtcacaagaacgaagtcacgatgagggcccaggctctggatgggctgccaaagggaccgtgcggggctggaaccggagagcccgagagagccctgggcatgtgtcagagccggacaggacccagctgagccaggacctgggtgggggcaccctggccatggacacgctgccagataacaggaccagggtggtggaggacaaccacagctattatgtgtcccgtctctatggccccagcgagccccacagccgggaactgtgggtagatgtggccgaggccaaccggagccaagtgaagatccacacaatactctccaacacccaccggcaggcttcgagagtggtcttgtcctttgatttccctttctacgggcatcctctgcggcagatcaccatagcaactggaggcttcatcttcatgggggacgtgatccatcggatgctcacagctactcagtatgtggcgcccctgatggccaacttcaaccctggctactccgacaactccacagttgtttactttgacaatgggacagtctttgtggttcagtgggaccacgtttatctccaaggctgggaagacaagggcagtttcaccttccaggcagctctgcaccatgacggccgcattgtctttgcctataaagagatccctatgtctgtcccggaaatcagctcctcccagcatcctgtcaaaaccggcctatcggatgccttcatgattctcaatccatccccggatgtgccagaatctcggcgaaggagcatctttgaatatcaccgcatagagctggaccccagcaaggtcaccagcatgtcggcc

SEQ ID NO: 22822 - DNA, 268 bp, Homo sapiens
  source 1..268: mol_type = unassigned DNA
gcagtttcaccttccaggcagctctgcaccatgacggccgcattgtctttgcctataaagagatccctatgtctgtcccggaaatcagctcctcccagcatcctgtcaaaaccggcctatcggatgccttcatgattctcaatccatccccggatgtgccaggcttttcagcagagtctgcaaagcatctttggtgaaaagaaaagtcatgtgcaattagcagcatctgtttgcagaggcactcaaaacacacaggacagtgtatccg

SEQ ID NO: 22823 - DNA, 2082 bp, Homo sapiens
  source 1..2082: mol_type = unassigned DNA
ctcctggaaaatttctccaatggcgctcagcgttcgcacccttcctctccgcggttttctagtccctaggccccagcccactagaagccaggatgccccctcaccccgtctcccactctccagcgccccagctccttgccgtcacaagaacgaagaggacaaccacagctattatgtgtcccgtctctatggccccagcgagccccacagccgggaactgtgggtagatgtggccgaggccaaccggagccaagtgaagatccacacaatactctccaacacccaccggcaggcttcgagagtggtcttgtcctttgatttccctttctacgggcatcctctgcggcagatcaccatagcaactggaggcttcatcttcatgggggacgtgatccatcggatgctcacagctactcagtatgtggcgcccctgatggccaacttcaaccctggctactccgacaactccacagttgtttactttgacaatgggacagtctttgtggttcagtgggaccacgtttatctccaaggctgggaagacaagggcagtttcaccttccaggcagctctgcaccatgacggccgcattgtctttgcctataaagagatccctatgtctgtcccggaaatcagctcctcccagcatcctgtcaaaaccggcctatcggatgccttcatgattctcaatccatccccggatgtgccagaatctcggcgaaggagcatctttgaatatcaccgcatagagctggaccccagcaaggtcaccagcatgtcggccgtggagttcaccccattgccgacctgcctgcagcataggagctgtgacgcctgcatgtcctcagacctgaccttcaactgcagctggtgccatgtcctccagagatgctccagtggctttgaccgctatcgccaggagtggatggactatggctgtgcacaggaggcagagggcaggatgtgcgaggacttccaggatgaggaccacgactcagcctcccctgacacttccttcagcccctatgatggagacctcaccactacctcctcctccctcttcatcgacagcctcaccacagaagatgacaccaagttgaatccctatgcaggaggagacggccttcagaacaacctgtcccccaagacaaagggcactcctgtgcacctgggcaccatcgtgggcatcgtgctggcagtcctcctcgtggcggccatcatcctggctggaatttacatcaatggccaccccacatccaatgctgcgctcttcttcatcgagcgtagacctcaccactggccagccatgaagtttcgcagccaccctgaccattccacctatgcggaggtggagccctcgggccatgagaaggagggcttcatggaggctgagcagtgctgagaacaccaagtctcccctttgaagactttgaggccacagaaaagacagttaaagcaaagaagagaagtgacttttcctggcctctcccagcatgccctgggctgagatgagatggtggtttatggctccagagctgctgctcgcttcgtcagcacaccccgaatattgaagagggggccaaaaaacaaccacatggattttttataggaacaacaacctaatctcatcctgttttgatgcaagggttctcttctgtgtcttgtaaccatgaaacagcagaagaactaacataactaactccatttttgtttaaggggcctttacctattcctgcacctaggctaggataactttagagcactgacataaaacgcaaaaacaggaatcatgccgtttgcaaaactaactctgggattaaaggggaagcatgtaaacagctaactgtttttgttaaagatttataggaatgaggaggtttggctattgtcacatgacagactgttagccaaggacaaagaagttctgcaaacctcccctggacccttgctggtgtccagatgtctgcggttgtcagccccttcctttcccccgacctaaacataaaagacaaggcaaagcccgcataattttaagacggttctttaggacattagtccaccatcttcttggtttgctggctc

SEQ ID NO: 22824 - DNA, 2722 bp, Homo sapiens
  source 1..2722: mol_type = unassigned DNA
aagacagaccacgaggtaccccagatggaggaatgtgcaaagacgccggggctggagctggaatccgtcccgagacttctcaccttgacctcgaggaaggcaggaggtcggagacagggggtgggcaggctggggaaagaggaaacccgcaggacaagagggttgtggctcgtcacgtggccacttgagggcagcaagtagctgcagctggaggtagctgcctatctgattctgtttgagagtccgccaagttgggatttaaattagacatcaagaagaatttacagaccggccttgccttgttccacggtcacgatgagggcccaggctctggatgggctgccaaagggaccgtgcggggctggaaccggagagcccgagagagccctgggcatgtgtcagagccggacaggacccagctgagccaggacctgggtgggggcaccctggccatggacacgctgccagataacaggaccagggtggtggaggacaaccacagctattatgtgtcccgtctctatggccccagcgagccccacagccgggaactgtgggtagatgtggccgaggccaaccggagccaagtgaagatccacacaatactctccaacacccaccggcaggcttcgagagtggtcttgtcctttgatttccctttctacgggcatcctctgcggcagatcaccatagcaactggaggcttcatcttcatgggggacgtgatccatcggatgctcacagctactcagtatgtggcgcccctgatggccaacttcaaccctggctactccgacaactccacagttgtttactttgacaatgggacagtctttgtggttcagtgggaccacgtttatctccaaggctgggaagacaagggcagtttcaccttccaggcagctctgcaccatgacggccgcattgtctttgcctataaagagatccctatgtctgtcccggaaatcagctcctcccagcatcctgtcaaaaccggcctatcggatgccttcatgattctcaatccatccccggatgtgccagaatctcggcgaaggagcatctttgaatatcaccgcatagagctggaccccagcaaggtcaccagcatgtcggccgtggagttcaccccattgccgagtccctcaacaaccaggatgaaaacacgtatgtgaattgcctggattctcagcagtgtcacggcagctcagagtcaaggcgaccttgaggatcactggagctcatgcagtcctgctagcccctacacctactcacatgggcagatgtggccttggtcctggggagctgggtgggaaggaaggcagggatgccacaaataccttcatcttccggggaagtagagggaatgggagtgcctgactacctcagcctggggaccttggctcctcttctcactatcagcagagagctgttactgaacagtgaaaggggaaggcttctttgtcaatcccatcataactctgtccttttggtcctcctgcagatgctccagtggctttgaccgctatcgccaggagtggatggactatggctgtgcacaggagagggcaggatgtgcgaggacttccaggatgaggaccacgactcagcctcccctgacacttccttcagcccctatgatggagacctcaccactacctcctcctccctcttcatcgacagcctcaccacagaagatgacaccaagttgaatccctatgcaggaggagacggccttcagaacaacctgtcccccaagacaaagggcactcctgtgcacctgggcaccatcgtgggcatcgtgctggcagtcctcctcgtggcggccatcatcctggctggaatttacatcaatggccaccccacatccaatgctgcgctcttcttcatcgagcgtagacctcaccactggccagccatgaagtttcgcagccaccctgaccattccacctatgcggaggtggagccctcgggccatgagaaggagggcttcatggaggctgagcagtgctgagaacaccaagtctcccctttgaagactttgaggccacagaaaagacagttaaagcaaagaagagaagtgacttttcctggcctctcccagcatgccctgggctgagatgagatggtggtttatggctccagagctgctgctcgcttcgtcagcacaccccgaatattgaagagggggccaaaaaacaaccacatggattttttataggaacaacaacctaatctcatcctgttttgatgcaagggttctcttctgtgtcttgtaaccatgaaacagcagaagaactaacataactaactccatttttgtttaaggggcctttacctattcctgcacctaggctaggataactttagagcactgacataaaacgcaaaaacaggaatcatgccgtttgcaaaactaactctgggattaaaggggaagcatgtaaacagctaactgtttttgttaaagatttataggaatgaggaggtttggctattgtcacatgacagactgttagccaaggacaaagaagttctgcaaacctcccctggacccttgctggtgtccagatgtctgcggttgtcagccccttcctttcccccgacctaaacataaaagacaaggcaaagcccgcataattttaagacggttctttaggacattagtccaccatcttcttggtttgctggctctccgaaataaagtccctttccttgctcc

SEQ ID NO: 22825 - DNA, 3068 bp, Homo sapiens
  source 1..3068: mol_type = unassigned DNA
ggcgacggcagcgcctcctccgccaccaaactcctggggctccgcgggggcttggggccacctcctcctgagcccggaggaaccctctcccgataggttccagcgtgactccctcccactccacccttttcctttcttcttcctcttttttttttttttttttaaacacatttttttcctggcttcggacctcagactgctgcagccctaaccttcccagggctcagctctttggagctgcccattcctccggctgcgagaaaggacgcgcgccctgcgtcgggcgaagaaaagaagcaaaacttgtcgggagggtttcgtcatcaacctccttcccgcaaacctaaacctcctgccggggccatccctagacagaggaaagttcctgcagagccgaccagccctagtggatctggggcaggcagcggcgctggctgtggaattagatctgttttgaacccagtggagcgcatcgctggggctcggaagtcaccgtccgcgggcaccgggttggcgctgcccgagtggaaccgacagtttgcgagcctcggctgcaagtggcctctcctccccgcggttgttgttcagtgtcgggtgagggctgcgagtgtggcaagttgcaaagagagcctcagaggtccgaagagcgctgcgctcctactcgcgttcgcttcttcctcttctcggttccctactgtgaaatcgcagcgacatttacaaaggcctccgggtcctaccgagaccgatccgcagcgtttggcccggtcgtgcctattgcatcgggagcccccgagcaccggcgaaggactggcgggtggggtagggaggtggcggcggcggcatggcgaggttcccgaaggccgacctggccgctgcaggagttatgttactttgccacttcttcacggaccagtttcagttcgccgatgggaaacccggagaccaaatccttgattggcagtatggagttactcaggccttccctcacacagaggaggaggtggaagttgattcacacgcgtacagccacaggtggaaaagaaacttggactttctcaaggcggtagacacgaaccgagcaagcgtcggccaagactctcctgagcccagaagcttcacagacctgctgctggatgatgggcaggacaataacactcagatcgagttttggcaggtctgatttaagaaaaactgaaggtgtattttcacatagtatgtcagtggtagacttcgtaattagactaaatcgtgtatatttttgcaggaggatacagaccacaattactatatatctcgaatatatggtccatctgattctgccagccgggatttatgggtgaacatagaccaaatggaaaaagataaagtgaagattcatggaatattgtccaatactcatcggcaagctgcaagagtgaatctgtccttcgattttccattttatggccacttcctacgtgaaatcactgtggcaaccgggggtttcatatacactggagaagtcgtacatcgaatgctaacagccacacagtacatagcacctttaatggcaaatttcgatcccagtgtatccagaaattcaactgtcagatattttgataatggcacagcacttgtggtccagtgggaccatgtacatctccaggataattataacctgggaagcttcacattccaggcaaccctgctcatggatggacgaatcatctttggatacaaagaaattcctgtcttggtcacacagataagttcaaccaatcatccagtgaaagtcggactgtccgatgcatttgtcgttgtccacaggatccaacaaattcccaatgttcgaagaagaacaatttatgaataccaccgagtagagctacaaatgtcaaaaattaccaacatttcggctgtggagatgaccccattacccacatgcctccagtttaacagatgtggcccctgtgtatcttctcagattggcttcaactgcagttggtgtagtaaacttcaaagatgttccagtggatttgatcgtcatcggcaggactgggtggacagtggatgccctgaagagtcaaaagagaagatgtgtgagaatacagaaccagtggaaacttcttctcgaaccaccacaaccgtaggagcgacaaccacccagttcagggtcctaactaccaccagaagagcagtgacttctcagtttcccaccagcctccctacagaagatgataccaagatagcactacatctaaaagataatggagcttctacagatgacagtgcagctgagaagaaagggggaaccctccacgctggcctcatcattggaatcctcatcctggtcctcattgtagccacagccattcttgtgacagtctatatgtatcaccacccaacatcagcagccagcatcttctttattgagagacgcccaagcagatggcctgcgatgaagtttagaagaggctctggacatcctgcctatgctgaagttgaaccagttggagagaaagaaggctttattgtatcagagcagtgctaaaatttctaggacagaacaacaccagtactggtttacaggtgttaagactaaaattttgcctatacctttaagacaaacaaacaaacacacacacaaacaagctctaagctgctgtagcctgaagaagacaagatttctggacaagctcagcccaggaaacaaagggtaaacaaaaaactaaaacttatacaagataccatttacactgaacatagaattccctagtggaatgtcatctatagttcactcggaacatctcccgtggacttatctgaagtatgacaagattataatgcttttggcttaggtgcagggttgcaaagggatcagaaaaaaaaaatcataataaagctttagttcatgagggatcgacacctttggttcaaatgttctctgatgtctcaaagataactgttttccaaagcctgaaccctttcactcaaaagagcaatgatgaatgtctcaagattgctaagaaaaacagcccatgcaagagtgagaacaaacacaaaataagagattttctacattttcaaaa

SEQ ID NO: 22826 - DNA, 2822 bp, Homo sapiens
  source 1..2822: mol_type = unassigned DNA
ggcgacggcagcgcctcctccgccaccaaactcctggggctccgcgggggcttggggccacctcctcctgagcccggaggaaccctctcccgataggttccagcgtgactccctcccactccacccttttcctttcttcttcctcttttttttttttttttttaaacacatttttttcctggcttcggacctcagactgctgcagccctaaccttcccagggctcagctctttggagctgcccattcctccggctgcgagaaaggacgcgcgccctgcgtcgggcgaagaaaagaagcaaaacttgtcgggagggtttcgtcatcaacctccttcccgcaaacctaaacctcctgccggggccatccctagacagaggaaagttcctgcagagccgaccagccctagtggatctggggcaggcagcggcgctggctgtggaattagatctgttttgaacccagtggagcgcatcgctggggctcggaagtcaccgtccgcgggcaccgggttggcgctgcccgagtggaaccgacagtttgcgagcctcggctgcaagtggcctctcctccccgcggttgttgttcagtgtcgggtgagggctgcgagtgtggcaagttgcaaagagagcctcagaggtccgaagagcgctgcgctcctactcgcgttcgcttcttcctcttctcggttccctactgtgaaatcgcagcgacatttacaaaggcctccgggtcctaccgagaccgatccgcagcgtttggcccggtcgtgcctattgcatcgggagcccccgagcaccggcgaaggactggcgggtggggtagggaggtggcggcggcggcatggcgaggttcccgaaggccgacctggccgctgcaggagttatgttactttgccacttcttcacggaccagtttcagttcgccgatgggaaacccggagaccaaatccttgattggcagtatggagttactcaggccttccctcacacagaggaggaggtggaagttgattcacacgcgtacagccacaggtggaaaagaaacttggactttctcaaggcggtagacacgaaccgagcaagcgtcggccaagactctcctgagcccagaagcttcacagacctgctgctggatgatgggcaggacaataacactcagatcgagagagtgaatctgtccttcgattttccattttatggccacttcctacgtgaaatcactgtggcaaccgggggtttcatatacactggagaagtcgtacatcgaatgctaacagccacacagtacatagcacctttaatggcaaatttcgatcccagtgtatccagaaattcaactgtcagatattttgataatggcacagcacttgtggtccagtgggaccatgtacatctccaggataattataacctgggaagcttcacattccaggcaaccctgctcatggatggacgaatcatctttggatacaaagaaattcctgtcttggtcacacagataagttcaaccaatcatccagtgaaagtcggactgtccgatgcatttgtcgttgtccacaggatccaacaaattcccaatgttcgaagaagaacaatttatgaataccaccgagtagagctacaaatgtcaaaaattaccaacatttcggctgtggagatgaccccattacccacatgcctccagtttaacagatgtggcccctgtgtatcttctcagattggcttcaactgcagttggtgtagtaaacttcaaagatgttccagtggatttgatcgtcatcggcaggactgggtggacagtggatgccctgaagagtcaaaagagaagatgtgtgagaatacagaaccagtggaaacttcttctcgaaccaccacaaccgtaggagcgacaaccacccagttcagggtcctaactaccaccagaagagcagtgacttctcagtttcccaccagcctccctacagaagatgataccaagatagcactacatctaaaagataatggagcttctacagatgacagtgcagctgagaagaaagggggaaccctccacgctggcctcatcattggaatcctcatcctggtcctcattgtagccacagccattcttgtgacagtctatatgtatcaccacccaacatcagcagccagcatcttctttattgagagacgcccaagcagatggcctgcgatgaagtttagaagaggctctggacatcctgcctatgctgaagttgaaccagttggagagaaagaaggctttattgtatcagagcagtgctaaaatttctaggacagaacaacaccagtactggtttacaggtgttaagactaaaattttgcctatacctttaagacaaacaaacaaacacacacacaaacaagctctaagctgctgtagcctgaagaagacaagatttctggacaagctcagcccaggaaacaaagggtaaacaaaaaactaaaacttatacaagataccatttacactgaacatagaattccctagtggaatgtcatctatagttcactcggaacatctcccgtggacttatctgaagtatgacaagattataatgcttttggcttaggtgcagggttgcaaagggatcagaaaaaaaaaatcataataaagctttagttcatgagggatcgacacctttggttcaaatgttctctgatgtctcaaagataactgttttccaaagcctgaaccctttcactcaaaagagcaatgatgaatgtctcaagattgctaagaaaaacagcccatgcaagagtgagaacaaacacaaaataagagattttctacattttcaaaa

SEQ ID NO: 22827 - DNA, 2969 bp, Homo sapiens
  source 1..2969: mol_type = unassigned DNA
ggcgacggcagcgcctcctccgccaccaaactcctggggctccgcgggggcttggggccacctcctcctgagcccggaggaaccctctcccgataggttccagcgtgactccctcccactccacccttttcctttcttcttcctcttttttttttttttttttaaacacatttttttcctggcttcggacctcagactgctgcagccctaaccttcccagggctcagctctttggagctgcccattcctccggctgcgagaaaggacgcgcgccctgcgtcgggcgaagaaaagaagcaaaacttgtcgggagggtttcgtcatcaacctccttcccgcaaacctaaacctcctgccggggccatccctagacagaggaaagttcctgcagagccgaccagccctagtggatctggggcaggcagcggcgctggctgtggaattagatctgttttgaacccagtggagcgcatcgctggggctcggaagtcaccgtccgcgggcaccgggttggcgctgcccgagtggaaccgacagtttgcgagcctcggctgcaagtggcctctcctccccgcggttgttgttcagtgtcgggtgagggctgcgagtgtggcaagttgcaaagagagcctcagaggtccgaagagcgctgcgctcctactcgcgttcgcttcttcctcttctcggttccctactgtgaaatcgcagcgacatttacaaaggcctccgggtcctaccgagaccgatccgcagcgtttggcccggtcgtgcctattgcatcgggagcccccgagcaccggcgaaggactggcgggtggggtagggaggtggcggcggcggcatggcgaggttcccgaaggccgacctggccgctgcaggagttatgttactttgccacttcttcacggaccagtttcagttcgccgatgggaaacccggagaccaaatccttgattggcagtatggagttactcaggccttccctcacacagaggaggaggtggaagttgattcacacgcgtacagccacaggtggaaaagaaacttggactttctcaaggcggtagacacgaaccgagcaagcgtcggccaagactctcctgagcccagaagcttcacagacctgctgctggatgatgggcaggacaataacactcagatcgaggaggatacagaccacaattactatatatctcgaatatatggtccatctgattctgccagccgggatttatgggtgaacatagaccaaatggaaaaagataaagtgaagattcatggaatattgtccaatactcatcggcaagctgcaagagtgaatctgtccttcgattttccattttatggccacttcctacgtgaaatcactgtggcaaccgggggtttcatatacactggagaagtcgtacatcgaatgctaacagccacacagtacatagcacctttaatggcaaatttcgatcccagtgtatccagaaattcaactgtcagatattttgataatggcacagcacttgtggtccagtgggaccatgtacatctccaggataattataacctgggaagcttcacattccaggcaaccctgctcatggatggacgaatcatctttggatacaaagaaattcctgtcttggtcacacagataagttcaaccaatcatccagtgaaagtcggactgtccgatgcatttgtcgttgtccacaggatccaacaaattcccaatgttcgaagaagaacaatttatgaataccaccgagtagagctacaaatgtcaaaaattaccaacatttcggctgtggagatgaccccattacccacatgcctccagtttaacagatgtggcccctgtgtatcttctcagattggcttcaactgcagttggtgtagtaaacttcaaagatgttccagtggatttgatcgtcatcggcaggactgggtggacagtggatgccctgaagagtcaaaagagaagatgtgtgagaatacagaaccagtggaaacttcttctcgaaccaccacaaccgtaggagcgacaaccacccagttcagggtcctaactaccaccagaagagcagtgacttctcagtttcccaccagcctccctacagaagatgataccaagatagcactacatctaaaagataatggagcttctacagatgacagtgcagctgagaagaaagggggaaccctccacgctggcctcatcattggaatcctcatcctggtcctcattgtagccacagccattcttgtgacagtctatatgtatcaccacccaacatcagcagccagcatcttctttattgagagacgcccaagcagatggcctgcgatgaagtttagaagaggctctggacatcctgcctatgctgaagttgaaccagttggagagaaagaaggctttattgtatcagagcagtgctaaaatttctaggacagaacaacaccagtactggtttacaggtgttaagactaaaattttgcctatacctttaagacaaacaaacaaacacacacacaaacaagctctaagctgctgtagcctgaagaagacaagatttctggacaagctcagcccaggaaacaaagggtaaacaaaaaactaaaacttatacaagataccatttacactgaacatagaattccctagtggaatgtcatctatagttcactcggaacatctcccgtggacttatctgaagtatgacaagattataatgcttttggcttaggtgcagggttgcaaagggatcagaaaaaaaaaatcataataaagctttagttcatgagggatcgacacctttggttcaaatgttctctgatgtctcaaagataactgttttccaaagcctgaaccctttcactcaaaagagcaatgatgaatgtctcaagattgctaagaaaaacagcccatgcaagagtgagaacaaacacaaaataagagattttctacattttcaaaa

SEQ ID NO: 22828 - DNA, 2230 bp, Homo sapiens
  source 1..2230: mol_type = unassigned DNA
gctgcagccctaaccttcccagggctcagctctttggagctgcccattcctccggctgcgagaaaggacgcgcgccctgcgtcgggcgaagaaaagaagcaaaacttgtcgggagggtttcgtcatcaacctccttcccgcaaacctaaacctcctgccggggccatccctagacagaggaaagttcctgcagagccgaccagccctagtggatctggggcaggcagcggcgctggctgtggaattagatctgttttgaacccagtggagcgcatcgctggggctcggaagtcaccgtccgcgggcaccgggttggcgctgcccgagtggaaccgacagtttgcgagcctcggctgcaagtggcctctcctccccgcggttgttgttcagtgtcgggtgagggctgcgagtgtggcaagttgcaaagagagcctcagaggtccgaagagcgctgcgctcctactcgcgttcgcttcttcctcttctcggttccctactgtgaaatcgcagcgacatttacaaaggcctccgggtcctaccgagaccgatccgctgcaggagttatgttactttgccacttcttcacggaccagtttcagttcgccgatgggaaacccggagaccaaatccttgattggcagtatggagttactcaggccttccctcacacagaggaggaggtggaagttgattcacacgcgtacagccacaggtggaaaagaaacttggactttctcaaggcggtagacacgaaccgagcaagcgtcggccaagactctcctgagcccagaagcttcacagacctgctgctggatgatgggcaggacaataacactcagatcgaggaggatacagaccacaattactatatatctcgaatatatggtccatctgattctgccagccgggatttatgggtgaacatagaccaaatggaaaaagataaagtgaagattcatggaatattgtccaatactcatcggcaagctgcaagagtgaatctgtccttcgattttccattttatggccacttcctacgtgaaatcactgtggcaaccgggggtttcatatacactggagaagtcgtacatcgaatgctaacagccacacagtacatagcacctttaatggcaaatttcgatcccagtgtatccagaaattcaactgtcagatattttgataatggcacagcacttgtggtccagtgggaccatgtacatctccaggataattataacctgggaagcttcacattccaggcaaccctgctcatggatggacgaatcatctttggatacaaagaaattcctgtcttggtcacacagataagttcaaccaatcatccagtgaaagtcggactgtccgatgcatttgtcgttgtccacaggatccaacaaattcccaatgttcgaagaagaacaatttatgaataccaccgagtagagctacaaatgtcaaaaattaccaacatttcggctgtggagatgaccccattacccacatgcctccagtttaacagatgtggcccctgtgtatcttctcagattggcttcaactgcagttggtgtagtaaacttcaaagatgttccagtggatttgatcgtcatcggcaggactgggtggacagtggatgccctgaagagtcaaaagagaagatgtgtgagaatacagaaccagtggaaacttcttctcgaaccaccacaaccgtaggagcgacaaccacccagttcagggtcctaactaccaccagaagagcagtgacttctcagtttcccaccagcctccctacagaagatgataccaagatagcactacatctaaaagataatggagcttctacagatgacagtgcagctgagaagaaagggggaaccctccacgctggcctcatcattggaatcctcatcctggtcctcattgtagccacagccattcttgtgacagtctatatgtatcaccacccaacatcagcagccagcatcttctttattgagagacgcccaagcagatggcctgcgatgaagtttagaagaggctctggacatcctgcctatgctgaagttgaaccagttggagagaaagaaggctttattgtatcagagcagtgctaaaatttctaggacagaacaacaccagtactggtttacaggtgttaagactaaaattttgcctatacctttaagacaaacaaacaaacacacacacaaacaagctctaagctgctgtagcc

SEQ ID NO: 22829 - DNA, 2011 bp, Homo sapiens
  source 1..2011: mol_type = unassigned DNA
agacgccgcccaggacgcagccgccgccgccgccgctcctctgccactggctctgcgccccagcccggctctgctgcagcggcagggaggaagagccgccgcagcgcgactcgggagccccgggccacagcctggcctccggagccacccacaggcctccccgggcggcgcccacgctcctaccgcccggacgcgcggatcctccgccggcaccgcagccacctgctcccggcccagaggcgacgacacgatgcgctgcgcgctggcgctctcggcgctgctgctactgttgtcaacgccgccgctgctgccgtcgtcgccgtcgccgtcgccgtcgccctcccagaatgcaacccagactactacggactcatctaacaaaacagcaccgactccagcatccagtgtcaccatcatggctacagatacagcccagcagagcacagtccccacttccaaggccaacgaaatcttggcctcggtcaaggcgaccacccttggtgtatccagtgactcaccggggactacaaccctggctcagcaagtctcaggcccagtcaacactaccgtggctagaggaggcggctcaggcaaccctactaccaccatcgagagccccaagagcacaaaaagtgcagacaccactacagttgcaacctccacagccacagctaaacctaacaccacaagcagccagaatggagcagaagatacaacaaactctggggggaaaagcagccacagtgtgaccacagacctcacatccactaaggcagaacatctgacgacccctcaccctacaagtccacttagcccccgacaacccacttcgacgcatcctgtggccaccccaacaagctcgggacatgaccatcttatgaaaatttcaagcagttcaagcactgtggctatccctggctacaccttcacaagcccggggatgaccaccaccctaccgtcatcggttatctcgcaaagaactcaacagacctccagtcagatgccagccagctctacggccccttcctcccaggagacagtgcagcccacgagcccggcaacggcattgagaacacctaccctgccagagaccatgagctccagccccacagcagcatcaactacccaccgataccccaaaacaccttctcccactgtggctcatgagagtaactgggcaaagtgtgaggatcttgagacacagacacagagtgagaagcagctcgtcctgaacctcacaggaaacaccctctgtgcagggggcgcttcggatgagaaattgatctcactgatatgccgagcagtcaaagccaccttcaacccggcccaagataagtgcggcatacggctggcatctgttccaggaagtcagaccgtggtcgtcaaagaaatcactattcacactaagctccctgccaaggatgtgtacgagcggctgaaggacaaatgggatgaactaaaggaggcaggggtcagtgacatgaagctaggggaccaggggccaccggaggaggccgaggaccgcttcagcatgcccctcatcatcaccatcgtctgcatggcatcattcctgctcctcgtggcggccctctatggctgctgccaccagcgcctctcccagaggaaggaccagcagcggctaacagaggagctgcagacagtggagaatggttaccatgacaacccaacactggaagtgatggagacctcttctgagatgcaggagaagaaggtggtcagcctcaacggggagctgggggacagctggatcgtccctctggacaacctgaccaaggacgacctggatgaggaggaagacacacacctctagtccggtctgccggtggcctccagcagcaccacagagctccagaccaaccaccccaagtgccgtttggatggggaagggaaagactggggagggagagtgaactccgaggggtgtcccctcccaatccccccagggccttaatttttcccttttcaacctgaacaaatcacattctgtcca

SEQ ID NO: 22830 - DNA, 2105 bp, Homo sapiens
  source 1..2105: mol_type = unassigned DNA
acgccgcccaggacgcagccgccgccgccgccgctcctctgccactggctctgcgccccagcccggctctgctgcagcggcagggaggaagagccgccgcagcgcgactcgggagccccgggccacagcctggcctccggagccacccacaggcctccccgggcggcgcccacgctcctaccgcccggacgcgcggatcctccgccggcaccgcagccacctgctcccggcccagaggcgacgacacgatgcgctgcgcgctggcgctctcggcgctgctgctactgttgtcaacgccgccgctgctgccgtcgtcgccgtcgccgtcgccgtcgccctcccagaatgcaacccagactactacggactcatctaacaaaacagcaccgactccagcatccagtgtcaccatcatggctacagatacagcccagcagagcacagtccccacttccaaggccaacgaaatcttggcctcggtcaaggcgaccacccttggtgtatccagtgactcaccggggactacaaccctggctcagcaagtctcaggcccagtcaacactaccgtggctagaggaggcggctcaggcaaccctactaccaccatcgagagccccaagagcacaaaaagtgcagacaccactacagttgcaacctccacagccacagctaaacctaacaccacaagcagccagaatggagcagaagatacaacaaactctggggggaaaagcagccacagtgtgaccacagacctcacatccactaaggcagaacatctgacgacccctcaccctacaagtccacttagcccccgacaacccacttcgacgcatcctgtggccaccccaacaagctcgggacatgaccatcttatgaaaatttcaagcagttcaagcactgtggctatccctggctacaccttcacaagcccggggatgaccaccaccctactagagacagtgtttcaccatgtcagccaggctggtcttgaactcctgacctcgggtgatctgcccaccttggcctcccaaagtgctgggattacagcgtcatcggttatctcgcaaagaactcaacagacctccagtcagatgccagccagctctacggccccttcctcccaggagacagtgcagcccacgagcccggcaacggcattgagaacacctaccctgccagagaccatgagctccagccccacagcagcatcaactacccaccgataccccaaaacaccttctcccactgtggctcatgagagtaactgggcaaagtgtgaggatcttgagacacagacacagagtgagaagcagctcgtcctgaacctcacaggaaacaccctctgtgcagggggcgcttcggatgagaaattgatctcactgatatgccgagcagtcaaagccaccttcaacccggcccaagataagtgcggcatacggctggcatctgttccaggaagtcagaccgtggtcgtcaaagaaatcactattcacactaagctccctgccaaggatgtgtacgagcggctgaaggacaaatgggatgaactaaaggaggcaggggtcagtgacatgaagctaggggaccaggggccaccggaggaggccgaggaccgcttcagcatgcccctcatcatcaccatcgtctgcatggcatcattcctgctcctcgtggcggccctctatggctgctgccaccagcgcctctcccagaggaaggaccagcagcggctaacagaggagctgcagacagtggagaatggttaccatgacaacccaacactggaagtgatggagacctcttctgagatgcaggagaagaaggtggtcagcctcaacggggagctgggggacagctggatcgtccctctggacaacctgaccaaggacgacctggatgaggaggaagacacacacctctagtccggtctgccggtggcctccagcagcaccacagagctccagaccaaccaccccaagtgccgtttggatggggaagggaaagactggggagggagagtgaactccgaggggtgtcccctcccaatccccccagggccttaatttttcccttttcaacctgaacaaatcacattctgtcca

SEQ ID NO: 22831 - DNA, 5886 bp, Homo sapiens
  source 1..5886: mol_type = unassigned DNA
agccgcgcagacgccgcccaggacgcagccgccgccgccgccgctcctctgccactggctctgcgccccagcccggctctgctgcagcggcagggaggaagagccgccgcagcgcgactcgggagccccgggccacagcctggcctccggagccacccacaggcctccccgggcggcgcccacgctcctaccgcccggacgcgcggatcctccgccggcaccgcagccacctgctcccggcccagaggcgacgacacgatgcgctgcgcgctggcgctctcggcgctgctgctactgttgtcaacgccgccgctgctgccgtcgtcgccgtcgccgtcgccgtcgccctcccagaatgcaacccagactactacggactcatctaacaaaacagcaccgactccagcatccagtgtcaccatcatggctacagatacagcccagcagagcacagtccccacttccaaggccaacgaaatcttggcctcggtcaaggcgaccacccttggtgtatccagtgactcaccggggactacaaccctggctcagcaagtctcaggcccagtcaacactaccgtggctagaggaggcggctcaggcaaccctactaccaccatcgagagccccaagagcacaaaaagtgcagacaccactacagttgcaacctccacagccacagctaaacctaacaccacaagcagccagaatggagcagaagatacaacaaactctggggggaaaagcagccacagtgtgaccacagacctcacatccactaaggcagaacatctgacgacccctcaccctacaagtccacttagcccccgacaacccacttcgacgcatcctgtggccaccccaacaagctcgggacatgaccatcttatgaaaatttcaagcagttcaagcactgtggctatccctggctacaccttcacaagcccggggatgaccaccaccctaccgtcatcggttatctcgcaaagaactcaacagacctccagtcagatgccagccagctctacggccccttcctcccaggagacagtgcagcccacgagcccggcaacggcattgagaacacctaccctgccagagaccatgagctccagccccacagcagcatcaactacccaccgataccccaaaacaccttctcccactgtggctcatgagagtaactgggtaactccagcaggggtgggaacccagactcgggtagaagaggctttaagacaagcacttacccattccctcctccctgcagggggcgcttcggatgagaaattgatctcactgatatgccgagcagtcaaagccaccttcaacccggcccaagataagtgcggcatacggctggcatctgttccaggaagtcagaccgtggtcgtcaaagaaatcactattcacactaagctccctgccaaggatgtgtacgagcggctgaaggacaaatgggatgaactaaaggaggcaggggtcagtgacatgaagctaggggaccaggggccaccggaggaggccgaggaccgcttcagcatgcccctcatcatcaccatcgtctgcatggcatcattcctgctcctcgtggcggccctctatggctgctgccaccagcgcctctcccagaggaaggaccagcagcggctaacagaggagctgcagacagtggagaatggttaccatgacaacccaacactggaagtgatggagacctcttctgagatgcaggagaagaaggtggtcagcctcaacggggagctgggggacagctggatcgtccctctggacaacctgaccaaggacgacctggatgaggaggaagacacacacctctagtccggtctgccggtggcctccagcagcaccacagagctccagaccaaccaccccaagtgccgtttggatggggaagggaaagactggggagggagagtgaactccgaggggtgtcccctcccaatccccccagggccttaatttttcccttttcaacctgaacaaatcacattctgtccagattcctcttgtaaaataacccactagtgcctgagctcagtgctgctggatgatgagggagatcaagaaaaagccacgtaagggactttatagatgaactagtggaatcccttcattctgcagtgagattgccgagacctgaagagggtaagtgacttgcccaaggtcagagccacttggtgacagagccaggatgagaacaaagattccatttgcaccatgccacactgctgtgttcacatgtgccttccgtccagagcagtcccgggcaggggtgaaactccagcaggtggctgggctggaaaggagggcagggctacatcctggctcggtgggatctgacgacctgaaagtccagctcccaagttttccttctcctaccccagcctcgtgtacccatcttcccaccctctatgttcttacccctccctacactcagtgtttgttcccacttactctgtcctggggcctctgggattagcacaggttattcataaccttgaaccccttgttctggattcggattttctcacatttgcttcgtgagatgggggcttaacccacacaggtctccgtgcgtgaaccaggtctgcttaggggacctgcgtgcaggtgaggagagaaggggacactcgagtccaggctggtatctcagggcagctgatgaggggtcagcaggaacactggcccattgcccctggcactccttgcagaggccacccacgatcttctttgggcttccatttccaccagggactaaaatctgctgtagctagtgagagcagcgtgttccttttgttgttcactgctcagctgatgggagtgattccctgagacccagtatgaaagagcagtggctgcaggagaggccttcccggggccccccatcagcgatgtgtcttcagagacaatccattaaagcagccaggaaggacaggctttcccctgtatatcataggaaactcagggacatttcaagttgctgagagttttgttatagttgttttctaacccagccctccactgccaaaggccaaaagctcagacagttggcagacgtccagttagctcatctcactcactctgattctcctgtgccacaggaaaagagggcctggaaagcgcagtgcatgctgggtgcatgaagggcagcctgggggacagactgttgtgggaacgtcccactgtcctggcctggagctaggccttgctgttcctcttctctgtgagcctagtggggctgctgcggttctcttgcagtttctggtggcatctcaggggaacacaaagctatgtctattccccaatataggacttttatgggctcggcagttagctgccatgtagaaggctcctaagcagtgggcatggtgaggtttcatctgattgagaagggggaatcctgtgtggaatgttgaactttcgccatggtctccatcgttctgggcgtaaattccctgggatcaagtaggaaaatgggcagaactgcttaggggaatgaaattgccatttttcgggtgaaacgccacacctccagggtcttaagagtcaggctccggctgtagtagctctgatgaaataggctatccactcgggatggcttactttttaaaagggtagggggaggggctggggaagatctgtcctgcaccatctgcctaattccttcctcacagtctgtagccatctgatatcctaggggaaaaggaaggccaggggttcacatagggccccagcgagtttcccaggagttagagggatgcgaggctaacaagttccaaaaacatctgccccgatgctctagtgtttggaggtgggcaggatggagaacagtgcctgtttgggggaaaacaggaaatcttgttaggcttgagtgaggtgtttgcttccttcttgcccagcgctgggttctctccacccagtaggttttctgttgtggtcccgtgggagaggccagactggattattcctcctttgctgatcctgggtcacacttcaccagccagggcttttgacggagacagcaaataggcctctgcaaatcaatcaaaggctgcaaccctatggcctcttggagacagatgatgactggcaaggactagagagcaggagtgcctggccaggtcggtcctgactctcctgactctccatcgctctgtccaaggagaacccggagaggctctgggctgattcagaggttactgctttatattcgtccaaactgtgttagtctaggcttaggacagcttcagaatctgacaccttgccttgctcttgccaccaggacacctatgtcaacaggccaaacagccatgcatctataaaggtcatcatcttctgccacctttactgggttctaaatgctctctgataattcagagagcattgggtctgggaagaggtaagaggaacactagaagctcagcatgacttaaacaggttgtagcaaagacagtttatcatcagctctttcagtggtaaactgtggtttccccaagctgcacaggaggccagaaaccacaagtatgatgactaggaagcctactgtcatgagagtggggagacaggcagcaaagcttatgaaggaggtacagaatattctttgcgttgtaagacagaatacgggtttaatctagtctaggcaccagatttttttcccgcttgataaggaaagctagcagaaagtttatttaaaccacttcttgagctttatcttttttgacaatatactggagaaactttgaagaacaagttcaaactgatacatatacacatatttttttgataatgtaaatacagtgaccatgttaacctaccctgcactgctttaagtgaacatactttgaaaaagcattatgttagctgagtgatggccaagttttttctctggacaggaatgtaaatgtcttactggaaatgacaagtttttgcttgatttttttttttaaacaaaaaatgaaatataacaagacaaacttatgataaagtatttgtcttgtagatcaggtgttttgttttgtttttttaattttaaaatgcaaccctgccccctccccagcaaagtcacagctccatttcagtaaaggttggagtcaatatgctctggttggcaggcaaccctgtagtcatggagaaaggtatttcaagatctagtccaatctttttctagagaaaaagataatctgaagctcacaaagatgaagtgacttcctcaaaatcacatggttcaggacagaaacaagattaaaacctggatccacagactgtgcgcctcagaaggaataatcggtaaattaagaattgctactcgaaggtgccagaatgacacaaaggacagaattcctttcccagttgttaccctagcaaggctagggagggcatgaacacaaacataagaactggtcttctacactttctctgaatcatttaggtttaagatgtaagtgaacaattctttctttctgccaagaaacaaagttttggatgagcttttatatatggaacttactccaacaggactgagggaccaaggaaacatgatgggggaggcagagagggcaagagtaaaactgtagcatagcttttgtcacggtcactagctgatccctcaggtctgctgcaaacacagcatggaggacacagatgactctttggtgttggtctttttgtctgcagtgaatgttcaacagtttgcccaggaactgggggatcatatatgtcttagtggacaggggtctgaagtacactggaatttactgagaaacttgtttgtaaaaactatagttaataattattgcattttcttacaaaaatatattttggaaaattgtatactgtcaattaaagtgtttttgtgtaaactggttc

SEQ ID NO: 22832 - DNA, 5988 bp, Homo sapiens
  source 1..5988: mol_type = unassigned DNA
agccgcgcagacgccgcccaggacgcagccgccgccgccgccgctcctctgccactggctctgcgccccagcccggctctgctgcagcggcagggaggaagagccgccgcagcgcgactcgggagccccgggccacagcctggcctccggagccacccacaggcctccccgggcggcgcccacgctcctaccgcccggacgcgcggatcctccgccggcaccgcagccacctgctcccggcccagaggcgacgacacgatgcgctgcgcgctggcgctctcggcgctgctgctactgttgtcaacgccgccgctgctgccgtcgtcgccgtcgccgtcgccgtcgccctcccagaatgaaacagcaacccagactactacggactcatctaacaaaacagcaccgactccagcatccagtgtcaccatcatggctacagatacagcccagcagagcacagtccccacttccaaggccaacgaaatcttggcctcggtcaaggcgaccacccttggtgtatccagtgactcaccggggactacaaccctggctcagcaagtctcaggcccagtcaacactaccgtggctagaggaggcggctcaggcaaccctactaccaccatcgagagccccaagagcacaaaaagtgcagacaccactacagttgcaacctccacagccacagctaaacctaacaccacaagcagccagaatggagcagaagatacaacaaactctggggggaaaagcagccacagtgtgaccacagacctcacatccactaaggcagaacatctgacgacccctcaccctacaagtccacttagcccccgacaacccacttcgacgcatcctgtggccaccccaacaagctcgggacatgaccatcttatgaaaatttcaagcagttcaagcactgtggctatccctggctacaccttcacaagcccggggatgaccaccaccctactagagacagtgtttcaccatgtcagccaggctggtcttgaactcctgacctcgggtgatctgcccaccttggcctcccaaagtgctgggattacagcgtcatcggttatctcgcaaagaactcaacagacctccagtcagatgccagccagctctacggccccttcctcccaggagacagtgcagcccacgagcccggcaacggcattgagaacacctaccctgccagagaccatgagctccagccccacagcagcatcaactacccaccgataccccaaaacaccttctcccactgtggctcatgagagtaactgggcaaagtgtgaggatcttgagacacagacacagagtgagaagcagctcgtcctgaacctcacaggaaacaccctctgtgcagggggcgcttcggatgagaaattgatctcactgatatgccgagcagtcaaagccaccttcaacccggcccaagataagtgcggcatacggctggcatctgttccaggaagtcagaccgtggtcgtcaaagaaatcactattcacactaagctccctgccaaggatgtgtacgagcggctgaaggacaaatgggatgaactaaaggaggcaggggtcagtgacatgaagctaggggaccaggggccaccggaggaggccgaggaccgcttcagcatgcccctcatcatcaccatcgtctgcatggcatcattcctgctcctcgtggcggccctctatggctgctgccaccagcgcctctcccagaggaaggaccagcagcggctaacagaggagctgcagacagtggagaatggttaccatgacaacccaacactggaagtgatggagacctcttctgagatgcaggagaagaaggtggtcagcctcaacggggagctgggggacagctggatcgtccctctggacaacctgaccaaggacgacctggatgaggaggaagacacacacctctagtccggtctgccggtggcctccagcagcaccacagagctccagaccaaccaccccaagtgccgtttggatggggaagggaaagactggggagggagagtgaactccgaggggtgtcccctcccaatccccccagggccttaatttttcccttttcaacctgaacaaatcacattctgtccagattcctcttgtaaaataacccactagtgcctgagctcagtgctgctggatgatgagggagatcaagaaaaagccacgtaagggactttatagatgaactagtggaatcccttcattctgcagtgagattgccgagacctgaagagggtaagtgacttgcccaaggtcagagccacttggtgacagagccaggatgagaacaaagattccatttgcaccatgccacactgctgtgttcacatgtgccttccgtccagagcagtcccgggcaggggtgaaactccagcaggtggctgggctggaaaggagggcagggctacatcctggctcggtgggatctgacgacctgaaagtccagctcccaagttttccttctcctaccccagcctcgtgtacccatcttcccaccctctatgttcttacccctccctacactcagtgtttgttcccacttactctgtcctggggcctctgggattagcacaggttattcataaccttgaaccccttgttctggattcggattttctcacatttgcttcgtgagatgggggcttaacccacacaggtctccgtgcgtgaaccaggtctgcttaggggacctgcgtgcaggtgaggagagaaggggacactcgagtccaggctggtatctcagggcagctgatgaggggtcagcaggaacactggcccattgcccctggcactccttgcagaggccacccacgatcttctttgggcttccatttccaccagggactaaaatctgctgtagctagtgagagcagcgtgttccttttgttgttcactgctcagctgatgggagtgattccctgagacccagtatgaaagagcagtggctgcaggagaggccttcccggggccccccatcagcgatgtgtcttcagagacaatccattaaagcagccaggaaggacaggctttcccctgtatatcataggaaactcagggacatttcaagttgctgagagttttgttatagttgttttctaacccagccctccactgccaaaggccaaaagctcagacagttggcagacgtccagttagctcatctcactcactctgattctcctgtgccacaggaaaagagggcctggaaagcgcagtgcatgctgggtgcatgaagggcagcctgggggacagactgttgtgggaacgtcccactgtcctggcctggagctaggccttgctgttcctcttctctgtgagcctagtggggctgctgcggttctcttgcagtttctggtggcatctcaggggaacacaaagctatgtctattccccaatataggacttttatgggctcggcagttagctgccatgtagaaggctcctaagcagtgggcatggtgaggtttcatctgattgagaagggggaatcctgtgtggaatgttgaactttcgccatggtctccatcgttctgggcgtaaattccctgggatcaagtaggaaaatgggcagaactgcttaggggaatgaaattgccatttttcgggtgaaacgccacacctccagggtcttaagagtcaggctccggctgtagtagctctgatgaaataggctatccactcgggatggcttactttttaaaagggtagggggaggggctggggaagatctgtcctgcaccatctgcctaattccttcctcacagtctgtagccatctgatatcctaggggaaaaggaaggccaggggttcacatagggccccagcgagtttcccaggagttagagggatgcgaggctaacaagttccaaaaacatctgccccgatgctctagtgtttggaggtgggcaggatggagaacagtgcctgtttgggggaaaacaggaaatcttgttaggcttgagtgaggtgtttgcttccttcttgcccagcgctgggttctctccacccagtaggttttctgttgtggtcccgtgggagaggccagactggattattcctcctttgctgatcctgggtcacacttcaccagccagggcttttgacggagacagcaaataggcctctgcaaatcaatcaaaggctgcaaccctatggcctcttggagacagatgatgactggcaaggactagagagcaggagtgcctggccaggtcggtcctgactctcctgactctccatcgctctgtccaaggagaacccggagaggctctgggctgattcagaggttactgctttatattcgtccaaactgtgttagtctaggcttaggacagcttcagaatctgacaccttgccttgctcttgccaccaggacacctatgtcaacaggccaaacagccatgcatctataaaggtcatcatcttctgccacctttactgggttctaaatgctctctgataattcagagagcattgggtctgggaagaggtaagaggaacactagaagctcagcatgacttaaacaggttgtagcaaagacagtttatcatcagctctttcagtggtaaactgtggtttccccaagctgcacaggaggccagaaaccacaagtatgatgactaggaagcctactgtcatgagagtggggagacaggcagcaaagcttatgaaggaggtacagaatattctttgcgttgtaagacagaatacgggtttaatctagtctaggcaccagatttttttcccgcttgataaggaaagctagcagaaagtttatttaaaccacttcttgagctttatcttttttgacaatatactggagaaactttgaagaacaagttcaaactgatacatatacacatatttttttgataatgtaaatacagtgaccatgttaacctaccctgcactgctttaagtgaacatactttgaaaaagcattatgttagctgagtgatggccaagttttttctctggacaggaatgtaaatgtcttactggaaatgacaagtttttgcttgatttttttttttaaacaaaaaatgaaatataacaagacaaacttatgataaagtatttgtcttgtagatcaggtgttttgttttgtttttttaattttaaaatgcaaccctgccccctccccagcaaagtcacagctccatttcagtaaaggttggagtcaatatgctctggttggcaggcaaccctgtagtcatggagaaaggtatttcaagatctagtccaatctttttctagagaaaaagataatctgaagctcacaaagatgaagtgacttcctcaaaatcacatggttcaggacagaaacaagattaaaacctggatccacagactgtgcgcctcagaaggaataatcggtaaattaagaattgctactcgaaggtgccagaatgacacaaaggacagaattcctttcccagttgttaccctagcaaggctagggagggcatgaacacaaacataagaactggtcttctacactttctctgaatcatttaggtttaagatgtaagtgaacaattctttctttctgccaagaaacaaagttttggatgagcttttatatatggaacttactccaacaggactgagggaccaaggaaacatgatgggggaggcagagagggcaagagtaaaactgtagcatagcttttgtcacggtcactagctgatccctcaggtctgctgcaaacacagcatggaggacacagatgactctttggtgttggtctttttgtctgcagtgaatgttcaacagtttgcccaggaactgggggatcatatatgtcttagtggacaggggtctgaagtacactggaatttactgagaaacttgtttgtaaaaactatagttaataattattgcattttcttacaaaaatatattttggaaaattgtatactgtcaattaaagtgtttttgtgtaaactggttc

SEQ ID NO: 22833 - DNA, 2078 bp, Homo sapiens
  source 1..2078: mol_type = unassigned DNA
agccgcgcagacgccgcccaggacgcagccgccgccgccgccgctcctctgccactggctctgcgccccagcccggctctgctgcagcggcagggaggaagagccgccgcagcgcgactcgggagccccgggccacagcctggcctccggagccacccacaggcctccccgggcggcgcccacgctcctaccgcccggacgcgcggatcctccgccggcaccgcagccacctgctcccggcccagaggcgacgacacgatgcgctgcgcgctggcgctctcggcgctgctgctactgttgtcaacgtcgccgtcgccctcccagaatgcaacccagactactacggactcatctaacaaaacagcaccgactccagcatccagtgtcaccatcatggctacagatacagcccagcagagcacagtccccacttccaaggccaacgaaatcttggcctcggtcaaggcgaccacccttggtgtatccagtgactcaccggggactacaaccctggctcagcaagtctcaggcccagtcaacactaccgtggctagaggaggcggctcaggcaaccctactaccaccatcgagagccccaagagcacaaaaagtgcagacaccactacagttgcaacctccacagccacagctaaacctaacaccacaagcagccagaatggagcagaagatacaacaaactctggggggaaaagcagccacagtgtgaccacagacctcacatccactaaggcagaacatctgacgacccctcaccctacaagtccacttagcccccgacaacccacttcgacgcatcctgtggccaccccaacaagctcgggacatgaccatcttatgaaaatttcaagcagttcaagcactgtggctatccctggctacaccttcacaagcccggggatgaccaccaccctaccgtcatcggttatctcgcaaagaactcaacagacctccagtcagatgccagccagctctacggccccttcctcccaggagacagtgcagcccacgagcccggcaacggcattgagaacacctaccctgccagagaccatgagctccagccccacagcagcatcaactacccaccgataccccaaaacaccttctcccactgtggctcatgagagtaactgggcaaagtgtgaggatcttgagacacagacacagagtgagaagcagctcgtcctgaacctcacaggaaacaccctctgtgcagggggcgcttcggatgagaaattgatctcactgatatgccgagcagtcaaagccaccttcaacccggcccaagataagtgcggcatacggctggcatctgttccaggaagtcagaccgtggtcgtcaaagaaatcactattcacactaagctccctgccaaggatgtgtacgagcggctgaaggacaaatgggatgaactaaaggaggcaggggtcagtgacatgaagctaggggaccaggggccaccggaggaggccgaggaccgcttcagcatgcccctcatcatcaccatcgtctgcatggcatcattcctgctcctcgtggcggccctctatggctgctgccaccagcgcctctcccagaggaaggaccagcagcggctaacagaggagctgcagacagtggagaatggttaccatgacaacccaacactggaagtgatggagacctcttctgagatgcaggagaagaaggtggtcagcctcaacggggagctgggggacagctggatcgtccctctggacaacctgaccaaggacgacctggatgaggaggaagacacacacctctagtccggtctgccggtggcctccagcagcaccacagagctccagaccaaccaccccaagtgccgtttggatggggaagggaaagactggggagggagagtgaactccgaggggtgtcccctcccaatccccccagggccttaatttttcccttttcaacctgaacaaatcacattctgtccagattcctcttgtaaaataacccactagtgcctgagctcagtgctgctggatgatgagggagatcaagaaaaagccacgtaagggacttt

SEQ ID NO: 22834 - DNA, 3010 bp, Homo sapiens
  source 1..3010: mol_type = unassigned DNA
gacttgaatggaaggagcccgagcccgcggagcgcagctgagactgggggagcgcgttcggcctgtggggcgccgctcggcgccggggcgcagcaggttccgtcagccctggcgcccaggcgcatctgactcggcaccccctgcaggcaccatggcccagagccgggtgctgctgctcctgctgctgctgccgccacagctgcacctgggacctgtgcttgccgtgagggccccaggatttggccgaagtggcggccacagcctgagccccgaagagaacgaatttgcggaggaggagccggtgctggtactgagccctgaggagcccgggcctggcccagccgcggtcagctgcccccgagactgtgcctgttcccaggagggcgtcgtggactgtggcggtattgacctgcgtgagttcccgggggacctgcctgagcacaccaaccacctatctctgcagaacaaccagctggaaaagatctaccctgaggagctctcccggctgcaccggctggagacgctgaacctgcaaaacaaccgcctgacttcccgagggctcccagagaaggcgtttgagcatctgaccaacctcaattacctgtacttggccaataacaagctgaccttggcaccccgcttcctgccaaacgccctgatcagtgtggactttgctgccaactatctcaccaagatctatgggctcacctttggccagaagccaaacttgaggtctgtgtacctgcacaacaacaagctggcagacgccgggctgccggacaacatgttcaacggctccagcaacgtcgaggtcctcatcctgtccagcaacttcctgcgccacgtgcccaagcacctgccgcctgccctgtacaagctgcacctcaagaacaacaagctggagaagatccccccgggggccttcagcgagctgagcagcctgcgcgagctatacctgcagaacaactacctgactgacgagggcctggacaacgagaccttctggaagctctccagcctggagtacctggatctgtccagcaacaacctgtctcgggtcccagctgggctgccgcgcagcctggtgctgctgcacttggagaagaacgccatccggagcgtggacgcgaatgtgctgacccccatccgcagcctggagtacctgctgctgcacagcaaccagctgcgggagcagggcatccacccactggccttccagggcctcaagcggttgcacacggtgcacctgtacaacaacgcgctggagcgcgtgcccagtggcctgcctcgccgcgtgcgcaccctcatgatcctgcacaaccagatcacaggcattggccgcgaagactttgccaccacctacttcctggaggagctcaacctcagctacaaccgcatcaccagcccgcaggtgcaccgcgacgccttccgcaagctgcgcctgctgcgctcgctggacctgtcgggcaaccggctgcacacgctgccacctgggctgcctcgaaatgtccatgtgctgaaggtcaagcgcaatgagctggctgccttggcacgaggggcgctggtgggcatggctcagctgcgtgagctgtacctcaccagcaaccgactgcgcagccgagccctgggcccccgtgcctgggtggacctcgcccatctgcagctgctggacatcgccgggaatcagctcacagagatccccgaggggctccccgagtcacttgagtacctgtacctgcagaacaacaagattagtgcggtgcccgccaatgccttcgactccacgcccaacctcaaggggatctttctcaggtttaacaagctggctgtgggctccgtggtggacagtgccttccggaggctgaagcacctgcaggtcttggacattgaaggcaacttagagtttggtgacatttccaaggaccgtggccgcttggggaaggaaaaggaggaggaggaagaggaggaggaggaggaagaggaaacaagatagtgacaaggtgatgcagatgtgacctaggacgatggaccgccggactcttttctgcagcacacgcctgtgtgctgtgagccccccactctgccgtgctcacacagacacacccagctgcacacatgaggcatcccacatgacacgggctgacacagtctcatatccccaccccttcccacggcgtgtcccacggccagacacatgcacacacatcacaccctcaaacacccagctcagccacacacaactaccctccaaaccaccacagtctctgtcacacccccactaccgctgccacgccctctgaatcatgcagggaagggtctgcccctgccctggcacacacaggcacccattccctccccctgctgacatgtgtatgcgtatgcatacacaccacacacacacacatgcacaagtcatgtgcgaacagccctccaaagcctatgccacagacagctcttgccccagccagaatcagccatagcagctcgccgtctgccctgtccatctgtccgtccgttccctggagaagacacaagggtatccatgctctgtggccaggtgcctgccaccctctggaactcacaaaagctggcttttattcctttcccatcctatggggacaggagccttcaggactgctggcctggcctggcccaccctgctcctccaggtgctgggcagtcactctgctaagagtccctccctgccacgccctggcaggacacaggcacttttccaatgggcaagcccagtggaggcaggatgggagagccccctgggtgctgctggggccttggggcaggagtgaagcagaggtgatggggctgggctgagccagggaggaaggacccagctgcacctaggagacacctttgttcttcaggcctgtgggggaagttccgggtgcctttattttttattcttttctaaggaaaaaaatgataaaaatctcaaagctgatttttcttgttatagaaaaactaatataaaagcattatccctatccctgca

SEQ ID NO: 22835 - DNA, 3287 bp, Homo sapiens
  source 1..3287: mol_type = unassigned DNA
caaaacttgcgtcgcggagagcgcccagcttgacttgaatggaaggagcccgagcccgcggagcgcagctgagactgggggagcgcgttcggcctgtggggcgccgctcggcgccggggcgcagcagggaaggggaagctgtggtctgccctgctccacgaggcgccactggtgtgaaccgggagagcccctgggtggtcccgtcccctatccctcctttatatagaaaccttccacactgggaaggcagcggcgaggcaggagggctcatggtgagcaaggaggccggctgatctgcaggcgcacagcattccgagtttacagatttttacagataccaaatggaaggcgaggaggcagaacagcctgcctggttccgtcagccctggcgcccaggcgcatctgactcggcaccccctgcaggcaccatggcccagagccgggtgctgctgctcctgctgctgctgccgccacagctgcacctgggacctgtgcttgccgtgagggccccaggatttggccgaagtggcggccacagcctgagccccgaagagaacgaatttgcggaggaggagccggtgctggtactgagccctgaggagcccgggcctggcccagccgcggtcagctgcccccgagactgtgcctgttcccaggagggcgtcgtggactgtggcggtattgacctgcgtgagttcccgggggacctgcctgagcacaccaaccacctatctctgcagaacaaccagctggaaaagatctaccctgaggagctctcccggctgcaccggctggagacgctgaacctgcaaaacaaccgcctgacttcccgagggctcccagagaaggcgtttgagcatctgaccaacctcaattacctgtacttggccaataacaagctgaccttggcaccccgcttcctgccaaacgccctgatcagtgtggactttgctgccaactatctcaccaagatctatgggctcacctttggccagaagccaaacttgaggtctgtgtacctgcacaacaacaagctggcagacgccgggctgccggacaacatgttcaacggctccagcaacgtcgaggtcctcatcctgtccagcaacttcctgcgccacgtgcccaagcacctgccgcctgccctgtacaagctgcacctcaagaacaacaagctggagaagatccccccgggggccttcagcgagctgagcagcctgcgcgagctatacctgcagaacaactacctgactgacgagggcctggacaacgagaccttctggaagctctccagcctggagtacctggatctgtccagcaacaacctgtctcgggtcccagctgggctgccgcgcagcctggtgctgctgcacttggagaagaacgccatccggagcgtggacgcgaatgtgctgacccccatccgcagcctggagtacctgctgctgcacagcaaccagctgcgggagcagggcatccacccactggccttccagggcctcaagcggttgcacacggtgcacctgtacaacaacgcgctggagcgcgtgcccagtggcctgcctcgccgcgtgcgcaccctcatgatcctgcacaaccagatcacaggcattggccgcgaagactttgccaccacctacttcctggaggagctcaacctcagctacaaccgcatcaccagcccgcaggtgcaccgcgacgccttccgcaagctgcgcctgctgcgctcgctggacctgtcgggcaaccggctgcacacgctgccacctgggctgcctcgaaatgtccatgtgctgaaggtcaagcgcaatgagctggctgccttggcacgaggggcgctggtgggcatggctcagctgcgtgagctgtacctcaccagcaaccgactgcgcagccgagccctgggcccccgtgcctgggtggacctcgcccatctgcagctgctggacatcgccgggaatcagctcacagagatccccgaggggctccccgagtcacttgagtacctgtacctgcagaacaacaagattagtgcggtgcccgccaatgccttcgactccacgcccaacctcaaggggatctttctcaggtttaacaagctggctgtgggctccgtggtggacagtgccttccggaggctgaagcacctgcaggtcttggacattgaaggcaacttagagtttggtgacatttccaaggaccgtggccgcttggggaaggaaaaggaggaggaggaagaggaggaggaggaggaagaggaaacaagatagtgacaaggtgatgcagatgtgacctaggacgatggaccgccggactcttttctgcagcacacgcctgtgtgctgtgagccccccactctgccgtgctcacacagacacacccagctgcacacatgaggcatcccacatgacacgggctgacacagtctcatatccccaccccttcccacggcgtgtcccacggccagacacatgcacacacatcacaccctcaaacacccagctcagccacacacaactaccctccaaaccaccacagtctctgtcacacccccactaccgctgccacgccctctgaatcatgcagggaagggtctgcccctgccctggcacacacaggcacccattccctccccctgctgacatgtgtatgcgtatgcatacacaccacacacacacacatgcacaagtcatgtgcgaacagccctccaaagcctatgccacagacagctcttgccccagccagaatcagccatagcagctcgccgtctgccctgtccatctgtccgtccgttccctggagaagacacaagggtatccatgctctgtggccaggtgcctgccaccctctggaactcacaaaagctggcttttattcctttcccatcctatggggacaggagccttcaggactgctggcctggcctggcccaccctgctcctccaggtgctgggcagtcactctgctaagagtccctccctgccacgccctggcaggacacaggcacttttccaatgggcaagcccagtggaggcaggatgggagagccccctgggtgctgctggggccttggggcaggagtgaagcagaggtgatggggctgggctgagccagggaggaaggacccagctgcacctaggagacacctttgttcttcaggcctgtgggggaagttccgggtgcctttattttttattcttttctaaggaaaaaaatgataaaaatctcaaagctgatttttcttgttatagaaaaactaatataaaagcattatccctatccctgca

SEQ ID NO: 22836 - DNA, 2614 bp, Homo sapiens
  source 1..2614: mol_type = unassigned DNA
caaaacttgcgtcgcggagagcgcccagcttgacttgaatggaaggagcccgagcccgcggagcgcagctgagactgggggagcgcgttcggcctgtggggcgccgctcggcgccggggcgcagcaggttccgtcagccctggcgcccaggcgcatctgactcggcaccccctgcaggcaccatggcccagagccgggtgctgctgctcctgctgctgctgccgccacagctgcacctgggacctgtgcttgccgtgagggccccaggatttggccgaagtggcggccacagcctgagccccgaagagaacgaatttgcggaggaggagccggtgctggtactgagccctgaggagcccgggcctggcccagccgcggtcagctgcccccgagactgtgcctgttcccaggagggcgtcgtggactgtggcggtattgacctgcgtgagttcccgggggacctgcctgagcacaccaaccacctatctctgcagaacaacaagctggagaagatccccccgggggccttcagcgagctgagcagcctgcgcgagctatacctgcagaacaactacctgactgacgagggcctggacaacgagaccttctggaagctctccagcctggagtacctggatctgtccagcaacaacctgtctcgggtcccagctgggctgccgcgcagcctggtgctgctgcacttggagaagaacgccatccggagcgtggacgcgaatgtgctgacccccatccgcagcctggagtacctgctgctgcacagcaaccagctgcgggagcagggcatccacccactggccttccagggcctcaagcggttgcacacggtgcacctgtacaacaacgcgctggagcgcgtgcccagtggcctgcctcgccgcgtgcgcaccctcatgatcctgcacaaccagatcacaggcattggccgcgaagactttgccaccacctacttcctggaggagctcaacctcagctacaaccgcatcaccagcccgcaggtgcaccgcgacgccttccgcaagctgcgcctgctgcgctcgctggacctgtcgggcaaccggctgcacacgctgccacctgggctgcctcgaaatgtccatgtgctgaaggtcaagcgcaatgagctggctgccttggcacgaggggcgctggtgggcatggctcagctgcgtgagctgtacctcaccagcaaccgactgcgcagccgagccctgggcccccgtgcctgggtggacctcgcccatctgcagctgctggacatcgccgggaatcagctcacagagatccccgaggggctccccgagtcacttgagtacctgtacctgcagaacaacaagattagtgcggtgcccgccaatgccttcgactccacgcccaacctcaaggggatctttctcaggtttaacaagctggctgtgggctccgtggtggacagtgccttccggaggctgaagcacctgcaggtcttggacattgaaggcaacttagagtttggtgacatttccaaggaccgtggccgcttggggaaggaaaaggaggaggaggaagaggaggaggaggaggaagaggaaacaagatagtgacaaggtgatgcagatgtgacctaggacgatggaccgccggactcttttctgcagcacacgcctgtgtgctgtgagccccccactctgccgtgctcacacagacacacccagctgcacacatgaggcatcccacatgacacgggctgacacagtctcatatccccaccccttcccacggcgtgtcccacggccagacacatgcacacacatcacaccctcaaacacccagctcagccacacacaactaccctccaaaccaccacagtctctgtcacacccccactaccgctgccacgccctctgaatcatgcagggaagggtctgcccctgccctggcacacacaggcacccattccctccccctgctgacatgtgtatgcgtatgcatacacaccacacacacacacatgcacaagtcatgtgcgaacagccctccaaagcctatgccacagacagctcttgccccagccagaatcagccatagcagctcgccgtctgccctgtccatctgtccgtccgttccctggagaagacacaagggtatccatgctctgtggccaggtgcctgccaccctctggaactcacaaaagctggcttttattcctttcccatcctatggggacaggagccttcaggactgctggcctggcctggcccaccctgctcctccaggtgctgggcagtcactctgctaagagtccctccctgccacgccctggcaggacacaggcacttttccaatgggcaagcccagtggaggcaggatgggagagccccctgggtgctgctggggccttggggcaggagtgaagcagaggtgatggggctgggctgagccagggaggaaggacccagctgcacctaggagacacctttgttcttcaggcctgtgggggaagttccgggtgcctttattttttattcttttctaaggaaaaaaatgataaaaatctcaaagctgatttttcttgttatagaaaaactaatataaaagcattatccctatccctgc

SEQ ID NO: 22837 - DNA, 5745 bp, Homo sapiens
  source 1..5745: mol_type = unassigned DNA
agcgggactgagcgccgggagagacctgcgcaggcgcaggcgcgcgggaagggccagcctgggtggcccaccccgcgcctggcgggactggccgccaactcccctccgctccagtcacttgtctggagcttgaagaagtgggtattccccttcccaccccaggcactggaggagcggccccccggggattccaggacctgagctccgggagctggactcgcagcgaccgcggcagagcgagcgggcgccgggaagcgaggagacgcccgcgggaggcccagctgctcggagcaactggcatggcccgagccatggccgccgcgtggccgctgctgctggtggcgctactggtgctgtcctggccacccccaggaaccggggacgtcgtcgtgcaggcgcccacccaggtgcccggcttcttgggcgactccgtgacgctgccctgctacctacaggtgcccaacatggaggtgacgcatgtgtcacagctgacttgggcgcggcatggtgaatctggcagcatggccgtcttccaccaaacgcagggccccagctattcggagtccaaacggctggaattcgtggcagccagactgggcgcggagctgcggaatgcctcgctgaggatgttcgggttgcgcgtagaggatgaaggcaactacacctgcctgttcgtcacgttcccgcagggcagcaggagcgtggatatctggctccgagtgcttgccaagccccagaacacagctgaggttcagaaggtccagctcactggagagccagtgcccatggcccgctgcgtctccacagggggtcgcccgccagcccaaatcacctggcactcagacctgggcgggatgcccaatacgagccaggtgccagggttcctgtctggcacagtcactgtcaccagcctctggatattggtgccctcaagccaggtggacggcaagaatgtgacctgcaaggtggagcacgagagctttgagaagcctcagctgctgactgtgaacctcaccgtgtactaccccccagaggtatccatctctggctatgataacaactggtaccttggccagaatgaggccaccctgacctgcgatgctcgcagcaacccagagcccacaggctataattggagcacgaccatgggtcccctgccaccctttgctgtggcccagggcgcccagctcctgatccgtcctgtggacaaaccaatcaacacaactttaatctgcaacgtcaccaatgccctaggagctcgccaggcagaactgaccgtccaggtcaaaggtacagagcatgccagcgcctcagctaatgggcatgtctcctattcagctgtgagcagagagaacagctcttcccaggatccacagacagagggcacaaggtgacagcgtcgggactgagaggggagagagactggagctggcaaggacgtgggcctccagagttggacccgaccccaatggatgaagaccccctccaaagagaccagcctccctccctgtgccagacctcaaaacgacgggggcaggtgcaagttcataggtctccaagaccaccctcctttcatttgctagaaggactcactagactcaggaaagctgttaggctcacagttacagtttattacagtaaaaggacagagattaagatcagcaaagggaggaggtgcacagcacacgttccacgacagatgaggcgacggcttccatctgccctctcccagtggagccatataggcagcacctgattctcacagcaacatgtgacaacatgcaagaagtactgccaatactgccaaccagagcagctcactcgagatctttgtgtccagagttttttgtttgtcttgagacagggtctggctctgttggcagactagagtacagtggtgagatcacagttcattgcagccttgacttctcaacgccaagtcatcctcccacctcagcctcctgagtagctatgactacaggtatgtgccaccacgtctggctaatctttttattatttgtaaagtcgaggtttccctgtgttgcccaggctggtcttgaactcttggctccaagtgatacttctgccttggcctcccaaagtgctgaattaagcagctcaccatccacacggctgacctcatacatcaagccaataccgtgtggcccaagacccccaccataaatcacatcattagcatgaaccacccagagtggcccaagactcccagatcagctaccaggcaggatattccaagggcttagagatgaatgcccaggagctgaggataaagggcccgatctttctttgggcaaggttaagcctttactgcatagcagaccacacagaagggtgtgggccaccagagaattttggtaaaaatttggcctctggccttgagcttctaaatctctgtatccgtcagatctctgtggttacaagaaacagccactgaccctggtcaccagaggctgcaattcaggccgcaagcagctgcctggggggtgtccaaggagcagagaaaactactagatgtgaacttgaagaaggttgtcagctgcagccactttctgccagcatctgcagccactttctgccagcatctgcagccagcaagctgggactggcaggaaataacccacaaaagaagcaaatgcaatttccaacacaagggggaagggatgcagggggaggcagcgctgcagttgctcaggacacgctcctataggaccaagatggatgcgacccaagacccaggaggcccagctgctcagtgcaactgacaagttaaaaaggtctatgatcttgagggcagacagcagaattcctcttataaagaaaactgtttgggaaaatacgttgagggagagaagaccttgggccaagatgctaaatgggaatgcaaagcttgagctgctctgcaagagaaaataagcaggacagaggatttgctctggacagagatggaagagccgggaacagagaagtgtggggaagagataggaaccagcaggatggcaggggcaaagggctcaagggtgaggaggccagtgggaccccacagagttggggagataaaggaacattggttgctttggtggcacgtaagctccttgtctgtctccagcacccagaatctcattaaagcttatttattgtacctccagcggctgtgtgcaatggggtcttttgtggaaatcaaggagcagacaggtttcatgtgtactgtcaccacgtgggatggaaccagaggcatggaagcaagacgctaaatgaagagggccataagggctgggattcccaggcaccttaggaacagcttgtctttttttttttcctctccaaaaaaaatgtttaagggacggtgtctcctgtcacccaggctggagtgcaatggcacgatcatagctcattgcagcctctaactccggggctcaagcaatcctcccacctcagcctaccaagtagctgtgaccacagctgcccctcaccatgctaagctaatttttttaattagatagtacataaacgtcccaaaattagaagataaaaagacatgagggatccattctaatttgtgtttggagtgtaatggtccagctccattcttctgcacatggatatccagttttacacaacactgtgaatgtaatgaatgccactgaatcatacactcaaaaatagctaaaatggcaaattgtctgttatctctttttaaccaccatttttgaaaattaattataccaaaaaaccattgaatagtgcactttatttatttatttatttgtttatttatttatttattttagaaataagagtctcactttgttgcccaggctggagtgcggtggcgtgatcatggctcattgcagcctcgacctgctgggctcgggctatccttccatctcagcctcccgagtagctgggactataggtgggcgccaccccacctggctaaatctctttttaacttttgtagagataggcatctcgctatgttgcctaggctgggctggaactcctgggctcaagtgctcctcctgccttggcctcccaaagcgctaggattacagatgtgagccaccgcgcccaccctgaaccttactttttttgctcagtttctggtaattcagagaatgcctcctgagttgttctacacccacctcatattccatgggagggctgtacagggcttttttaacgaggcctctaaggacaggcatttgtatcctttccagcctttcactattacaatgttgtagtgaataactttacacactgtcatttattttacttttttttttttttattttagagaaaggaatcttgccatcttgcccaggctggtctcaaattcctgggcccaaacaatcctcccgccttggcctcctaaagtactgggatttataggcataagccaccgtgcctggccaatgcacactgtcatttagctcatgttaacacctgagtgtaggacacactcctggaggtggaattgctgggccaaagagtatgtttcttgtcattgtgatagatattgacaaatgaaccctcacagaagttgtgctgagttctgttcccaccagcgacgtaggcgatgacctttttctggagggagggggcatccttggagtccacagagccaggaatggagagtgggcccagaattttggtataggtgttgtataaacttatagtaaggttaagaaaaccgccactatccttatcagagacttggcggggggcagggtatgatggagatcataaggaggctaaaacactccacaccctccctctgcattgctcctgcacaggagtcgggaatcttttcaggttgatacgatctcaccttgaggagctgtgaggtcccagaagcctctgggttgcagattgcttggggtgaaaatgtctgtgctactgaaatctaactttttacaaaaaattacgggctgggcgcagtggctcacgcctgtaatcccagcactttgggaggctgcagcgggtggatcacttgaggtaaggagttcaagaccagaccatagtgaaaccgtgtctctacaaaaaaaattagccaggtgtggtggtgcatgcttgtaatcccagctactcagaaggctgaggtgggagaatcccttgaacccgggaagtggaggctggagtaaaccatgatcgagttactgcactccagcctgggtgacaagagtgagactctgtctccaaaaaaaaaaaaaaaaaaaaaaaaaactggattgcctggctctactccgggcacagcatgcaggcccagttctgctgctctgctgtttgttctgctttcctccacatattggcatcaccctctggtgccaagatggctgctgcattccaggcatcacatccagactcagacccagagaagctgcccatccctacctgggtgagcctttgtaggaacgagaaaccgcatccagcagcagaaacctcacccagcagcgtcttttccggtctcattcaccagcgccgcccaccgctcaaccaatccctggccaaaagaatgggaccgcctggaaggctggaccaaacaggacctgccctctggggctggggagaggcccagatgaaggctgcaggacaggatggactcctagacctctgttaccagcagtgactacctctgtctgggtggttggaacatgtttgaattttattctaagtactgtctacaagttctgcaataaaccttgactcttcttttaataatgcaaa

SEQ ID NO: 22838 - DNA, 2891 bp, Homo sapiens
  source 1..2891: mol_type = unassigned DNA
atggcccgagccatggccgccgcgtggccgctgctgctggtggcgctactggtgctgtcctggccacccccaggaaccggggacgtcgtcgtgcaggcgcccacccaggtgcccggcttcttgggcgactccgtgacgctgccctgctacctacaggtgcccaacatggaggtgacgcatgtgtcacagctgacttgggcgcggcatggtgaatctggcagcatggccgtcttccaccaaacgcagggccccagctattcggagtccaaacggctggaattcgtggcagccagactgggcgcggagctgcggaatgcctcgctgaggatgttcgggttgcgcgtagaggatgaaggcaactacacctgcctgttcgtcacgttcccgcagggcagcaggagcgtggatatctggctccgagtgcttgccaagccccagaacacagctgaggttcagaaggtccagctcactggagagccagtgcccatggcccgctgcgtctccacagggggtcgcccgccagcccaaatcacctggcactcagacctgggcgggatgcccaatacgagccaggtgccagggttcctgtctggcacagtcactgtcaccagcctctggatattggtgccctcaagccaggtggacggcaagaatgtgacctgcaaggtggagcacgagagctttgagaagcctcagctgctgactgtgaacctcaccgtgtactaccccccagaggtatccatctctggctatgataacaactggtaccttggccagaatgaggccaccctgacctgcgatgctcgcagcaacccagagcccacaggctataattggagcacgaccatgggtcccctgccaccctttgctgtggcccagggcgcccagctcctgatccgtcctgtggacaaaccaatcaacacaactttaatctgcaacgtcaccaatgccctaggagctcgccaggcagaactgaccgtccaggtcaaagagggacctcccagtgagcactcaggtacagagcatgccagcgcctcagctaatgggcatgtctcctattcagctgtgagcagagagaacagctcttcccaggatccacagacagagggcacaaggtgacagcgtcgggactgagaggggagagagactggagctggcaaggacgtgggcctccagagttggacccgaccccaatggatgaagaccccctccaaagagaccagcctccctccctgtgccagacctcaaaacgacgggggcaggtgcaagttcataggtctccaagaccaccctcctttcatttgctagaaggactcactagactcaggaaagctgttaggctcacagttacagtttattacagtaaaaggacagagattaagatcagcaaagggaggaggtgcacagcacacgttccacgacagatgaggcgacggcttccatctgccctctcccagtggagccatataggcagcacctgattctcacagcaacatgtgacaacatgcaagaagtactgccaatactgccaaccagagcagctcactcgagatctttgtgtccagagttttttgtttgtcttgagacagggtctggctctgttggcagactagagtacagtggtgagatcacagttcattgcagccttgacttctcaacgccaagtcatcctcccacctcagcctcctgagtagctatgactacaggtatgtgccaccacgtctggctaatctttttattatttgtaaagtcgaggtttccctgtgttgcccaggctggtcttgaactcttggctccaagtgatacttctgccttggcctcccaaagtgctgaattaagcagctcaccatccacacggctgacctcatacatcaagccaataccgtgtggcccaagacccccaccataaatcacatcattagcatgaaccacccagagtggcccaagactcccagatcagctaccaggcaggatattccaagggcttagagatgaatgcccaggagctgaggataaagggcccgatctttctttgggcaaggttaagcctttactgcatagcagaccacacagaagggtgtgggccaccagagaattttggtaaaaatttggcctctggccttgagcttctaaatctctgtatccgtcagatctctgtggttacaagaaacagccactgaccctggtcaccagaggctgcaattcaggccgcaagcagctgcctggggggtgtccaaggagcagagaaaactactagatgtgaacttgaagaaggttgtcagctgcagccactttctgccagcatctgcagccactttctgccagcatctgcagccagcaagctgggactggcaggaaataacccacaaaagaagcaaatgcaatttccaacacaagggggaagggatgcagggggaggcagcgctgcagttgctcaggacacgctcctataggaccaagatggatgcgacccaagacccaggaggcccagctgctcagtgcaactgacaagttaaaaaggtctatgatcttgagggcagacagcagaattcctcttataaagaaaactgtttgggaaaatacgttgagggagagaagaccttgggccaagatgctaaatgggaatgcaaagcttgagctgctctgcaagagaaaataagcaggacagaggatttgctctggacagagatggaagagccgggaacagagaagtgtggggaagagataggaaccagcaggatggcaggggcaaagggctcaagggtgaggaggccagtgggaccccacagagttggggagataaaggaacattggttgctttggtggcacgtaagctccttgtctgtctccagcacccagaatctcattaaagcttatttattgtacctcca

SEQ ID NO: 22839 - DNA, 1347 bp, Homo sapiens
  source 1..1347: mol_type = unassigned DNA
atggcccgagccatggccgccgcgtggccgctgctgctggtggcgctactggtgctgtcctggccacccccaggaaccggggacgtcgtcgtgcaggcgcccacccaggtgcccggcttcttgggcgactccgtgacgctgccctgctacctacaggtgcccaacatggaggtgacgcatgtgtcacagctgacttgggcgcggcatggtgaatctggcagcatggccgtcttccaccaaacgcagggccccagctattcggagtccaaacggctggaattcgtggcagccagactgggcgcggagctgcggaatgcctcgctgaggatgttcgggttgcgcgtagaggatgaaggcaactacacctgcctgttcgtcacgttcccgcagggcagcaggagcgtggatatctggctccgagtgcttgccaagccccagaacacagctgaggttcagaaggtccagctcactggagagccagtgcccatggcccgctgcgtctccacagggggtcgcccgccagcccaaatcacctggcactcagacctgggcgggatgcccaatacgagccaggtgccagggttcctgtctggcacagtcactgtcaccagcctctggatattggtgccctcaagccaggtggacggcaagaatgtgacctgcaaggtggagcacgagagctttgagaagcctcagctgctgactgtgaacctcaccgtgtactaccccccagaggtatccatctctggctatgataacaactggtaccttggccagaatgaggccaccctgacctgcgatgctcgcagcaacccagagcccacaggctataattggagcacgaccatgggtcccctgccaccctttgctgtggcccagggcgcccagctcctgatccgtcctgtggacaaaccaatcaacacaactttaatctgcaacgtcaccaatgccctaggagctcgccaggcagaactgaccgtccaggtcaaagagggacctcccagtgagcactcaggcatatcccgtaacgccatcatcttcctggttctgggaatcctggtttttctgatcctgctggggatcgggatttatttctattggtccaaatgttcccgtgaggtcctttggcactgtcatctgtgtccctcgagtgagcatcaccagagctgccgtaattgagcacctactacgggctctgtgctgagtccttccagtgtgcctctcactgaatcctcaccccactgccatgaggtttcccccatttgactgatgagggtgcagagccagggagccttgttcactggttcattgattacatttacaaatattatttacagagtgggagaa

SEQ ID NO: 22840 - DNA, 3239 bp, Homo sapiens
  source 1..3239: mol_type = unassigned DNA
actggccgccaactcccctccgctccagtcacttgtctggagcttgaagaagtgggtattccccttcccaccccaggcactggaggagcggccccccggggattccaggacctgagctccgggagctggactcgcagcgaccgcggcagagcgagcgggcgccgggaagcgaggagacgcccgcgggaggcccagctgctcggagcaactggcatggcccgagccatggccgccgcgtggccgctgctgctggtggcgctactggtgctgtcctggccacccccaggaaccggggacgtcgtcgtgcaggcgcccacccaggtgcccggcttcttgggcgactccgtgacgctgccctgctacctacaggtgcccaacatggaggtgacgcatgtgtcacagctgacttgggcgcggcatggtgaatctggcagcatggccgtcttccaccaaacgcagggccccagctattcggagtccaaacggctggaattcgtggcagccagactgggcgcggagctgcggaatgcctcgctgaggatgttcgggttgcgcgtagaggatgaaggcaactacacctgcctgttcgtcacgttcccgcagggcagcaggagcgtggatatctggctccgagtgcttgccaagccccagaacacagctgaggttcagaaggtccagctcactggagagccagtgcccatggcccgctgcgtctccacagggggtcgcccgccagcccaaatcacctggcactcagacctgggcgggatgcccaatacgagccaggtgccagggttcctgtctggcacagtcactgtcaccagcctctggatattggtgccctcaagccaggtggacggcaagaatgtgacctgcaaggtggagcacgagagctttgagaagcctcagctgctgactgtgaacctcaccgtgtactaccccccagaggtatccatctctggctatgataacaactggtaccttggccagaatgaggccaccctgacctgcgatgctcgcagcaacccagagcccacaggctataattggagcacgaccatgggtcccctgccaccctttgctgtggcccagggcgcccagctcctgatccgtcctgtggacaaaccaatcaacacaactttaatctgcaacgtcaccaatgccctaggagctcgccaggcagaactgaccgtccaggtcaaagagggacctcccagtgagcactcaggcatatcccgtaacgccatcatcttcctggttctgggaatcctggtttttctgatcctgctggggatcgggatttatttctattggtccaaatgttcccgtgaggtcctttggcactgtcatctgtgtccctcgagtacagagcatgccagcgcctcagctaatgggcatgtctcctattcagctgtgagcagagagaacagctcttcccaggatccacagacagagggcacaaggtgacagcgtcgggactgagaggggagagagactggagctggcaaggacgtgggcctccagagttggacccgaccccaatggatgaagaccccctccaaagagaccagcctccctccctgtgccagacctcaaaacgacgggggcaggtgcaagttcataggtctccaagaccaccctcctttcatttgctagaaggactcactagactcaggaaagctgttaggctcacagttacagtttattacagtaaaaggacagagattaagatcagcaaagggaggaggtgcacagcacacgttccacgacagatgaggcgacggcttccatctgccctctcccagtggagccatataggcagcacctgattctcacagcaacatgtgacaacatgcaagaagtactgccaatactgccaaccagagcagctcactcgagatctttgtgtccagagttttttgtttgtcttgagacagggtctggctctgttggcagactagagtacagtggtgagatcacagttcattgcagccttgacttctcaacgccaagtcatcctcccacctcagcctcctgagtagctatgactacaggtatgtgccaccacgtctggctaatctttttattatttgtaaagtcgaggtttccctgtgttgcccaggctggtcttgaactcttggctccaagtgatacttctgccttggcctcccaaagtgctgaattaagcagctcaccatccacacggctgacctcatacatcaagccaataccgtgtggcccaagacccccaccataaatcacatcattagcatgaaccacccagagtggcccaagactcccagatcagctaccaggcaggatattccaagggcttagagatgaatgcccaggagctgaggataaagggcccgatctttctttgggcaaggttaagcctttactgcatagcagaccacacagaagggtgtgggccaccagagaattttggtaaaaatttggcctctggccttgagcttctaaatctctgtatccgtcagatctctgtggttacaagaaacagccactgaccctggtcaccagaggctgcaattcaggccgcaagcagctgcctggggggtgtccaaggagcagagaaaactactagatgtgaacttgaagaaggttgtcagctgcagccactttctgccagcatctgcagccactttctgccagcatctgcagccagcaagctgggactggcaggaaataacccacaaaagaagcaaatgcaatttccaacacaagggggaagggatgcagggggaggcagcgctgcagttgctcaggacacgctcctataggaccaagatggatgcgacccaagacccaggaggcccagctgctcagtgcaactgacaagttaaaaaggtctatgatcttgagggcagacagcagaattcctcttataaagaaaactgtttgggaaaatacgttgagggagagaagaccttgggccaagatgctaaatgggaatgcaaagcttgagctgctctgcaagagaaaataagcaggacagaggatttgctctggacagagatggaagagccgggaacagagaagtgtggggaagagataggaaccagcaggatggcaggggcaaagggctcaagggtgaggaggccagtgggaccccacagagttggggagataaaggaacattggttgctttggtggcacgtaagctccttgtctgtctccagcacccagaatctcattaaagcttatttattgtacctcca

SEQ ID NO: 22841 - DNA, 5840 bp, Homo sapiens
  source 1..5840: mol_type = unassigned DNA
cgcagccagagccacccgggccgccgaccgccgagccccgcgcccgccgcctgggccccgagccttctgcgccgcccgggtgcgtcccgccaccctcggaggacggccggccatggacgcctgcaagttggagccgagcgggagggtgtgagcgggccggggccaggagcccgcgccgcgcaaccgggcagccgggcgcgccgggggtgggtccctctccccagccccgctctgcgtggaagaagagggcggggaccggcgccgggaggagagcggaggaggcgaaggggcatgactcgtgcaacttgcggcgggcatctgccgagcctctgagccggcggcggcccggggcccggactgcggccgcgcggatcccacccagcccaccccgccccggccgacggctgcagctgacctggatccttcgagcgcccgccgaccgccagcgatcttccctcatcttccgggctggtttctgctgcgcgaggagcgctgccctcgccgcccctctcgccggacccccggcccccgatggctcggatggggcttgcgggcgccgctggacgctggtggggactcgctctcggcttgaccgcattcttcctcccaggcgtccactcccaggtggtccaggtgaacgactccatgtatggcttcatcggcacagacgtggttctgcactgcagctttgccaacccgcttcccagcgtgaagatcacccaggtcacatggcagaagtccaccaatggctccaagcagaacgtggccatctacaacccatccatgggcgtgtccgtgctggctccctaccgcgagcgtgtggaattcctgcggccctccttcaccgatggcactatccgcctctcccgcctggagctggaggatgagggtgtctacatctgcgagtttgctaccttccctacgggcaatcgagaaagccagctcaatctcacggtgatggccaaacccaccaattggatagagggtacccaggcagtgcttcgagccaagaaggggcaggatgacaaggtcctggtggccacctgcacctcagccaatgggaagcctcccagtgtggtatcctgggaaactcggttaaaaggtgaggcagagtaccaggagatccggaaccccaatggcacagtgacggtcatcagccgctaccgcctggtgcccagcagggaagcccaccagcagtccttggcctgcatcgtcaactaccacatggaccgcttcaaggaaagcctcactctcaacgtgcagtatgagcctgaggtaaccattgaggggtttgatggcaactggtacctgcagcggatggacgtgaagctcacctgcaaagctgatgctaaccccccagccactgagtaccactggaccacgctaaatggctctctccccaagggtgtggaggcccagaacagaaccctcttcttcaagggacccatcaactacagcctggcagggacctacatctgtgaggccaccaaccccatcggtacacgctcaggccaggtggaggtcaatatcacagaattcccctacaccccgtctcctcccgaacatgggcggcgcgccgggccggtgcccacggccatcattgggggcgtggcggggagcatcctgctggtgttgattgtggtcggcgggatcgtggtcgccctgcgtcggcgccggcacaccttcaagggtgactacagcaccaagaagcacgtgtatggcaacggctacagcaaggcaggcatcccccagcaccacccaccaatggcacagaacctgcagtaccccgacgactcagacgacgagaagaaggccggcccactgggtggaagcagctatgaggaggaggaggaggaggaggagggcggtggagggggcgagcgcaaggtgggcggcccccaccccaaatatgacgaggacgccaagcggccctacttcaccgtggatgaggccgaggcccgtcaggacggctacggggaccggactctgggctaccagtacgaccctgagcagctggacttggctgagaacatggtttctcagaacgacgggtctttcatttccaagaaggagtggtacgtgtagccccccttccagagcctctgtctgtgaccgctcctccccagcccctccccgcacgccccctgcccaccccccacctcccactccaggagctgaacagagacttgcccagctgcccaaagccagccccgaactcctggggggccaggggagcccagggcagccacgacttggctttgtgttttatttcctccctctcctccgcccttccccatggtgttgtgttcgactgtggctttagtgttactgtatcttccctttacgggccccacctgcctgccctctgtgtagggagccctgttctcgtcttgtgtacctgggcatccctccagggtttggggagccagcctcccccgcccccctacactggaatttgtttgtgtttcttcactgggggtggagggctcaaggggctctaagagggaaaagctccccacacccccagatgctgctcctcctcccggctagagggaacccaacacccaccagtgaaatctgatgcagctgggagtttggaccttgggtctagacagctggtgcgcccaagaggtagggggaggggtgcggcttctccccagttcccagggagtcttgtttgttaagcggggccttgggcagtgttttcctgctgagggtggttttacattttttttcctcattggcccacagagagtggagttggcctagctctgacgcgtcccctctttatccccaatgtgccccctccattaggggctccaggtgggctccagcccacacttgctctctgcctctgctgacacgtgcacacacacacacatgcacacactgctcctctctgcctgctttcccctggagtcccatgccctgccccatccagacactgcccaaggcccacccgtctatttccacctcattccccctttaagctgagaatggggtctgcctatagaagcttccagagacagctgagactgggtccccggtgcctccaccctaggatctcaggcctgccccaaactgcttcttacagcgtggaggtttctctgatttctcccttatctagcaacacttggttcttttggctagtcagggctgggatcccagggggatccacctgcaggagtcagaggtaaagaagcatccacacggagggtagtggggaaggaagcccacatggcagaagctctgcaaacacagtccgagggactgaggagtccatacaatgcctcacacacaaaggccattgtcaaagcctcgggcctggcagaaagtgaggggggtggggccgctaggccacctcctgctcagccacccctggtcctcattctgggatgaggggagggcctaggagaagccctccctttcagtgcagattcccttcttgaatgggacattgagttcctatcagccaccccagactgggtcttcccatgtatataatggaggaagacccctcccagccctctcagtcccccagctcaaagtgcctcagttcctccatctgctcccagatcccctggcactctagacaggcatgcccatgggaaggaccctgggatggagaggcaggcttcgcggcccttcatgcctgcccactgggattccagttaactcaccccagggtgtcaggggctctgcaggatggcaagtgttggggaggagggaggcagaccactctgtgccccacgggcactgacccaccctgccataggcttcctaagggagccccccaacccctcccctcccctccctggtgctgctattgaaccccctgccagctccatttctgccctggcaaccctgggcccagcaggtgggtcgtcgttgtctggccctcactgccctggccccagcccaggctgcccagtagccacgtagcagaagtctgaagccatgccagccctggtgcggctctcccctctacacatttggggtactggatagggtgaagttaggggagaaaattgtggagtctttccagccacagggcagagggaggtggaggagctgggctgcttttcccagcagtattagtgtcccccaggacaggggaccttttccacattacatcactgccccatcccaccttacaacactctggcccctctgcttggtccccttttcccccaggcaggaggcaatcccaggggcctgcctgatagaggcatttcctgtccctgtctcctcctgcatctcctttatcctgcactgccaccctctattccccattctgtgttggactttgaaggccccaagcccagccaaagcactgagttcccccttaagacacctccacaccctccccacaagcaaagcacaaattttggggtccatgtagcatgggccacgtaggaggctcctgacttgccaggggcccagcctcagcatacccaccgagcagctgccagcctgggctgagggtgggcatgaggcaggagtcagcacttggacctagggatgtgaggttttctgtgccccaagtttgtgggaaggtgggcactactgctgggcccacagacacagccagctggcaaaagggaggtctagcccagcagagagatgaggacattttgcttctccttcatgcccacagcatgagctgagcttctgctttgctggaaatgaaataaacttggtatgaattgtgccaaggcctccccagttgtcatcctgcctcttgttgccctccctgtccttgccccccaccccacacccatgcccctgtttccttacagattttgatattgttctaatgtgtaatagaaccagccgagtccccttttatcagaagggtctgaaaagcagcagcacagagtaggtgaacacaggcctgcaagtgcgaccacctcagacccagtacgtgtgcccacagtggacacactcacacctccaacacacccacgcgcaggcatgtgtacacgcatgtacacacgcatgcatgcacagccagatggccactcagcacagatgtggcagagggaatggtctgatcctgctgaaagccattaaggagaaacgaatttcccagtgcccgggctgcaagagagccttataggggccctgtttcctgggcatgcgcttcctctgccagccaacccccacttgcccaagtcactggtgcaataacttttctgccttcctcagagcagagaaattgggaattgtgttaggtgggtgtgggcagctctgctgagccaagcagacacggatgtcccctcttctgggaggagggtagtgctcccaggcctcaggagtccagacagagacccccaaagcctgactgccaacagaaaccctctcctagtgaggggcaggtgggtgtgccccaggtccccacacccacagggaggcttcacacactgcccagtaccggggatgccaggaggcaggcccctctgctgctgccactgctgccaacactgcccagcttgtgaggccaggaggagcccctgtcccactcggtgctgctgctcttctgacccctgctgtgaggaatgggattcttggtcgaaaaaattggttttccttttttgtataaatgaaaagaatccaggagaagctgccaccctcccctcccagcgtgatgcgctaccttgcttcggcgtcttgtcgccctttccgcctttggtccagggacagcccagcagatcctcctggttctgacctggggggtgtttgcatcacccccttttacttgtattaaaaaaaaatgatgggttgaaaatgtactgaggattaaaaatgtacttttttataaataaagtgtttaaaacaaa

SEQ ID NO: 22842 - DNA, 1059 bp, Homo sapiens
  source 1..1059: mol_type = unassigned DNA
atggctcggatggggcttgcgggcgccgctggacgctggtggggactcgctctcggcttgaccgcattcttcctcccaggcgtccactcccaggtggtccaggtgaacgactccatgtatggcttcatcggcacagacgtggttctgcactgcagctttgccaacccgcttcccagcgtgaagatcacccaggtcacatggcagaagtccaccaatggctccaagcagaacgtggccatctacaacccatccatgggcgtgtccgtgctggctccctaccgcgagcgtgtggaattcctgcggccctccttcaccgatggcactatccgcctctcccgcctggagctggaggatgagggtgtctacatctgcgagtttgctaccttccctacgggcaatcgagaaagccagctcaatctcacggtgatggccaaacccaccaattggatagagggtacccaggcagtgcttcgagccaagaaggggcaggatgacaaggtcctggtggccacctgcacctcagccaatgggaagcctcccagtgtggtatcctgggaaactcggttaaaaggtgaggcagagtaccaggagatccggaaccccaatggcacagtgacggtcatcagccgctaccgcctggtgcccagcagggaagcccaccagcagtccttggcctgcatcgtcaactaccacatggaccgcttcaaggaaagcctcactctcaacgtgcagtatgagcctgaggtaaccattgaggggtttgatggcaactggtacctgcagcggatggacgtgaagctcacctgcaaagctgatgctaaccccccagccactgagtaccactggaccacgctaaatggctctctccccaagggtgtggaggcccagaacagaaccctcttcttcaagggacccatcaactacagcctggcagggacctacatctgtgaggccaccaaccccatcggtacacgctcaggccaggtggaggtcaatatcacagctttctgtcaacttatctatccgggcaaagggaggacaagagctaggatgttctga

SEQ ID NO: 22843 - DNA, 1377 bp, Homo sapiens
  source 1..1377: mol_type = unassigned DNA
atggctcggatggggcttgcgggcgccgctggacgctggtggggactcgctctcggcttgaccgcattcttcctcccaggcgtccactcccaggtggtccaggtgaacgactccatgtatggcttcatcggcacagacgtggttctgcactgcagctttgccaacccgcttcccagcgtgaagatcacccaggtcacatggcagaagtccaccaatggctccaagcagaacgtggccatctacaacccatccatgggcgtgtccgtgctggctccctaccgcgagcgtgtggaattcctgcggccctccttcaccgatggcactatccgcctctcccgcctggagctggaggatgagggtgtctacatctgcgagtttgctaccttccctacgggcaatcgagaaagccagctcaatctcacggtgatggccaaacccaccaattggatagagggtacccaggcagtgcttcgagccaagaaggggcaggatgacaaggtcctggtggccacctgcacctcagccaatgggaagcctcccagtgtggtatcctgggaaactcggttaaaaggtgaggcagagtaccaggagatccggaaccccaatggcacagtgacggtcatcagccgctaccgcctggtgcccagcagggaagcccaccagcagtccttggcctgcatcgtcaactaccacatggaccgcttcaaggaaagcctcactctcaacgtgcagtatgagcctgaggtaaccattgaggggtttgatggcaactggtacctgcagcggatggacgtgaagctcacctgcaaagctgatgctaaccccccagccactgagtaccactggaccacgctaaatggctctctccccaagggtgtggaggcccagaacagaaccctcttcttcaagggacccatcaactacagcctggcagggacctacatctgtgaggccaccaaccccatcggtacacgctcaggccaggtggaggtcaatatcacagaaaagccccgcccccagaggggtctgggaagtgcagccaggctcctggcgggcaccgtggccgtgttcctcatcctagttgctgtgctcactgtcttcttcctgtacaaccggcagcagaagagcccaccggagacggatggggccgggaccgaccagcccctctcccagaagccggagccttctcccagcaggcaaagctcccttgtgcctgaggatatccaggttgtccacctggacccagggaggcagcagcagcaagaagaggaggacttgcagaagctgtccctgcagcccccctactatgatctgggggtctccccctcctaccacccctcggtaaggacaaccgaacctcgaggagagtgcccctag

SEQ ID NO: 22844 - DNA, 2856 bp, Homo sapiens
  source 1..2856: mol_type = unassigned DNA
agaattctttggcaggggcgaccttagaatcctggggaggagcgagaatggaatcccggggaggaacaggggtggaatccggggggcggggtcagaacgccaggagggggcggggccggagccagggtcggcttgactcgggggagcagcgggtggatcctgtgacgtcagcgggttcgaaccgccggagctgagcgagaggccgggggtgccgagccgggcggggagagctgggccgggagagcagaacagggaggctagagcgcagcgggaaccggcccggagccggagccggagccccacaggcacctactaaaccgcccagccgatcggcccccacagagtggcccgcgggcctccggccgggcccagtcccctcccgggccctccatggcccgggccgctgccctcctgccgtcgagatcgccgccgacgccgctgctgtggccgctgctgctgctgctgctcctggaaaccggagcccaggatgtgcgagttcaagtgctacccgaggtgcgaggccagctcgggggcaccgtggagctgccgtgccacctgctgccacctgttcctggactgtacatctccctggtgacctggcagcgcccagatgcacctgcgaaccaccagaatgtggccgccttccaccctaagatgggtcccagcttccccagcccgaagcctggcagcgagcggctgtccttcgtctctgccaagcagagcactgggcaagacacagaggcagagctccaggacgccacgctggccctccacgggctcacggtggaggacgagggcaactacacttgcgagtttgccaccttccccaaggggtccgtccgagggatgacctggctcagagtcatagccaagcccaagaaccaagctgaggcccagaaggtcacgttcagccaggaccctacgacagtggccctctgcatctccaaagagggccgcccacctgcccggatctcctggctctcatccctggactgggaagccaaagagactcaggtgtcagggaccctggccggaactgtcactgtcaccagccgcttcaccttggtgccctcgggccgagcagatggtgtcacggtcacctgcaaagtggagcatgagagcttcgaggaaccagccctgatacctgtgaccctctctgtacgctaccctcctgaagtgtccatctccggctatgatgacaactggtacctcggccgtactgatgccaccctgagctgtgacgtccgcagcaacccagagcccacgggctatgactggagcacgacctcaggcaccttcccgacctccgcagtggcccagggctcccagctggtcatccacgcagtggacagtctgttcaataccaccttcgtctgcacagtcaccaatgccgtgggcatgggccgcgctgagcaggtcatctttgtccgagagacccccaacacagcaggcgcaggggccacaggcggcatcatcgggggcatcatcgccgccatcattgctactgctgtggctgccacgggcatccttatctgccggcagcagcggaaggagcagacgctgcagggggcagaggaggacgaagacctggagggacctccctcctacaagccaccaaccccaaaagcgaagctggaggcacaggagatgccctcccagctcttcactctgggggcctcggagcacagcccactcaagaccccctactttgatgctggcgcctcatgcactgagcaggaaatgcctcgataccatgagctgcccaccttggaagaacggtcaggacccttgcaccctggagccacaagcctggggtcccccatcccggtgcctccagggccacctgctgtggaagacgtttccctggatctagaggatgaggagggggaggaggaggaagagtatctggacaagatcaaccccatctatgatgctctgtcctatagcagcccctctgattcctaccagggcaaaggctttgtcatgtcccgggccatgtatgtgtgagctgccatgcgcctggcgtctcacatctcacctgttgatcccttagctttcttgccaaggatctagtgccccctgacctctggccaggccactgtcagttaacacatatgcattccatttgtgatgtctaccttggtggctccactatgacccctaacccatgagcccagagaaattcaccgtgataatggaatcctggcaaccttatctcatgaggcaggaggtggggaaggtgcttctgcacaacctctgatcccaaggactcctctcccagactgtgaccttagaccatacctctcaccccccaatgcctcgactcccccaaaatcacaaagaagaccctagacctataatttgtcttcaggtagtaaattcccaataggtctgctggagtgggcgctgagggctccctgctgctcagacctgagccctccaggcagcagggtcccacttaccccctccccaccctgttccccaaaggtgggaaagaggggattccccagcccaaggcagggttttcccagcaccctcctgtaagcagaagtctcagggtccagacccttccctgagcccccacccccaccccaattcctgcctaccaagcaagcagccccagcctagggtcagacagggtgagcctcatacagactgtgccttgatggccccagccttgggagaagaatttactgttaacctggaagactactgaatcattttacccttgcccagtggaataggacctaaacatcccccttccggggaaagtgggtcatctgaattgggggtagcaattgatactgttttgtaaactacatttcctacaaaatatgaatttatactttgaccagg

SEQ ID NO: 22845 - DNA, 2150 bp, Homo sapiens
  source 1..2150: mol_type = unassigned DNA
agaattctttggcaggggcgaccttagaatcctggggaggagcgagaatggaatcccggggaggaacaggggtggaatccggggggcggggtcagaacgccaggagggggcggggccggagccagggtcggcttgactcgggggagcagcgggtggatcctgtgacgtcagcgggttcgaaccgccggagctgagcgagaggccgggggtgccgagccgggcggggagagctgggccgggagagcagaacagggaggctagagcgcagcgggaaccggcccggagccggagccggagccccacaggcacctactaaaccgcccagccgatcggcccccacagagtggcccgcgggcctccggccgggcccagtcccctcccgggccctccatggcccgggccgctgccctcctgccgtcgagatcgccgccgacgccgctgctgtggccgctgctgctgctgctgctcctggaaaccggagcccaggatgtgcgagttcaagtgctacccgaggtgcgaggccagctcgggggcaccgtggagctgccgtgccacctgctgccacctgttcctggactgtacatctccctggtgacctggcagcgcccagatgcacctgcgaaccaccagaatgtggccgccttccaccctaagatgggtcccagcttccccagcccgaagcctggcagcgagcggctgtccttcgtctctgccaagcagagcactgggcaagacacagaggcagagctccaggacgccacgctggccctccacgggctcacggtggaggacgagggcaactacacttgcgagtttgccaccttccccaaggggtccgtccgagggatgacctggctcagagtcatagccaagcccaagaaccaagctgaggcccagaaggtcacgttcagccaggaccctacgacagtggccctctgcatctccaaagagggccgcccacctgcccggatctcctggctctcatccctggactgggaagccaaagagactcaggtgtcagggaccctggccggaactgtcactgtcaccagccgcttcaccttggtgccctcgggccgagcagatggtgtcacggtcacctgcaaagtggagcatgagagcttcgaggaaccagccctgatacctgtgaccctctctgtacgctaccctcctgaagtgtccatctccggctatgatgacaactggtacctcggccgtactgatgccaccctgagctgtgacgtccgcagcaacccagagcccacgggctatgactggagcacgacctcaggcaccttcccgacctccgcagtggcccagggctcccagctggtcatccacgcagtggacagtctgttcaataccaccttcgtctgcacagtcaccaatgccgtgggcatgggccgcgctgagcaggtcatctttgtccgagaaacccccagggcctcgccccgagatgtgggcccgctggtgtggggggccgtgggggggacactgctggtgctgctgcttctggctggggggtccttggccttcatcctgctgagggtgaggaggaggaggaagagccctggaggagcaggaggaggagccagtggcgacgggggattctacgatccgaaagctcaggtgttgggaaatggggaccccgtcttctggacaccagtagtccctggtcccatggaaccagatggcaaggatgaggaggaggaggaggaggaagagaaggcagagaaaggcctcatgttgcctccacccccagcactcgaggatgacatggagtcccagctggacggctccctcatctcacggcgggcagtttatgtgtgacctggacacagacagagacagagccaggcccggccctcccgcccccgacctgaccacgccggcctagggttccagactggttggacttgttcgtctggacgacactggagtggaacactgcctcccactttcttgggacttggagggaggtggaacagcacactggacttctcccgtctctagggctgcatggggagcccggggagctgagtagtggggatccagagaggacccccgcccccagagacttggttttggctccagccttcccctggccccgtgacactcaggagttaataaatgccttggaggaaaacatc

SEQ ID NO: 22846 - DNA, 1549 bp, Homo sapiens
  source 1..1549: mol_type = unassigned DNA
ggccaagtgtcagccggcagcgacggcgctagagctgggagctggggacgcgcgcgccggaccttccacagcctccgcccagagcctgaggcgccggggccgggggagccggggggcgggcgggcgagcgggccggggggagggtgggggatggcgcggaccctgcggccgtccccgctgtgtcctggaggcggcaaagcacaactttcctccgcttctctcctcggagccgggctcctgctgcagcccccgacgccacctccgctgctgctgctgctcttcccgctgctgctcttctccaggctctgtggtgccttagctggaccaattattgtggagccacatgtcacagcagtatggggaaagaatgtttcattaaagtgtttaattgaagtaaatgaaaccataacacagatttcatgggagaagatacatggcaaaagttcacagactgttgcagttcaccatccccaatatggattctctgttcaaggagaatatcagggaagagtcttgtttaaaaattactcacttaatgatgcaacaattactctgcataacataggattctctgattctggaaaatacatctgcaaagctgttacattcccgcttggaaatgcccagtcctctacaactgtaactgtgttagttgaacccactgtgagcctgataaaagggccagattctttaattgatggaggaaatgaaacagtagcagccatttgcatcgcagccactggaaaacccgttgcacatattgactgggaaggtgatcttggtgaaatggaatccactacaacttcttttccaaatgaaacggcaacgattatcagccagtacaagctatttccaaccagatttgctagaggaaggcgaattacttgtgttgtaaaacatccagccttggaaaaggacatccgatactctttcatattagacatacagtatgctcctgaagtttcggtaacaggatatgatggaaattggtttgtaggaagaaaaggtgttaatctcaaatgtaatgctgatgcaaatccaccacccttcaaatctgtgtggagcaggttggatggacaatggcctgatggtttattggcttcagacaatactcttcattttgtccatccattgactttcaattattctggtgtttatatctgtaaagtgaccaattcccttggtcaaagaagtgaccaaaaagtcatctacatttcagcctacaattcagtggcatccctcaactgctgacatcgaggatctagcaacagaacctaaaaaattgcccttcccattgtcaactttggcaacaattaaggatgacacaattgccacgatcattgctagtgtagtgggtggggctctcttcatagtacttgtaagtgttttggctggaatattctgctataggagaagacggacgtttcgtggagactactttgccaagaactacattccaccatcagatatgcaaaaagaatcacaaatagatgttcttcaacaagatgagcttgattcttacccagacagtgtaaaaaaagaaaacaaa

SEQ ID NO: 22847 - DNA, 3664 bp, Homo sapiens
  source 1..3664: mol_type = unassigned DNA
agttcccaggagttcgacgcgggcgggtgccgaggggaggggagtggcggcggcggcgggcggctcccgcttcagcctcggcagtggcgtcggcgacggcggtgtcgaggcagccgccagcgttcggccaagtgtcagccggcagcgacggcgctagagctgggagctggggacgcgcgcgccggaccttccacagcctccgcccagagcctgaggcgccggggccgggggagccggggggcgggcgggcgagcgggccggggggagggtgggggatggcgcggaccctgcggccgtccccgctgtgtcctggaggcggcaaagcacaactttcctccgcttctctcctcggagccgggctcctgctgcagcccccgacgccacctccgctgctgctgctgctcttcccgctgctgctcttctccaggctctgtggtgccttagctggaccaattattgtggagccacatgtcacagcagtatggggaaagaatgtttcattaaagtgtttaattgaagtaaatgaaaccataacacagatttcatgggagaagatacatggcaaaagttcacagactgttgcagttcaccatccccaatatggattctctgttcaaggagaatatcagggaagagtcttgtttaaaaattactcacttaatgatgcaacaattactctgcataacataggattctctgattctggaaaatacatctgcaaagctgttacattcccgcttggaaatgcccagtcctctacaactgtaactgtgttagttgaacccactgtgagcctgataaaagggccagattctttaattgatggaggaaatgaaacagtagcagccatttgcatcgcagccactggaaaacccgttgcacatattgactgggaaggtgatcttggtgaaatggaatccactacaacttcttttccaaatgaaacggcaacgattatcagccagtacaagctatttccaaccagatttgctagaggaaggcgaattacttgtgttgtaaaacatccagccttggaaaaggacatccgatactctttcatattagacatacagtatgctcctgaagtttcggtaacaggatatgatggaaattggtttgtaggaagaaaaggtgttaatctcaaatgtaatgctgatgcaaatccaccacccttcaaatctgtgtggagcaggttggatggacaatggcctgatggtttattggcttcagacaatactcttcattttgtccatccattgactttcaattattctggtgtttatatctgtaaagtgaccaattcccttggtcaaagaagtgaccaaaaagtcatctacatttcagatcctcctactactaccacccttcagcctacaattcagtggcatccctcaactgctgacatcgaggatctagcaacagaacctaaaaaattgcccttcccattgtcaactttggcaacaattaaggatgacacaattgccacgatcattgctagtgtagtgggtggggctctcttcatagtacttgtaagtgttttggctggaatattctgctataggagaagacggacgtttcgtggagactactttgccaagaactacattccaccatcagatatgcaaaaagaatcacaaatagatgttcttcaacaagatgagcttgattcttacccagacagtgtaaaaaaagaaaacaaaaatccagtgaacaatctaatacgtaaagactatttagaagagcctgaaaaaactcagtggaacaatgtagaaaatctcaataggtttgaaagaccaatggattattatgaagatctaaaaatgggaatgaagtttgtcagtgatgaacattatgatgaaaacgaagatgacttagtttcacatgtagatggttccgtaatttccaggagggagtggtatgtttagcaaccactgaatgtgacttaactatgtacaatgttcattcacactagttgatcattttcagattgttcatactttttcttgaggaagaataagctttttcaagttgattttcaagcttactttttatattctaatctgacaaatgaaaatgtaaaatctgagttcagtgtatctaagctgctttacaattttttttcaatgctgtactactgtctcaagatttaaattttaatgcagagtactttattggtgtgaggcacacaggtaagaagaaatgtcaacattaaatgtatgacttacttggtacaaaaattttttaaaaagggaactaccttgacattgtgtattaaatgtttacctaagactataatctcaagtatgatgtttgtttaacatatacctctcaaaatttatcaccactcaatgacactgcatcaaaattgactataaaactaattcaagaaatatttatatatattttttaatatacaaaaaatatttagcctgatggaatggctttccttttcaaacattattttctaagtttctatacaaatgaaatctttacctctgcatattaatgagccttgccataattactgtagagtggcttttcaaagatattttgttgcactaaaactgtggtagtaaactcagtgaacatgatgtgtggaagagcataattagctggtcaatatttttgtccaaaatacctgcaagagtaataaaatacatacctttcaaacatgataattattagtttttttttttcctttctggaacatggattttggtacattagcagtagccttattttaatgctttatgtcctaaacatactaatagaaatgaaaagacgcagagagagcatttcggaatactgaagtactagttttagaaatgagactttcagccaacaatctatagaaagaattttatggaccatcttgttttagttatttaatgttgatgttgttcaaatgggtaaatgtacagaaagaaaattttagagtaaacttggaactttggatataactagaaaaaactagattatagaattagtcggtaacacttgctaatggacattggcattcatctcctttttcctcctaagtgtatgtatgtgttttaagatttctgtttttacgattaaaactggaaacatgaggttttttgtttttgtttttttacataattacatatattccttctgaatcatttatcttttgagaaagaaatgttacctaaacttcaaatgtgctttttgtttgtgaggtaattaaattgcttctacagtggaggcttacaaaattattgtgacaactattttgaagctgaaaggatagtttttctattgctaagtcatttgaaaaagtgaccattttgccagtgaaatgaagtggaagttagtaggagaatcataaattaaatatattattttgttaataaaaaggcaaagtagtaggtactttttaaaccctcccaaccagccctttctcaatattcatcaaatctaaaacatttagggggcaaaattctaacatgttcatggtatcttgcaaatagtgaaagctttattctgaaggattataaactagttttcttcattttaactagcactattttgtggaaattagaaacctcttttatttctcttcccaaaagtaatacttattataaggctgtagtatcaggttaaggatacagataaataaagttcacttatatcttcttacaaa

SEQ ID NO: 22848 - DNA, 1876 bp, Homo sapiens
  source 1..1876: mol_type = unassigned DNA
aggctctgtggtaggtgaacctcggcggccggcgtgggctgagggagccgccactgagggtgcgggcgccgcggccggctctgccagccgttctctggagcagcgaggcggttggttgtgcgagcgagtgccgaggactttggctggaaacttttcgccgcgcccggggcgaggccctggaagggccaggccagcgaatgctgagccggcggcccgctgccctcccccgcggccgcgcgggtcgccgtgcggatggccgagggttggcgatggtgcttcgtgcgccgaactccgggtttgctccggggaccgttacttcctcgctcattctctgggaaccctcgtgccttagctggaccaattattgtggagccacatgtcacagcagtatggggaaagaatgtttcattaaagtgtttaattgaagtaaatgaaaccataacacagatttcatgggagaagatacatggcaaaagttcacagactgttgcagttcaccatccccaatatggattctctgttcaaggagaatatcagggaagagtcttgtttaaaaattactcacttaatgatgcaacaattactctgcataacataggattctctgattctggaaaatacatctgcaaagctgttacattcccgcttggaaatgcccagtcctctacaactgtaactgtgttagttgaacccactgtgagcctgataaaagggccagattctttaattgatggaggaaatgaaacagtagcagccatttgcatcgcagccactggaaaacccgttgcacatattgactgggaaggtgatcttggtgaaatggaatccactacaacttcttttccaaatgaaacggcaacgattatcagccagtacaagctatttccaaccagatttgctagaggaaggcgaattacttgtgttgtaaaacatccagccttggaaaaggacatccgatactctttcatattagacatacagtatgctcctgaagtttcggtaacaggatatgatggaaattggtttgtaggaagaaaaggtgttaatctcaaatgtaatgctgatgcaaatccaccacccttcaaatctgtgtggagcaggttggatggacaatggcctgatggtttattggcttcagacaatactcttcattttgtccatccattgactttcaattattctggtgtttatatctgtaaagtgaccaattcccttggtcaaagaagtgaccaaaaagtcatctacatttcagatgttccatttaagcagacctcttccatagctgtagctggagcggtaattggagctgttcttgcccttttcatcattgctatctttgtgactgtgctgctgactcctcgaaaaaaaagaccatcctatcttgacaaagtgattgaccttccacccacacataaaccacctcctctgtatgaagaacgatccccacctttgcctcagaaagacctatttcagcctgaacacttgcctttgcagactcagttcaaagaaagagaagttggcaatcttcagcactctaatggactaaatagcaggagttttgactatgaagatgagaatccagttggggaagatggcattcagcagatgtaccccctttacaatcaaatgtgctaccaagaccggagccctggcaaacatcatcaaaataacgaccctaagagagtctacatcgacccacgagaacattatgtgtgatttttctctttttccaatgggcgttctaacaaatgtttattcttagattggggagagaagctaaggccaatagttattttactgtctctcatataagaacagtcccactctaagggtattggaagtcttaatgaatgacgtaaagccaatagcaaatttc

SEQ ID NO: 22849 - DNA, 3502 bp, Homo sapiens
  source 1..3502: mol_type = unassigned DNA
acgcacctgttctgacctgctgagcaggttcccaggtttctgccgtcgttgttggccacagcgtgggaagcagctctgggggagctcggagctcccgatcacggcttcttgggggtagctacggctgggtgtgtagaacggggccggggctggggctgggtcccctagtggagacccaagtgcgagaggcaagaactctgcagcttcctgccttctgggtcagttccttattcaagtctgcagccggctcccagggagatctcggtggaacttcagaaacgctgggcagtctgcctttcaaccatgcccctgtccctgggagccgagatgtgggggcctgaggcctggctgctgctgctgctactgctggcatcatttacaggccggtgccccgcgggtgagctggagacctcagacgtggtaactgtggtgctgggccaggacgcaaaactgccctgcttctaccgaggggactccggcgagcaagtggggcaagtggcatgggctcgggtggacgcgggcgaaggcgcccaggaactagcgctactgcactccaaatacgggcttcatgtgagcccggcttacgagggccgcgtggagcagccgccgcccccacgcaaccccctggacggctcagtgctcctgcgcaacgcagtgcaggcggatgagggcgagtacgagtgccgggtcagcaccttccccgccggcagcttccaggcgcggctgcggctccgagtgctggtgcctcccctgccctcactgaatcctggtccagcactagaagagggccagggcctgaccctggcagcctcctgcacagctgagggcagcccagcccccagcgtgacctgggacacggaggtcaaaggcacaacgtccagccgttccttcaagcactcccgctctgctgccgtcacctcagagttccacttggtgcctagccgcagcatgaatgggcagccactgacttgtgtggtgtcccatcctggcctgctccaggaccaaaggatcacccacatcctccacgtgtccttccttgctgaggcctctgtgaggggccttgaagaccaaaatctgtggcacattggcagagaaggagctatgctcaagtgcctgagtgaagggcagccccctccctcatacaactggacacggctggatgggcctctgcccagtggggtacgagtggatggggacactttgggctttcccccactgaccactgagcacagcggcatctacgtctgccatgtcagcaatgagttctcctcaagggattctcaggtcactgtggatgttcttgacccccaggaagactctgggaagcaggtggacctagtgtcagcctcggtggtggtggtgggtgtgatcgccgcactcttgttctgccttctggtggtggtggtggtgctcatgtcccgataccatcggcgcaaggcccagcagatgacccagaaatatgaggaggagctgaccctgaccagggagaactccatccggaggctgcattcccatcacacggaccccaggagccagccggaggagagtgtagggctgagagccgagggccaccctgatagtctcaaggacaacagtagctgctctgtgatgagtgaagagcccgagggccgcagttactccacgctgaccacggtgagggagatagaaacacagactgaactgctgtctccaggctctgggcgggccgaggaggaggaagatcaggatgaaggcatcaaacaggccatgaaccattttgttcaggagaatgggaccctacgggccaagcccacgggcaatggcatctacatcaatgggcggggacacctggtctgacccaggcctgcctcccttccctaggcctggctccttctgttgacatgggagattttagctcatcttgggggcctccttaaacacccccatttcttgcggaagatgctccccatcccactgactgcttgacctttacctccaacccttctgttcatcgggagggctccaccaattgagtctctcccaccatgcatgcaggtcactgtgtgtgtgcatgtgtgcctgtgtgagtgttgactgactgtgtgtgtgtggaggggtgactgtccgtggaggggtgactgtgtccgtggtgtgtattatgctgtcatatcagagtcaagtgaactgtggtgtatgtgccacgggatttgagtggttgcgtgggcaacactgtcagggtttggcgtgtgtgtcatgtggctgtgtgtgacctctgcctgaaaaagcaggtattttctcagaccccagagcagtattaatgatgcagaggttggaggagagaggtggagactgtggctcagacccaggtgtgcgggcatagctggagctggaatctgcctccggtgtgagggaacctgtctcctaccacttcggagccatgggggcaagtgtgaagcagccagtccctgggtcagccagaggcttgaactgttacagaagccctctgccctctggtggcctctgggcctgctgcatgtacatattttctgtaaatatacatgcgccgggagcttcttgcaggaatactgctccgaatcacttttaatttttttcttttttttttcttgccctttccattagttgtattttttatttatttttatttttatttttttttagagatggagtctcactatgttgctcaggctggccttgaactcctgggctcaagcaatcctcctgcctcagcctccctagtagctgggactttaagtgtacaccactgtgcctgctttgaatcctttacgaagagaaaaaaaaaattaaagaaagcctttagatttatccaatgtttactactgggattgcttaaagtgaggcccctccaacaccagggggttaattcctgtgattgtgaaaggggctacttccaaggcatcttcatgcaggcagccccttgggagggcacctgagagctggtagagtctgaaattagggatgtgagcctcgtggttactgagtaaggtaaaattgcatccaccattgtttgtgataccttagggaattgcttggacctggtgacaagggctcctgttcaatagtggtgttggggagagagagagcagtgattatagaccgagagagtaggagttgaggtgaggtgaaggaggtgctgggggtgagaatgtcgcctttccccctgggttttggatcactaattcaaggctcttctggatgtttctctgggttggggctggagttcaatgaggtttatttttagctggcccacccagatacactcagccagaatacctagatttagtacccaaactcttcttagtctgaaatctgctggatttctggcctaagggagaggctcccatccttcgttccccagccagcctaggacttcgaatgtggagcctgaagatctaagatcctaacatgtacattttatgtaaatatgtgcatatttgtacataaaatgatattctgtttttaaataaacagacaaaacttgttc

SEQ ID NO: 22850 - DNA, 989 bp, Homo sapiens
  source 1..989: mol_type = unassigned DNA
attccagtccttgctgaggcctctgtgaggggccttgaagaccaaaatctgtggcacattggcagagaaggagctatgctcaagtgcctgagtgaagggcagccccctccctcatacaactggacacggctggatgggcctctgcccagtggggtacgagtggatggggacactttgggctttcccccactgaccactgagcacagcggcatctacgtctgccatgtcagcaatgagttctcctcaagggattctcaggtcactgtggatgttcttgacccccaggaagactctgggaagcaggtggacctagtgtcagcctcggtggtggtggtgggtgtgatcgccgcactcttgttctgccttctggtggtggtggtggtgctcatgtcccgataccatcggcgcaaggcccagcagatgacccagaaatatgaggaggagctgaccctgaccagggagaactccatccggaggctgcattcccatcacacggaccccaggagccagagtgaagagcccgagggccgcagttactccacgctgaccacggtgagggagatagaaacacagactgaactgctgtctccaggctctgggcgggccgaggaggaggaagatcaggatgaaggcatcaaacaggccatgaaccattttgttcaggagaatgggaccctacgggccaagcccacgggcaatggcatctacatcaatgggcggggacacctggtctgacccaggcctgcctcccttccctaggcctggctccttctgttgacatgggagattttagctcatcttgggggcctccttaaacacccccatttcttgcggaagatgctccccatcccactgactgcttgacctttacctccaacccttctgttcatcgggagggctccaccaattgagtctctcccaccatgcatgcaggtcactgtgtgtgtgcatgtgtgcctgtgtgagtgttgactgactgtgtgtgtgtg

SEQ ID NO: 22851 - DNA, 2960 bp, Homo sapiens
  source 1..2960: mol_type = unassigned DNA
gcgcgcggctccgctgggaagcgagacccgggtggcgggacaagacttgcttcccggccacgcgcgctcggccggccgtggggcggggcataggccgtgacgtgatgtcgcgtatcgagtctccgcccccttcccgcctccccgtatataagacttcgccgagcgctctcactcgcacaagtggaccggggtgttgggtgctagtcggcaccagaggcaagggtgcgaggaccacggccggctcggacgtgtgaccgcgcctagggggtggcagcgggcagtgcggggcggcaaggcgaccatggagcttttgcggactatcacctaccagccagccgccagcaccaaaatgtgcgagcaggcgctgggcaagggttgcggagcggactcgaagaagaagcggccgccgcagccccccgaggaatcgcagccacctcagtcccaggcgcaagtgcccccggcggcccctcaccaccatcaccaccattcgcactcggggccggagatctcgcggattatcgtcgaccccacgactgggaagcgctactgccggggcaaagtgctgggaaagggtggctttgcaaaatgttacgagatgacagatttgacaaataacaaagtctacgccgcaaaaattattcctcacagcagagtagctaaacctcatcaaagggaaaagattgacaaagaaatagagcttcacagaattcttcatcataagcatgtagtgcagttttaccactacttcgaggacaaagaaaacatttacattctcttggaatactgcagtagaaggtcaatggctcatattttgaaagcaagaaaggtgttgacagagccagaagttcgatactacctcaggcagattgtgtctggactgaaataccttcatgaacaagaaatcttgcacagagatctcaaactagggaacttttttattaatgaagccatggaactaaaagttggggacttcggtctggcagccaggctagaacccttggaacacagaaggagaacgatatgtggtaccccaaattatctctctcctgaagtcctcaacaaacaaggacatggctgtgaatcagacatttgggccctgggctgtgtaatgtatacaatgttactagggaggcccccatttgaaactacaaatctcaaagaaacttataggtgcataagggaagcaaggtatacaatgccgtcctcattgctggctcctgccaagcacttaattgctagtatgttgtccaaaaacccagaggatcgtcccagtttggatgacatcattcgacatgacttttttttgcagggcttcactccggacagactgtcttctagctgttgtcatacagttccagatttccacttatcaagcccagctaagaatttctttaagaaagcagctgctgctctttttggtggcaaaaaagacaaagcaagatatattgacacacataatagagtgtctaaagaagatgaagacatctacaagcttaggcatgatttgaaaaagacttcaataactcagcaacccagcaaacacaggacagatgaggagctccagccacctaccaccacagttgccaggtctggaacacccgcagtagaaaacaagcagcagattggggatgctattcggatgatagtcagagggactcttggcagctgtagcagcagcagtgaatgccttgaagacagtaccatgggaagtgttgcagacacagtggcaagggttcttcggggatgtctggaaaacatgccggaagctgattgcattcccaaagagcagctgagcacatcatttcagtgggtcaccaaatgggttgattactctaacaaatatggctttgggtaccagctctcagaccacaccgtcggtgtccttttcaacaatggtgctcacatgagcctccttccagacaaaaaaacagttcactattacgcagagcttggccaatgctcagttttcccagcaacagatgctcctgagcaatttattagtcaagtgacggtgctgaaatacttttctcattacatggaggagaacctcatggatggtggagatctgcctagtgttactgatattcgaagacctcggctctacctccttcagtggctaaaatctgataaggccctaatgatgctctttaatgatggcacctttcaggtgaatttctaccatgatcatacaaaaatcatcatctgtagccaaaatgaagaataccttctcacctacatcaatgaggataggatatctacaactttcaggctgacaactctgctgatgtctggctgttcatcagaattaaaaaatcgaatggaatatgccctgaacatgctcttacaaagatgtaactgaaagacttttcgaatggaccctatgggactcctcttttccactgtgagatctacagggaagccaaaagaatgatctagagtatgttgaagaagatggacatgtggtggtacgaaaacaattcccctgtggcctgctggactggttggaaccagaacaggctaaggcatacagttcttgactttggacaatccaagagtgaaccagaatgcagttttccttgagatacctgttttaaaaggtttttcagacaattttgcagaaaggtgcattgattcttaaattctctctgttgagagcatttcagccagaggactttggaactgtgaatatacttcctgaaggggagggagaagggaggaagctcccatgttgtttaaaggctgtaattggagcagcttttggctgcgtaactgtgaactatggccatatataattttttttcattaatttttgaagatacttgtggctggaaaagtgcattccttgttaataaactttttatttattacagcccaaagagcagtatttattatcaaaatgtctttttttttatgttgaccattttaaaccgttggcaataaagagtatgaaaacgcagaaa

SEQ ID NO: 22852 - DNA, 1489 bp, Homo sapiens
  source 1..1489: mol_type = unassigned DNA
acaagtggaccggggtgttgggtgctagtcggcaccagaggcaagggtgcgaggaccacggccggctcggacgtgtgaccgcgcctagggggtggcagcgggcagtgcggggcggcaaggcgaccatggagcttttgcggactatcacctaccagccagccgccagcaccaaaatgtgcgagcaggcgctgggcaagggttgcggagcggactcgaagaagaagcggccgccgcagccccccgaggaatcgcagccacctcagtcccaggcgcaagtgcccccggagatctcgcggattatcgtcgaccccacgactgggaagcgctactgccggggcaaagtgctgggaaagggtggctttgcaaaatgttacgagatgacagatttgacaaataacaaagtctacgccgcaaaaattattcctcacagcagagtagctaaacctcatcaaagggaaaagattgacaaagaaatagagcttcacagaattcttcatcataagcatgtagtgcagttttaccactacttcgaggacaaagaaaacatttacattctcttggaatactgcagtagaaggtcaatggctcatattttgaaagcaagaaaggtgttgacagagccagaagttcgatactacctcaggcagattgtgtctggactgaaataccttcatgaacaagaaatcttgcacagagatctcaaactagggaacttttttattaatgaagccatggaactaaaagttggggacttcggtctggcagccaggctagaacccttggaacacagaaggagaacgatatgtggtaccccaaattatctctctcctgaagtcctcaacaaacaaggacatggctgtgaatcagacatttgggccctgggctgtgtaatgtatacaatgttactagggaggcccccatttgaaactacaaatctcaaagaaacttataggtgcataagggaagcaaggtatacaatgccgtcctcattgctggctcctgccaagcacttaattgctagtatgttgtccaaaaacccagaggatcgtcccagtttggatgacatcattcgacatgactttttttgcagggcttcactccggacagactgtcttctagctgttgtcatacagttccagatttccacttatcaagcccagctaagaatttctttaagaaagcagctgctgctctttttggtggcaaaaaagacaaagcaagatatattgacacacataatagagtgtctaaagaagatgaagacatctacaagcttaggcatgatttgaaaaagacttcaataactcagcaacccagcaaacacaggacagatgaggagctccagccacctaccaccacagttgccaggtctggaacacccgcagtagaaaacaagcagcagattggggatgctattcggatgatagtcagagggactcttggcagctgtagcagcagcagtgaatgccttgaagacagtaccatggga

SEQ ID NO: 22853 - DNA, 1267 bp, Homo sapiens
  source 1..1267: mol_type = unassigned DNA
gcacaagtggaccggggtgttgggtgctagtcggcaccagaggcaagggtgcgaggaccacggccggctcggacgtgtgaccgcgcctagggggtggcagcgggcagtgcggggcggcaaggcgaccatggagcttttgcggactatcacctaccagccagccgccagcaccaaaatgtgcgagcaggcgctgggcaagggttgcggagcggactcgaagaagaagcggccgccgcagccccccgaggaatcgcagccacctcagtcccaggcgcaagtgcccccggcggcccctcaccaccatcaccaccattcgcactcggggccggagatctcgcggattatcgtcgaccccacgactgggaagcgctactgccggggcaaagtgctgggaaagggtggctttgcaaaatgttacgagatgacagatttgacaaataacaaagtctacgccgcaaaaattattcctcacagcagagtagctaaacctcatcaaagggaaaagattgacaaagaaatagagcttcacagaattcttcatcataagcatgtagtgcagttttaccactacttcgaggacaaagaaaacatttacattctcttggaatactgcagtagaaggtcaatggctcatattttgaaagcaagaaaggtgttgacagagccagaagttcgatactacctcaggcagattgtgtctggactgaaataccttcatgaacaagaaatcttgcacagagatctcaaactagggaacttttttattaatgaagccatggaactaaaagttggggacttcggtctggcagccaggctagaacccttggaacacagaaggagaacgatatgtggtaccccaaattatctctctcctgaagtcctcaacaaacaaggacatggctgtgaatcagacatttgggccctgggctgtgtaatgtatacaatgttactagggaggcccccatttgaaactacaaatctcaaagaaacttataggtgcataagggaagcaaggtatacaatgccgtcctcattgctggctcctgccaagcacttaattgctagtatgttgtccaaaaacccagaggatcgtcccagtttggatgacatcattcgacatgacttttttttgcagggcttcactccggacagactgtcttctagctgttgtcatacagttccagatttccacttatcaagcccagctaagaatttctttaaaagagcagctgagcacatcatttcagtgggtcaccaaatgggttga

SEQ ID NO: 22854 - DNA, 2429 bp, Homo sapiens
  source 1..2429: mol_type = unassigned DNA
gtagatcttttgcgagcaggagaagttcctaaaccttttccaacacattataaagatttgtgggataacaagcatgttaaaatgccttgttcagaacaaaatttgtacccagtggaagatgagaatggtgagcgaactgcggggagccggtgggagctcattcagactgcacttctcaacaaatttacacgaccccaaaacttgaaggatgctattctgaaatacaatgtggcatattctaagaaatgggactttacagctttgatcgatttctgggataaggtacttgaagaagcagaagctcaacatttatatcagtccatcttgcctgatatggtgaaaattgcactctgtctgccaaatatttgcacccagccaataccactcctgaaacagaagatgaatcattccatcacaatgtcgcaggaacagattgccagtcttttagctaatgctttcttctgcacatttccacgacgaaatgctaagatgaaatcggagtattctagttacccagacattaacttcaatcgattgtttgagggacgttcatcaaggaaaccggagaaacttaaaacgctcttctgctactttagaagagtcacagagaaaaaacctactgggttggtgacatttacaagacagagtcttgaagattttccagaatgggaaagatgtgaaaaacccttgacacgattgcatgtcacttacgaaggtaccatagaagaaaatggccaaggcatgctacaggtggattttgcaaatcgttttgttggaggtggtgtaaccagtgcaggacttgtgcaagaagaaatccgctttttaatcaatcctgagttgattatttcacggctcttcactgaggtgctggatcacaatgaatgtctaattatcacaggtactgagcagtacagtgaatacacaggctatgctgagacatatcgttggtcccggagccacgaagatgggagtgaaagggacgactggcagcggcgctgcactgagatcgttgccatcgatgctcttcacttcagacgctacctcgatcagtttgtgcctgagaaaatgagacgcgagctgaacaaggcttactgtggatttctccgtcctggagtttcttcagagaatctttctgcagtggccacaggaaactggggctgtggtgcctttgggggtgatgccaggttaaaagccttaatacagatattggcagctgctgcagctgagcgagatgtggtttatttcacctttggggactcagaattgatgagagacatttacagcatgcacattttccttactgaaaggaaactcactgttggagatgtgtataagctgttgctacgatactacaatgaagaatgcagaaactgttccacccctggaccagacatcaagctttatccattcatataccatgctgtcgagtcctgtgcagagaccgctgaccattcagggcaaaggacagggacctgaggagccgagcgaatagcatctcctcccacctcccaccagagacgtcctgtttgagctgtcaggtgtaatatatgaattgacttaagttaatataaatgtgtacataatccacatttgtagtcaaggacgcaatctcttccacacatgtgcagttgtcagttggtacatctaaactccctccatcctgactcacgtggacttagatatgttttgtttctattttcttctatttcagtttttcattctttgatgtttatttcttttgtccatcagatctcttgtgaaatcccatggaaggttgtgctcagcctgtcgggtctctttcttcctgcccatatattataccagttgcttctgcagcccgcagatgccagcgatgccaggaaacaagttgaaatccaggaatctctttaactgattttgctaaaaatctccctgtgagccttccactcaactcttaatatgcttgcattgtttaagtttttaaattctgaaaattaataattagggtttttttcatatgtgttgcataatgcaaacctcctaggttaaaatagtttctttatttaagatagaataatttccagaaattgtacttttgaggtatcatttttatctgtaatggtttgtctgtcttttttcctctgatcagtatttttttataccagttttggagactggctgagatgaaaggaaatgtggaataaaaggaggttttcctgatgtggtgtaaagaaaacagattcaagagaattgaagattttttttgtttcttggtacttttttctttttaaattaggactaatgtttcttttgtggtgcttgaggcatattcatataaccaaagtttgagaactgggaacttcatgctgatttgtacatattgaagtttctctggtattcaaaggttatatagtgaatgaattttcattaataaatcactttgtcagaaa

SEQ ID NO: 22855 - DNA, 1639 bp, Homo sapiens
  source 1..1639: mol_type = unassigned DNA
gtactgagcagtacagtgaatacacaggctatgctgagacatatcgttggtcccggagccacgaagatgggagtgaaagggacgactggcagcggcgctgcactgagatcgttgccatcgatgctcttcacttcagacgctacctcgatcagtttgtgcctgagaaaatgagacgcgagctgaacaaggcttactgtggatttctccgtcctggagtttcttcagagaatctttctgcagtggccacaggaaactggggctgtggtgcctttgggggtgatgccaggttaaaagccttaatacagatattggcagctgctgcagctgagcgagatgtggtttatttcacctttggggactcagaattgatgagagacatttacagcatgcacattttccttactgaaaggaaactcactgttggagatgtgtataagctgttgctacgatactacaatgaagaatgcagaaactgttccacccctggaccagacatcaagctttatccattcatataccatgctgtcgagtcctgtgcagagaccgctgaccattcagggcaaaggacagggacctgaggagccgagcgaatagcatctcctcccacctcccaccagagacgtcctgtttgagctgtcaggtgtaatatatgaattgacttaagttaatataaatgtgtacataatccacatttgtagtcaaggacgcaatctcttccacacatgtgcagttgtcagttggtacatctaaactccctccatcctgactcacgtggacttagatatgttttgtttctattttcttctatttcagtttttcattctttgatgtttatttcttttgtccatcagatctcttgtgaaatcccatggaaggttgtgctcagcctgtcgggtctctttcttcctgcccatatattataccagttgcttctgcagcccgcagatgccagcgatgccaggaaacaagttgaaatccaggaatctctttaactgattttgctaaaaatctccctgtgagccttccactcaactcttaatatgcttgcattgtttaagtttttaaattctgaaaattaataattagggtttttttcatatgtgttgcataatgcaaacctcctaggttaaaatagtttctttatttaagatagaataatttccagaaattgtacttttgaggtatcatttttatctgtaatggtttgtctgtcttttttcctctgatcagtatttttttataccagttttggagactggctgagatgaaaggaaatgtggaataaaaggaggttttcctgatgtggtgtaaagaaaacagattcaagagaattgaagattttttttgtttcttggtacttttttctttttaaattaggactaatgtttcttttgtggtgcttgaggcatattcatataaccaaagtttgagaactgggaacttcatgctgatttgtacatattgaagtttctctggtattcaaaggttatatagtgaatgaattttcattaataaatcactttgtcagaaactcccatatcatctatattttatatatgtatatataaacgtatgctctttaagtgtgtctatatgtgagcacataaaatctaaataaaattggactggtgggaaacaa

SEQ ID NO: 22856 - DNA, 570 bp, Homo sapiens
  source 1..570: mol_type = unassigned DNA
gtttctaggtcgtggcgtcgggcttccggagctttggcggcagctaggggaggatggcggagtcttcggataagctctatcgagtcgagtacgccaagagcgggcgcgcctcttgcaagaaatgcagcgagagcatccccaaggactcgctccggatggccatcatggtgcagtcgcccatgtttgatggaaaagtcccacactggtaccacttctcctgcttctggaaggtgggccactccatccggcaccctgacgttgaggtggatgggttctctgagcttcggtgggatgaccagcagaaagtcaagaagacagcggaagctggaggagtgacaggtgtgtacatactggggcagcatgggcattcagcccccaccctgaagctcccaggagggcctcgtctcagagagcaaagcaaacctcccccagcttgccctctcccacatgtgcagatcaagcgtatggtgcccatgttatttcagcaacacctcctggactcagcatcatctgttgcatgatatttggtattttgtttttccaggtgcttggaatgtagcctttaaagtt

SEQ ID NO: 22857 - DNA, 477 bp, Homo sapiens
  source 1..477: mol_type = unassigned DNA
gaacggcggtggccggtgcggcgtgttcggtggcggctctggccgctcaggcgcctgcggctgggtgagcgcacgcgaggcggcgaggcggcagcgtgtttctaggtcgtggcgtcgggcttccggagctttggcggcagctaggggaggatggcggagtcttcggataagctctatcgagtcgagtacgccaagagcgggcgcgcctcttgcaagaaatgcagcgagagcatccccaaggactcgctccggatggccatcatggtgcagtcgcccatgtttgatggaaaagtcccacactggtaccacttctcctgcttctggaaggtgggccactccatccggcaccctgacgttgaggtggatgggttctctgagcttcggtgggatgaccagcagaaagtcaagaagacagcggaagctggaggagtgacagaacctccaataccatgtggaatagaagtgatgggaagatag

SEQ ID NO: 22858 - DNA, 553 bp, Homo sapiens
  source 1..553: mol_type = unassigned DNA
ggcggtggccggtgcggcgtgttcggtggcggctctggccgctcaggcgcctgcggctgggtgagcgcacgcgaggcggcgaggcggcagcgtgtttctaggtcgtggcgtcgggcttccggagctttggcggcagctaggggaggatggcggagtcttcggataagctctatcgagtcgagtacgccaagagcgggcgcgcctcttgcaagaaatgcagcgagagcatccccaaggactcgctccggatggccatcatggtgcagtcgcccatgtttgatggaaaagtcccacactggtaccacttctcctgcttctggaaggtgggccactccatccggcaccctgacgttgaggtggatgggttctctgagcttcggtgggatgaccagcagaaagtcaagaagacagcggaagctggaggagtgacagaacctccaataccatgtggaatagaagtgatgggaagatagcttcgtcttattcctaatcttaggcaaaggccaggatggaattggtagcaaggcagagaagactctgggtgactttgcag

SEQ ID NO: 22859 - DNA, 3958 bp, Homo sapiens
  source 1..3958: mol_type = unassigned DNA
cggtggccggtgcggcgtgttcggtggcggctctggccgctcaggcgcctgcggctgggtgagcgcacgcgaggcggcgaggcggcagcgtgtttctaggtcgtggcgtcgggcttccggagctttggcggcagctaggggaggatggcggagtcttcggataagctctatcgagtcgagtacgccaagagcgggcgcgcctcttgcaagaaatgcagcgagagcatccccaaggactcgctccggatggccatcatggtgcagtcgcccatgtttgatggaaaagtcccacactggtaccacttctcctgcttctggaaggtgggccactccatccggcaccctgacgttgaggtggatgggttctctgagcttcggtgggatgaccagcagaaagtcaagaagacagcggaagctggaggagtgacaggcaaaggccaggatggaattggtagcaaggcagagaagactctgggtgactttgcagcagagtatgccaagtccaacagaagtacgtgcaaggggtgtatggagaagatagaaaagggccaggtgcgcctgtccaagaagatggtggacccggagaagccacagctaggcatgattgaccgctggtaccatccaggctgctttgtcaagaacagggaggagctgggtttccggcccgagtacagtgcgagtcagctcaagggcttcagcctccttgctacagaggataaagaagccctgaagaagcagctcccaggagtcaagagtgaaggaaagagaaaaggcgatgaggtggatggagtggatgaagtggcgaagaagaaatctaaaaaagaaaaagacaaggatagtaagcttgaaaaagccctaaaggctcagaacgacctgatctggaacatcaaggacgagctaaagaaagtgtgttcaactaatgacctgaaggagctactcatcttcaacaagcagcaagtgccttctggggagtcggcgatcttggaccgagtagctgatggcatggtgttcggtgccctccttccctgcgaggaatgctcgggtcagctggtcttcaagagcgatgcctattactgcactggggacgtcactgcctggaccaagtgtatggtcaagacacagacacccaaccggaaggagtgggtaaccccaaaggaattccgagaaatctcttacctcaagaaattgaaggttaaaaaacaggaccgtatattccccccagaaaccagcgcctccgtggcggccacgcctccgccctccacagcctcggctcctgctgctgtgaactcctctgcttcagcagataagccattatccaacatgaagatcctgactctcgggaagctgtcccggaacaaggatgaagtgaaggccatgattgagaaactcggggggaagttgacggggacggccaacaaggcttccctgtgcatcagcaccaaaaaggaggtggaaaagatgaataagaagatggaggaagtaaaggaagccaacatccgagttgtgtctgaggacttcctccaggacgtctccgcctccaccaagagccttcaggagttgttcttagcgcacatcttgtccccttggggggcagaggtgaaggcagagcctgttgaagttgtggccccaagagggaagtcaggggctgcgctctccaaaaaaagcaagggccaggtcaaggaggaaggtatcaacaaatctgaaaagagaatgaaattaactcttaaaggaggagcagctgtggatcctgattctggactggaacactctgcgcatgtcctggagaaaggtgggaaggtcttcagtgccacccttggcctggtggacatcgttaaaggaaccaactcctactacaagctgcagcttctggaggacgacaaggaaaacaggtattggatattcaggtcctggggccgtgtgggtacggtgatcggtagcaacaaactggaacagatgccgtccaaggaggatgccattgagcacttcatgaaattatatgaagaaaaaaccgggaacgcttggcactccaaaaatttcacgaagtatcccaaaaagttctaccccctggagattgactatggccaggatgaagaggcagtgaagaagctgacagtaaatcctggcaccaagtccaagctccccaagccagttcaggacctcatcaagatgatctttgatgtggaaagtatgaagaaagccatggtggagtatgagatcgaccttcagaagatgcccttggggaagctgagcaaaaggcagatccaggccgcatactccatcctcagtgaggtccagcaggcggtgtctcagggcagcagcgactctcagatcctggatctctcaaatcgcttttacaccctgatcccccacgactttgggatgaagaagcctccgctcctgaacaatgcagacagtgtgcaggccaaggtggaaatgcttgacaacctgctggacatcgaggtggcctacagtctgctcaggggagggtctgatgatagcagcaaggatcccatcgatgtcaactatgagaagctcaaaactgacattaaggtggttgacagagattctgaagaagccgagatcatcaggaagtatgttaagaacactcatgcaaccacacacaatgcgtatgacttggaagtcatcgatatctttaagatagagcgtgaaggcgaatgccagcgttacaagccctttaagcagcttcataaccgaagattgctgtggcacgggtccaggaccaccaactttgctgggatcctgtcccagggtcttcggatagccccgcctgaagcgcccgtgacaggctacatgtttggtaaagggatctatttcgctgacatggtctccaagagtgccaactactgccatacgtctcagggagacccaataggcttaatcctgttgggagaagttgcccttggaaacatgtatgaactgaagcacgcttcacatatcagcaagttacccaagggcaagcacagtgtcaaaggtttgggcaaaactacccctgatccttcagctaacattagtctggatggtgtagacgttcctcttgggaccgggatttcatctggtgtgaatgacacctctctactatataacgagtacattgtctatgatattgctcaggtaaatctgaagtatctgctgaaactgaaattcaattttaagacctccctgtggtaattgggagaggtagccgagtcacacccggtggctctggtatgaattcacccgaagcgcttctgcaccaactcacctggccgctaagttgctgatgggtagtacctgtactaaaccacctcagaaaggattttacagaaacgtgttaaaggttttctctaacttctcaagtcccttgttttgtgttgtgtctgtggggaggggttgttttggggttgtttttgttttttcttgccaggtagataaaactgacatagagaaaaggctggagagagattctgttgcatagactagtcctatggaaaaaaccaagcttcgttagaatgtctgccttactggtttccccagggaaggaaaaatacacttccacccttttttctaagtgttcgtctttagttttgattttggaaagatgttaagcatttatttttagttaaaaataaaaactaatttcatactatttagattttcttttttatcttgcacttattgtcccctttttagttttttttgtttgcctcttgtggtgaggggtgtgggaagaccaaaggaaggaacgctaacaatttctcatacttagaaacaaaaagagctttccttctccaggaatactgaacatgggagctcttgaaatatgtagtattaaaagttgcatttgaaattcttgactttcttatgggcacttttgtcttccaaattaaaactctaccacaaatatacttacccaagggctaatagtaatactcgattaaaaatgcagatgccttctcta

SEQ ID NO: 22860 - DNA, 750 bp, Homo sapiens
  source 1..750: mol_type = unassigned DNA
atggcggagtcttcggataagctctatcgagtcgagtacgccaagagcgggcgcgcctcttgcaagaaatgcagcgagagcatccccaaggactcgctccggatggccatcatggtgcagtcgcccatgtttgatggaaaagtcccacactggtaccacttctcctgcttctggaaggtgggccactccatccggcaccctgacgttgaggtggatgggttctctgagcttcggtgggatgaccagcagaaagtcaagaagacagcggaagctggaggagtgacaggcaaaggccaggatggaattggtagcaaggcagagaagactctgggtgactttgcagcagagtatgccaagtccaacagaagtacgtgcaaggggtgtatggagaagatagaaaagggccaggtgcgcctgtccaagaagatggtggacccggagaagccacagctaggcatgattgaccgctggtaccatccaggctgctttgtcaagaacagggaggagctgggtttccggcccgagtacagtgcgagtcagctcaagggcttcagcctccttgctacagaggataaagaagccctgaagaagcagctcccaggagtcaagagtgaaggaaagagaaaaggcgatgaggtggatggagtggatgaagtggcgaagaagaaatctaaaaaagaaaaagacaagaaaaaaaaaaaaaaaaaaaaaaaggaaagaaaaaaaaagaagaaaaaaagaaaaaaaaag

SEQ ID NO: 22861 - DNA, 6769 bp, Homo sapiens
  source 1..6769: mol_type = unassigned DNA
ctccctgttcccggcagagccgcttccccctcctccctgtgctgtctgcaccgaggagagcggcctgccgggtgagtaggtccggtgcctctgggccctcggggtcccctctcctgcaggctcgaggtgggcggggagaagggggacgggcgcggacccgggtcccagggccaggcctcccttgtgagtagactatgcaaagaaaaagtgggccaccatatctggaaactacagtctatgctttgaagcgcaaaagggaataaacatttaaagactcccccggggacctggaggatggacttttccatggtggccggagcagcagcttacaatgaaaaatcagagactggtgctcttggagaaaactatagttggcaaattcccattaaccacaatgacttcaaaattttaaaaaataatgagcgtcagctgtgtgaagtcctccagaataagtttggctgtatctctaccctggtctctccagttcaggaaggcaacagcaaatctctgcaagtgttcagaaaaatgctgactcctaggatagagttatcagtctggaaagatgacctcaccacacatgctgttgatgctgtggtgaatgcagccaatgaagatcttctgcatgggggaggcctggccctggccctggtaaaagctggtggatttgaaatccaagaagagagcaaacagtttgttgccagatatggtaaagtgtcagctggtgagatagctgtcacgggagcagggaggcttccctgcaaacagatcatccatgctgttgggcctcggtggatggaatgggataaacagggatgtactggaaagctgcagagggccattgtaagtattctgaattatgtcatctataaaaatactcacattaagacagtagcaattccagccttgagctctgggatttttcagttccctctgaatttgtgtacaaagactattgtagagactatccgggttagtttgcaagggaagccaatgatgagtaatttgaaagaaattcacctggtgagcaatgaggaccctactgttgctgcctttaaagctgcttcagaattcatcctagggaagagtgagctgggacaagaaaccaccccttctttcaatgcaatggtcgtgaacaacctgaccctccagattgtccagggccacattgaatggcagacggcagatgtaattgttaattctgtaaacccacatgatattacagttggacctgtggcaaagtcaattctacaacaagcaggagttgaaatgaaatcggaatttcttgccacaaaggctaaacagtttcaacggtcccagttggtactggtcacaaaaggatttaacttgttctgtaaatatatataccatgtactgtggcattcagaatttcctaaacctcagatattaaaacatgcaatgaaggagtgtttggaaaaatgcattgagcaaaatataacttccatttcctttcctgcccttgggactggaaacatggaaataaagaaggaaacagcagcagagattttgtttgatgaagttttaacatttgccaaagaccatgtaaaacaccagttaactgtaaaatttgtgatctttccaacagatttggagatatataaggctttcagttctgaaatggcaaagaggtccaagatgctgagtttgaacaattacagtgtcccccagtcaaccagagaggagaaaagagaaaatgggcttgaagctagatctcctgccatcaatctgatgggattcaacgtggaagagatgtatgaggcccacgcatggatccaaagaatcctgagtctccagaaccaccacatcattgagaataatcatattctgtaccttgggagaaaggaacatgacattttgtctcagcttcagaaaacttcaagtgtctccatcacagaaattatcagcccaggaaggacagagttagagattgaaggagcccgggctgacctcattgaggtggttatgaacattgaagatatgctttgtaaagtacaggaggaaatggcaaggaaaaaggagcgaggcctttggcgctcgttaggacagtggactattcagcaacaaaaaacccaagacgaaatgaaagaaaatatcatatttctgaaatgtcctgtgcctccaactcaagagcttctagatcaaaagaaacagtttgaaaaatgtggtttgcaggttctaaaggtggagaagatagacaatgaggtccttatggctgcctttcaaagaaagaagaaaatgatggaagaaaaactgcacaggcaacctgtgagccataggctgtttcagcaagtcccataccagttctgcaatgtggtatgcagagttggctttcaaagaatgtactcgacaccttgcggtaggtgtcaatgcctcatcattggggctactctgtggaatttggtgagctgacatcagtagattcttccactgatagcatttgttgttgtggggaagggatcatttgtgactgtgatttagaggtcacaaatgatgacccaggtcacaaagtattttggaaagagtggtattttttacttttccttcgtatcttttgttgctgatgcattttacattgatgaaaagtgtgagcagtaagaactacggttcactgtttttctcctttatgtgtttctgtgtcctatccgcagagaacacgttgaggctttttttttttttttttgccttacttatctcaacaaaattattaccaacagcactgaaccgtcctcatcccttaattaaaagggcattttcccaaatttaagaaagttggtcttttctctttcatccctttgtttcctatagcctgctagtgaatgaattaggtatcatttggcaggtgaagtgcataacatcttaagatcctcttcatccataggagttctatgtgtaactcccatgtctcttttcagatgtacaaaaacattgcatatataattcttatattgccccctctactcctcagtcactaatgaagatttctggctttagttctctccaaaagaggaaaagaaatttagtaaaaattatggagagatacttagcggggtggcttgattttgcttggtctattaaatatgtggctcttgatctttatctttcaacatatgtagcatgatccttgctgaggagtcaattccaatagacttggtttctaggatgcaaaggctctagaaatcatcttttctttgttctggagagaacataggcaaaacttggggtaaatgttgaacatagacaattactggggataaaaatagagaaatgaatccctaccaagaagccttttggggcaatcaggaaagtgatgatcagtatagtcccttcattagcaaagtcttaaaaaatctataatttccatttgctcctaaagctggcttctctgcaatccccacccactacttctacttaaattactttcattaagatcatcgctgtgctcttactttccaaatctagtgagtattctcttttcagtcctgtgacagactctgctacttgcctacccaacatctatacacatctttcttactaaaacatctaagacacccactatcctcccaaggaatatggtcccaaggtcttagccagactcatcatcagctcaagttcaggcagttctctctttatttatttatttatttttctgagacggagtcttgctctgtcactcaggctggagtgcagtggcaccatcttggctcactgcaacctccgcctccgagattcaaacagttctcctgcctcagcctcccaggtagctgggattacaggcatgtgccaccacgtgcagttaatttttgtattttttttagtagagacgaggtttcatcatgttggccaggctgatctccagctactcgtgatccgtccacctcagcctcccaaagtgttgggcttacaggtatgagccaccatgcccagcaggcagttctctcttaaagcttaaaggcaagatactgcccccaacatactcattatatagtgatataaaaaggagcgggaaaactgcaatgaaaactctcatgttgaaaggggagaagcaaaacacacaacagccactggctcacaccacttatctacatgctgccgaacaggtatagagaggactccctattccatgttgtaaaacctttattttgcactctgggaaaatcttccttatatattgtggcccttggctatttccaggttcattgcctatcagggagccatggattttctcacaggctagaatgtgctcaggctgttgcaaccaggcttgtggtttcttcagcaatacagttcctttaaaaattcagtgggcacgaggcctaatttcttctggttaagtttatgtctttataacctaaccacagatcttgtctccatatagtctttcaactcaagattttggtctcttacctgctgtctgtgtgctctgcccttctccctatcccttagcttaacagccactgccttgaggcaattcagacatgactcataatgtgacctgcaccaattgactcatctctgtaggctagagagaactcttaacagaaggtgccagacaagcccaggagacaccaatcttgctaccactgaagctgttgttatttggagtacaaaagctcttagctttttcagccgtgcaatattccaaattataggactctcagtcaatttagatggccacccacaggcaaaggagacagaacttctgttaacaaacctttattttcttttttctatttatgtttgcattccaaccagttctgaataaatctcttgcttgtaggacttggttgagtgcagcaagaaggcatctacacatgcagtttcttactgggttgattcatttgttccacaggtatttattaagcacattctatgaatcaggccctgtgctaggggtactagaaatagagtgtaaataaaaaaccatagagttcttgcccttacaatttataatctcacgagttcacctgttgcccattctttatcttctctcttttttcctctacgatgtcccccttggtgatggcacctgttcccatggcctcaactcctacctcaatgatgacgacttaggaatttctaactcttaactccctacctctctcctgacctgcaggttcatatgtctcactctctttttgacatctttacccagatgtcccataggtaactcaaattgatcccttttcttggtcatgattttccctaagaaatatgccctttgtttgctgattctccctaacctggttagtatcatcaccatctacctaccaggtttcctaaggctgaaacattatcatcctccattcctccttttccctcacccttatacccaggcattcacccagtcctagtgattcactctcatgaagatctcagcccagtttcacctctctattcctactgccttagttaatcttccttcagacctagactattactaggtcctctccttgccacaaaacacacccctacctaatctatcctttaccaccagaattatcacgctaaaaattacattcttgcttaatatctgtattcccagttgcctacgggataaaagcccaaactccttagcagagaatataaggccctagctcccacattatttcagcagtcatcacccactatgttcctcaagactgcagccattaactttttagagttccctaaacatgctgtttactttcatgcctctatcccgttgtctgtggaatgacttccctccttgcccttttcagtgctacaaacccctattctttaagacatagtacaaatggcatctcctggttggcatctttcctgcaggcctacaggcctagtaagtatcttcctcctctgtgctcctgcatacctccattcctttgttatgacatctataactttaataagtactaaaatctgtagtcctacaaaactcaggcatagaactcatttcctttatggctctataatggaactttacccaactctcacgttccccatgaccacagatgtggaaaatttgaatcttgacagttcaaggtgaactcagtcattttcagagttttcatagtcccttcaagattgaaactcagttcctgcaatgtttgccccttttctcctcttttgtctatgctgggagaggcattgtggggagggttgtctggcttatggctcccattgtcctctgcttgataaaccacctgagctttggtcattagcagtctcctgtgcctttcacactcaggtagtgtctgcacaggccactctatgtcttttccatgctgaagaaattcctttccaggccatgtctgtgttcctcctgccacacaggaaatttttgagcatgttcatcctccaagctgaatgcagggtcttgggtagtggtcctcacctgctccagagacttctccagccattgccactctccactcaggtgatgaagctggatgagggactgcacccaccagagtcaggccagggtcctgtctgctctgtgagtccctccaattgttcttattccgagatttccattgttctgccccctcttgactcccagggctctcaagggagtgggggtagtgaagggagccctttcccaagctcccccaagagctctagtcacatcacttctgatacttcttttcccaccagctggaagaaagaactttcatttgtcttgaaatgagaaaaatgttcttagaatattttgtattactctctgctctgtcatttatggtaaacaaaataaaataataaaaaaaaacaaccc

SEQ ID NO: 22862 - DNA, 3040 bp, Homo sapiens
  source 1..3040: mol_type = unassigned DNA
gagtaggtccggtgcctctgggccctcggggtcccctctcctgcaggctcgaggtgggcggggagaagggggacgggcgcggacccgggtcccagggccaggcctcccttgtgagtagactatgcaaagaaaaagtgggccaccatatctggaaactacagtctatgctttgaagcgcaaaagggaataaacatttaaagactcccccggggacctggaggatggacttttccatggtggccggagcagcagcttacaatgaaaaatcagagactggtgctcttggagaaaactatagttggcaaattcccattaaccacaatgacttcaaaattttaaaaaataatgagcgtcagctgtgtgaagtcctccagaataagtttggctgtatctctaccctggtctctccagttcaggaaggcaacagcaaatctctgcaagtgttcagaaaaatgctgactcctaggatagagttatcagtctggaaagatgacctcaccacacatgctgttgatgctgtggtgaatgcagccaatgaagatcttctgcatgggggaggcctggccctggccctggtaaaagctggtggatttgaaatccaagaagagagcaaacagtttgttgccagatatggtaaagtgtcagctggtgagatagctgtcacgggagcagggaggcttccctgcaaacagatcatccatgctgttgggcctcggtggatggaatgggataaacagggatgtactggaaagctgcagagggccattgtaagtattctgaattatgtcatctataaaaatactcacattaagacagtagcaattccagccttgagctctgggatttttcagttccctctgaatttgtgtacaaagactattgtagagactatccgggttagtttgcaagggaagccaatgatgagtaatttgaaagaaattcacctggtgagcaatgaggaccctactgttgctgcctttaaagctgcttcagaattcatcctagggaagagtgagctgggacaagaaaccaccccttctttcaatgcaatggtcgtgaacaacctgaccctccagattgtccagggccacattgaatggcagacggcagatgtaattgttaattctgtaaacccacatgatattacagttggacctgtggcaaagtcaattctacaacaagcaggagttgaaatgaaatcggaatttcttgccacaaaggctaaacagtttcaacggtcccagttggtactggtcacaaaaggatttaacttgttctgtaaatatatataccatgtactgtggcattcagaatttcctaaacctcagatattaaaacatgcaatgaaggagtgtttggaaaaatgcattgagcaaaatataacttccatttcctttcctgcccttgggactggaaacatggaaataaagaaggaaacagcagcagagattttgtttgatgaagttttaacatttgccaaagaccatgtaaaacaccagttaactgtaaaatttgtgatctttccaacagatttggagatatataaggctttcagttctgaaatggcaaagaggtccaagatgctgagtttgaacaattacagtgtcccccagtcaaccagagaggagaaaagagaaaatgggcttgaagctagatctcctgccatcaatctgatgggattcaacgtggaagagatgtatgaggcccacgcatggatccaaagaatcctgagtctccagaaccaccacatcattgagaataatcatattctgtaccttgggagaaaggaacatgacattttgtctcagcttcagaaaacttcaagtgtctccatcacagaaattatcagcccaggaaggacagagttagagattgaaggagcccgggctgacctcattgaggtggttatgaacattgaagatatgctttgtaaagtacaggaggaaatggcaaggaaaaaggagcgaggcctttggcgctcgttaggacagtggactattcagcaacaaaaaacccaagacgaaatgaaagaaaatatcatatttctgaaatgtcctgtgcctccaactcaagagcttctagatcaaaagaaacagtttgaaaaatgtggtttgcaggttctaaaggtggagaagatagacaatgaggtccttatggctgcctttcaaagaaagaagaaaatgatggaagaaaaactgcacaggcaacctgtgagccataggctgtttcagcaagtcccataccagttctgcaatgtggtatgcagagttggctttcaaagaatgtactcgacaccttgcgatccaaaatacggagctggcatatacttcaccaagaacctcaaaaacctggcagagaaggccaagaaaatctctgctgcagataagctgatctatgtgtttgaggctgaagtactcacaggcttcttctgccagggacatccgttaaatattgttcccccaccactgagtcctggagctatagatggtcatgacagtgtggttgacaatgtctccagccctgaaacctttgttatttttagtggcatgcaggctatacctcagtatttgtggacatgcacccaggaatatgtacagtcacaagattactcatcaggaccaatgagaccctttgcacagcatccttggaggggattcgcaagtggcagccctgttgattaatctctacatcattttaacagctggtatggccttaccttgggtgaactaaccaaataatgaccatcgatggctcaaagagtggcttgaatatatcccatgggttatctgtatggactgactgggttattgaaaggactagccacatactagcatcttagtgcctttatctgtctttatgtcttggggttggggtaggtagataccaaatgaaacactttcaggaccttccttcctcttgcagttgttctttaatctcctttactagaggagataaatattttgcatataatgaagaaatttttctagtatataacgcaggccttttattttctaaaatgatgatagtataaaaatgttag

SEQ ID NO: 22863 - DNA, 3796 bp, Homo sapiens
  source 1..3796: mol_type = unassigned DNA
attcctggattacctcctcaaagggctctaacaactcgcattgctctcagcgtgtgagagggtcctttgctctgaagggtcttctaaaatatttgttcaatcgttacttagcaggggctgggagtaacggattttattttattttattttattttttgagacggagtctcgctctgtcgcccaggctggagtgcagtcgcgcaatctcggctcacggatttgctcttttaaaggacatacccttttatgtttaaatgaaggaactcattgatgcaccgaggcgaaaggaacctttaattaagtgcgtcttctatgcggagtgatcgcttttgtcacttgttcgaggggtgagagctcccgtcagttgtccctgtttctgtgagccgtctacgaagcccgggcttggcctgggcgacgctgagcggctttaaccggcggcgtccagccggctccgccagcgctgccgccgccctcgaggctccctctgactgaaggcgcgctgagcatcgcggcattaggggctcctggtccctcaaacatccagggaagccattttcagggactaggtactgacccccgcgagccgccacagccacagcccgcgctccgggccgaacgcccgagctcaagagctcccgagcttccgtcgggcggcggcctcacagctgggggccctgaggcggaaggcgcagccgctcagctgcggaccgggggcgtggcgagggcgcacaggttctgtttttcgccggcccggggccgctttcggtttcgtttcccgccggcgtctccaccctgcgagagccgcccgccagccagcgtccgccgccgtccgcgtcgcgccacccgcggtccgacgggagcaggcccagcggccatggcccaggccggcgtcgtcggtgaggtcacccaggtgctgtgcgcggccgggggcgccctggagttgcccgagctgcggcgccgcttgcggatgggcttgagcgccgacgcgctggagcggctgctgcggcagcgtgggcgcttcgtggtggcggtgcgggcgggcggcgcagccgcggccccggagcgcgtggtgctggccgcctcgccgctgcgcctgtgtcgcgcgcaccagggctccaagccgggctgcgtggggctctgcgcgcagctccacctctgcaggttcatggtctacggcgcctgcaagttcctgagagccgggaagaactgtaggaatagtcacagcttgacaaccgaacacaacctgagtgtgctgagaactcatggcgttgaccacctgagctataatgagctatgccaactcttgtttcagaacgacccctggcttttgccagaaatttgccaacattacaacaaaggagatggaccccacggctcttgtgcctttcaaaagcagtgcatcaagctccatatctgccagtattttttacagggggaatgcaagtttggcactagctgtaagagatcccatgatttctctaattctgagaatctggaaaaattggagaagttgggtatgagctcagacctggtgagcaggctgcctaccatttatagaaatgcacatgacatcaagaataagagctctgcccccagcagagtgcctcctctttttgtcccacaggggacttctgaaagaaaagacagttcaggttctgtgtccccaaacactcttagccaggaggagggtgatcagatctgtttgtaccatatccggaaaagttgtagctttcaagataagtgccatagagttcatttccatttgccgtatcgatggcaattcttggatagaggcaaatgggaggatttggacaacatggaacttattgaagaggcatattgcaatcccaaaatagaaaggatcctgtgctctgagtcagccagtacctttcactctcattgtctgaactttaacgccatgacttacggtgctacccaggctcgccgcctctccacggcctcctctgtcaccaaacctccacacttcatcctcaccactgactggatttggtactggagtgatgagtttggttcttggcaggaatatggaagacagggcacggtgcaccctgtgaccactgtcagcagtagcgacgtggagaaggcctacctggcctactgtacaccggggtctgacggccaggcagccaccttgaagttccaggccggaaagcacaactacgagttagatttcaaagccttcgttcagaaaaacctggtctatggcacaactaaaaaggtttgccgcagacccaaatacgtgtctccccaggatgtgacgaccatgcaaacctgcaataccaagtttccaggcccgaagagcatcccagactattgggactcctctgccctgccagacccaggctttcagaagatcacccttagttcttcctcggaagagtatcagaaggtctggaacctctttaaccgcacgctgcctttctactttgttcagaagattgagcgagtacagaacctggccctctgggaagtctaccagtggcaaaaaggacagatgcagaagcagaacggagggaaggccgtggacgagcggcagctgttccacggcaccagcgccatttttgtggacgccatctgccagcagaactttgactggcgggtctgtggtgttcatggcacttcctacggcaaggggagctactttgcccgagatgctgcatattcccaccactacagcaaatccgacacgcagacccacacgatgttcctggcccgggtgctggtgggcgagttcgtcaggggcaatgcctcctttgtccgtccgccggccaaggagggctggagcaacgccttctatgatagctgcgtgaacagtgtgtccgacccctccatctttgtgatctttgagaaacaccaggtctacccagagtatgtcatccagtacaccacctcctccaagccctcggtcacaccctccatcctgctggccttgggctccctgttcagcagccgacagtgagcgcacaggagtgttccaggcctttcacctgctctgccttgaaatggctatttgggcctttccttttctttttaaacagaaacttttaatgaactgttctcttaacattgacctctcaatgaagttatgttcttaatctcttgctaataatgatttttacttttaagtcacttttgggttcactagtggattaaccagaagtgattgtagttgagtccagttttgctttttaataatgtgttgaagttttagtttttactctttgttgactttgctgcttattggcaccagggacagagtttctagatacaattttatggattggttttaatttttatgagtttgtctctgcagtgattcggtttctcagagtctcatggcatcatagtttttccagaatgacacagtagccaccggtggatgacagcccacgggcggcacagtcacttctgcctgttgctctgacaccaacccaggcagctctgctgtggcttctcctgggctctggcattagttggtctgtgtcacattgtcagaacaggtggctgctgtgtggtgccatcgagtccctgctggttccccttgtcctgggagggtcacccattgcccaaggaagtgcatccacctggcaggtgacctggaggagtagcttccccgaggacccccaggcttggcctgtgattgcgcaaacccacatttcctaagcacactggacacccttcgagtgtgggttttaacatccctgtgagattgaatacttgtgccacacatgtcacaaaagagtatggaaataaaagaaaatttatccgaagtgga

SEQ ID NO: 22864 - DNA, 1127 bp, Homo sapiens
  source 1..1127: mol_type = unassigned DNA
ctttgcccgagatgctgcatattcccaccactacagcaaatccgacacgcagacccacacgatgttcctggcccgggtgctggtgggcgagttcgtcaggggcaatgcctcctttgtccgtccgccggccaaggagggctggagcaacgccttctatgatagctgcgtgaacagtgtgtccgacccctccatctttgtgatctttgagaaaaccaggtctacccagagtatgtcatccagtacaccacctcctccaagccctcggtcacaccctccatcctgctggccttgggctccctgttcagcagccgacagtgagcgcacaggagtgttccaggcctttcacctgctctgccttgaaatggctatttgggcctttccttttctttttaaacagaaacttttaatgaactgttctcttaacattgacctctcaatgaagttatgttcttaatctcttgctaataatgatttttacttttaagtcacttttgggttcactagtggattaaccagaagtgattgtagttgagtccagttttgctttttaataatgtgttgaagttttagtttttactctttgttgactttgctgcttattggcaccagggacagagtttctagatacaattttatggattggttttaatttttatgagtttgtctctgcagtgattcggtttctcagagtctcatggcatcatagtttttccagaatgacacagtagccaccggtggatgacagcccacgggcggcacagtcacttctgcctgttgctctgacaccaacccaggcagctctgctgtggcttctcctgggctctggcattagttggtctgtgtcacattgtcagaacaggtggctgctgtgtggtgccatcgagtccctgctggttccccttgtcctgggagggtcacccattgcccaaggaagtgcatccacctggcaggtgacctggaggagtagcttccccgaggacccccaggcttggcctgtgattgcgcaaacccacatttcctaagcacactggacacccttcgagtgtgggttttaacatccctgtgagattgaatacttgtgccacacatgtcacaaaagagtatggaaataaaagaaaatttatccg

SEQ ID NO: 22865 - DNA, 5099 bp, Homo sapiens
  source 1..5099: mol_type = unassigned DNA
aaagttagcggcccggagttggcgcggcccctgcagtccggcggagagcggagctgaggatggctgtgcccggctccttcccgctgctggtcgagggctcctggggccccgaccccccgaagaacttgaacaccaagttgcagatgtacttccagagcccgaagaggtcgggaggcggcgagtgtgaggtccgccaggatcccaggagcccatcccgcttcctggtgttcttctacccggaggacgttcggcagaaggttctggagagaaaaaatcatgagttggtatggcaaggaaaaggaacattcaagttaactgtccagttacctgcaaccccagatgaaatcgatcatgtctttgaagaggaacttctaacaaaagaatccaagaccaaagaagatgttaaagaaccagatgtgtcagaagaattggatacaaaactccctcttgatggtggattagacaaaatggaagatatcccagaggaatgtgaaaatatttcctctttggtggcatttgaaaacctcaaggcaaatgtgactgacataatgctaatcttgttagtggagaacataagtggcctgtctaatgatgactttcaagtggaaataataagagattttgatgttgctgttgttacctttcaaaagcacatagatactataagatttgttgatgattgtaccaagcaccattcaattaaacaacttcagctttctccaagacttctggaagtgacaaacacaatcagggttgaaaacctgccacctggtgctgatgactacagtttaaaacttttctttgaaaatccctataatggagggggaagagttgccaatgttgaatattttcctgaagagagttcagctctgattgaattttttgacagaaaagtgttagacaccatcatggccacaaaactcgacttcaataaaatgccactttctgtgttcccatactatgcctcattgggcacagccttgtatggaaaggagaagcctctgatcaagcttccagcaccatttgaagagtcactagatcttcccttatggaagttcttacagaaaaagaatcacctcattgaggagataaacgatgaaatgaggcgttgtcactgtgagctcacgtggtcccaactcagtggtaaagttaccatcagaccagcagccaccttagtcaatgaaggaagaccgagaatcaagacctggcaggcagatacttccacaacactctctagcatcaggtctaaatataaagtcaacccaattaaagtggatccaacaatgtgggacaccataaaaaatgatgtgaaagatgacaggattttgattgagtttgatacacttaaggagatggtaatcttagcagggaaatcagaggatgtccaaagcattgaggtacaagtcagggagttaatagaaagcactactcaaaaaattaaaagggaagagcaaagtttgaaggaaaaaatgatcatttctccaggcaggtattttcttttgtgtcacagcagtctactggaccatttactcacggagtgcccagagatagagatttgttacgatagagtcactcaacacttgtgcttgaaaggacctagtgcagatgtgtataaagcaaagtgtgaaatccaggaaaaggtgtacaccatggctcagaaaaacattcaggtttctcctgagatttttcagtttttgcaacaggtaaactggaaagaattctctaagtgtcttttcatagcacagaagattcttgcactttatgagctagagggtacaactgttctcttaaccagctgttcttctgaagccctgttagaagcagaaaagcaaatgctcagtgccttaaattataagcgcattgaagttgagaacaaagaagttcttcatggcaagaaatggaaagggctcactcacaatttgcttaagaaacaaaattcctccccaaacactgtaatcatcaatgagttaacttcagaaaccacagctgaagtcatcattacaggctgtgtaaaagaagtaaatgaaacctataaattgctttttaacttcgttgaacaaaacatgaaaatagagagactggttgaagtaaagccttccttagttattgactatttaaagacagaaaagaagctattctggccaaagataaagaaggtaaatgtgcaggtaagtttcaatcctgagaacaaacaaaaaggcattttactaactggctcaaagaccgaagtactgaaggcagtggacattgtcaagcaagtctgggattcagtctgtgttaaaagtgtccatactgataagccaggagccaagcagttcttccaggataaagcacggttttatcaaagtgagatcaaacggttgtttggttgttacattgaactacaggagaatgaagtaatgaaggagggaggcagccccgctgggcagaagtgcttctctcggacagtcttggcccctggcgttgtgctgattgtgcagcagggtgacttggcacggcttcctgtcgatgtggtggtgaatgcatctaatgaggaccttaagcattatggtggcctggccgctgcgctctcaaaagcagctggccctgagctccaggccgactgtgaccagatagtgaagagagagggcagactcctaccgggcaatgccaccatctccaaggcaggaaagctgccctaccaccacgtgatccatgcagtggggccccgctggagcggatatgaggccccgaggtgtgtgtacctattaaggagagctgtgcaactcagtctctgtctagccgaaaaatacaagtaccgatccatagccatcccagctattagttctggagtctttggctttcccttaggccgatgcgtggagaccattgtttctgccatcaaggaaaacttccaattcaagaaggatggacactgcttgaaagaaatctaccttgtggatgtatctgagaagactgttgaggcctttgcagaagctgtgaaaactgtatttaaagccaccctgccagatacagctgccccgccaggtttaccaccagcagcagcggggcctgggaaaacatcatgggaaaaaggaagcctggtgtccccgggaggcctgcagatgctgttggtgaaagagggtgtgcagaatgctaagaccgatgttgttgtcaactccgttcccttggatctcgtgcttagtagagggcctctttctaagtccctcttggaaaaagctggaccagagctccaggaggaattggacacagttggacaaggggtggctgtcagcatgggcacagtgctcaaaaccagcagctggaatctggactgtcgctatgtgcttcacgtggtagctccggagtggagaaatggtagcacatcttcactcaagataatggaagacataatcagagaatgtatggagatcactgagagcttgtccttaaaatcaattgcatttccagcaataggaacaggaaacttgggatttcctaaaaacatattcgctgaattaatcatttcagaggtgttcaaatttagtagcaagaatcagctgaaaactttacaagaggttcactttctgctgcacccgagtgatcatgaaaatattcaggcattttcagatgaatttgccagaagggctaatggaaatctcgtcagtgacaaaattccgaaggctaaagatacacaaggtttttatgggactgtttctagccctgattcaggtgtgtatgaaatgaagattggctccatcatcttccaggtggcttctggagatatcacgaaagaagaggcagatgtgattgtaaattcaacatcaaactcattcaatctcaaagcaggggtctccaaagcaattttagaatgtgctggacaaaatgtagaaagggaatgttctcagcaagctcagcagcgcaaaaatgattatataatcaccggaggtggatttttgaggtgcaagaatatcattcatgtaattggtggaaatgatgtcaagagttcagtttcctctgttttgcaggagtgtgaaaaaaaaaattactcatccatttgcctcccagccattgggacaggaaatgccaaacaacacccagataaggttgctgaagccataattgatgccattgaagactttgtccagaaaggatcagcccagtctgtgaaaaaagttaaagttgttatctttctgcctcaagtactggatgtgttttatgccaacatgaagaaaagagaagggactcagctttcttcccaacagtctgtgatgtctaaacttgcatcatttttgggcttttcaaagcaatctccccaaaaaaagaatcatttggttttggaaaagaaaacagaatcagcaacttttcgggtgtgtggtgaaaatgtcacgtgtgtggaatatgctatctcctggctacaagacctgattgaaaaagaacagtgtccttacaccagtgaagatgagtgcatcaaagactttgatgaaaaggagtatcaggagttgaatgagctgcagaagaagttaaatattaacatttccctggaccataagagacctttgattaaggttttgggaattagcagagatgtgatgcaggctagagatgaaattgaggcgatgatcaagagagttcgattggccaaagaacaggaatcccgggcagattgtatcagtgagtttatagaatggcagtataatgacaataacacttctcattgttttaacaaaatgaccaatctgaaattagaggatgcaaggagagaaaagaaaaaaacagttgatgtcaaaattaatcatcggcactacacagtgaacttgaacacatacactgccacagacacaaagggccacagtttatctgttcagcgcctcacgaaatccaaagttgacatccctgcacactggagtgatatgaagcagcagaatttctgtgtggtggagctgctgcctagtgatcctgagtacaacacggtggcaagcaagtttaatcagacctgctcacacttcagaatagagaaggtgaatgtgatgattcgtgcctgtagtcccagctattgggaggctgaggtggaaggattgcatgagcccaggagtttgacgccagtctgggtaacatag

SEQ ID NO: 22866 - DNA, 4636 bp, Homo sapiens
  source 1..4636: mol_type = unassigned DNA
atgtatctgagaagactgttgaggcctttgcagatgctgttggtgaaagagggtgtgcagaatgctaagaccgatgttgttgtcaactccgttcccttggatctcgtgcttagtagagggcctctttctaagtccctcttggaaaaagctggaccagagctccaggaggaattggacacagttggacaaggggtggctgtcagcatgggcacagtgctcaaaaccagcagctggaatctggactgtcgctatgtgcttcacgtggtagctccggagtggagaaatggtagcacatcttcactcaagataatggaagacataatcagagaatgtatggagatcactgagagcttgtccttaaaatcaattgcatttccagcaataggaacaggaaacttgggatttcctaaaaacatattcgctgaattaatcatttcagaggtgttcaaatttagtagcaagaatcagctgaaaactttacaagaggttcactttctgctgcacccgagtgatcatgaaaatattcaggcattttcagatgaatttgccagaagggctaatggaaatctcgtcagtgacaaaattccgaaggctaaagatacacaaggtttttatgggactgtttctagccctgattcaggtgtgtatgaaatgaagattggctccatcatcttccaggtggcttctggagatatcacgaaagaagaggcagatgtgattgtaaattcaacatcaaactcattcaatctcaaagcaggggtctccaaagcaattttagaatgtgctggacaaaatgtagaaagggaatgttctcagcaagctcagcagcgcaaaaatgattatataatcaccggaggtggatttttgaggtgcaagaatatcattcatgtaattggtggaaatgatgtcaagagttcagtttcctctgttttgcaggagtgtgaaaaaaaaaattactcatccatttgcctcccagccattgggacaggaaatgccaaacaacacccagataaggttgctgaagccataattgatgccattgaagactttgtccagaaaggatcagcccagtctgtgaaaaaagttaaagttgttatctttctgcctcaagtactggatgtgttttatgccaacatgaagaaaagagaagggactcagctttcttcccaacagtctgtgatgtctaaacttgcatcatttttgggcttttcaaagcaatctccccaaaaaaagaatcatttggttttggaaaagaaaacagaatcagcaacttttcgggtgtgtggtgaaaatgtcacgtgtgtggaatatgctatctcctggctacaagacctgattgaaaaagaacagtgtccttacaccagtgaagatgagtgcatcaaagactttgatgaaaaggagtatcaggagttgaatgagctgcagaagaagttaaatattaacatttccctggaccataagagacctttgattaaggttttgggaattagcagagatgtgatgcaggctagagatgaaattgaggcgatgatcaagagagttcgattggccaaagaacaggaatcccgggcagattgtatcagtgagtttatagaatggcagtataatgacaataacacttctcattgttttaacaaaatgaccaatctgaaattagaggatgcaaggagagaaaagaaaaaaacagttgatgtcaaaattaatcatcggcactacacagtgaacttgaacacatacactgccacagacacaaagggccacagtttatctgttcagcgcctcacgaaatccaaagttgacatccctgcacactggagtgatatgaagcagcagaatttctgtgtggtggagctgctgcctagtgatcctgagtacaacacggtggcaagcaagtttaatcagacctgctcacacttcagaatagagaagattgagaggatccagaatccagatctctggaatagctaccaggcaaagaaaaaaactatggatgccaagaatggccagacaatgaatgagaagcaactcttccatgggacagatgccggctccgtgccacacgtcaatcgaaatggctttaaccgcagctatgccggaaagaatgctgtggcatatggaaagggaacctattttgctgtcaatgccaattattctgccaatgatacgtactccagaccagatgcaaatgggagaaagcatgtgtattatgtgcgagtacttactggaatctatacacatggaaatcattcattaattgtgcctccttcaaagaaccctcaaaatcctactgacctgtatgacactgtcacagataatgtgcaccatccaagtttatttgtggcattttatgactaccaagcatacccagagtaccttattacgtttagaaaataacactttggtatccttcccacaaaattattctccatttgtacatatctagttgtaaaacaagttttagcttttttttttaattcctcttaacagatttttctaatatccaaggatcattctttgtcgctgaagtcagtctttcttcagcttccctttcataatggaaatgaacttattatcttgagagcaaataacttggaaaatttaaatgagataatgcagttgcaactgtgtgtccacaagtatggacatcaaatctgtgggaaaagaacaggtttgtattttcaggaaggagagaataacagtcttatagacagagggcacagctaagcacagctgccactgcaggagacaggccccatgtcaggatgccatagtgctgtggggagcacagtattacccagtgggtagggcttctgtcttccctgggagcagggatggtatcttagtcaatttttttcccttgagatgaggtctgtgcctgatgtacaacggatactccataaatgtttgacaaaccaacgaagaatgaaaaaaagcctagtcagactcccatccaaagtaggaactatctctttaacattcttgactcactatcactttacctcaaattgaacagattccatgacggaacttcattcttcacaaactagccagtgacatgtgggacagctctggccagggctctgggactgcagtgtacttgcgctctgcacggtccaggagctgtgatgtggctgtggtctaggggaatcctgcctgccccatggagttgcgcagcacaaccctggctccaattgccagaaggctctttttaatgctgaaccaaaatgtgcctttttttttttttttttgagatggagtttcactcttgttgcccaggctggagtgcaatggcgcgatctcagctcactgcagccactgcctcccaggttcaagtgattctcctgcctcagcctcccgagtagctgggattacaggcatgcgctaacacacccagctaattttgtatttttagtagagacgaggtttctccatgttcgacaggctggtctcgaactcccacctcagcctcccaaactgctgggattacaggtgtgagccaccgtgaccagccaatgtgccttcttatagtgtctactcattggtctttgttctgcccagtgataacaatgggataacgcctgctacacatcttcattgtgaaacccttcccctgtgctgagattaaatgaactctaagattattaaatagtatattttccttgacagcctagcgtttgatgattttaaagccttatgtataaataaaccaaaggaagtaagcagtcatattgctaatttgctaactcctatctattgaatggtgaagttttaaaaatttccccaggtaagtttaagattcaaacaccatctattgagcacctacattgtgtgccaggtagtaaaataggtgctttcatacacattgtctcaattcctgtgaggtcagaattatctctgcatttgaaacttgaggaaacatgctcagagtgcaagaagcttccttgcctgagatcacctagaaaggaaccctcagagccggcaactgaatcttggtccctgtgatgtcaagcccattgctctcccactgcagaacatggcctctagattaatgccaccgattcaggaacacctccgacagtcttgaaatacccccatgttgccttgtttgttttttccttctggcttcttctattacagtctcttcattggaagctctgtaggccaaggccagagctgatactgacacggagccaatgcagatagcacatcagatgctaggggtcgctgggaggattaagggacttaatctgctaggaacacctgtacttgaagtggaggaggctagggggccacagttgctgcttcattaacatagaggttttggatttttttctcttgtggtttgttttttaagtggattggcagactccttgttgcttaagagtggctttctaggcaggccactggcatctgaattcatcattgacaataaatgtaagaaattggaataaaaaagagagacctgctgttattcgcttttgttctccagtgatttgattaactcagggcaaggctgaatatcagagtgtatcgcactgaagaataataatccattcagtaatgttatagttatcctcaatctaaatatgtcaactgtcattttgctacttttcaaataaaatacttgaaaactgtc

SEQ ID NO: 22867 - DNA, 7464 bp, Homo sapiens
  source 1..7464: mol_type = unassigned DNA
aaagttagcggcccggagttggcgcggcccctgcagtccggcggagagcggagctgaggatggctgtgcccggctccttcccgctgctggtcgagggctcctggggccccgaccccccgaagaacttgaacaccaagttgcagatgtacttccagagcccgaagaggtcgggaggcggcgagtgtgaggtccgccaggatcccaggagcccatcccgcttcctggtgttcttctacccggaggacgttcggcagaaggttctggagagaaaaaatcatgagttggtatggcaaggaaaaggaacattcaagttaactgtccagttacctgcaaccccagatgaaatcgatcatgtctttgaagaggaacttctaacaaaagaatccaagaccaaagaagatgttaaagaaccagatactataagatttgttgatgattgtaccaagcaccattcaattaaacaacttcagctttctccaagacttctggaagtgacaaacacaatcagggttgaaaacctgccacctggtgctgatgactacagtttaaaacttttctttgaaaatccctataatggagggggaagagttgccaatgttgaatattttcctgaagagagttcagctctgattgaattttttgacagaaaagtgttagacaccatcatggccacaaaactcgacttcaataaaatgccactttctgtgttcccatactatgcctcattgggcacagccttgtatggaaaggagaagcctctgatcaagcttccagcaccatttgaagagtcactagatcttcccttatggaagttcttacagaaaaagaatcacctcattgaggagataaacgatgaaatgaggcgttgtcactgtgagctcacgtggtcccaactcagtggtaaagttaccatcagaccagcagccaccttagtcaatgaaggaagaccgagaatcaagacctggcaggcagatacttccacaacactctctagcatcaggtctaaatataaagtcaacccaattaaagtggatccaacaatgtgggacaccataaaaaatgatgtgaaagatgacaggattttgattgagtttgatacacttaaggagatggtaatcttagcagggaaatcagaggatgtccaaagcattgaggtacaagtcagggagttaatagaaagcactactcaaaaaattaaaagggaagagcaaagtttgaaggaaaaaatgatcatttctccaggcaggtattttcttttgtgtcacagcagtctactggaccatttactcacggagtgcccagagatagagatttgttacgatagagtcactcaacacttgtgcttgaaaggacctagtgcagatgtgtataaagcaaagtgtgaaatccaggaaaaggtgtacaccatggctcagaaaaacattcaggtttctcctgagatttttcagtttttgcaacaggtaaactggaaagaattctctaagtgtcttttcatagcacagaagattcttgcactttatgagctagagggtacaactgttctcttaaccagctgttcttctgaagccctgttagaagcagaaaagcaaatgctcagtgccttaaattataagcgcattgaagttgagaacaaagaagttcttcatggcaagaaatggaaagggctcactcacaatttgcttaagaaacaaaattcctccccaaacactgtaatcatcaatgagttaacttcagaaaccacagctgaagtcatcattacaggctgtgtaaaagaagtaaatgaaacctataaattgctttttaacttcgttgaacaaaacatgaaaatagagagactggttgaagtaaagccttccttagttattgactatttaaagacagaaaagaagctattctggccaaagataaagaaggtaaatgtgcaggtaagtttcaatcctgagaacaaacaaaaaggcattttactaactggctcaaagaccgaagtactgaaggcagtggacattgtcaagcaagtctgggattcagtctgtgttaaaagtgtccatactgataagccaggagccaagcagttcttccaggataaagcacggttttatcaaagtgagatcaaacggttgtttggttgttacattgaactacaggagaatgaagtaatgaaggagggaggcagccccgctgggcagaagtgcttctctcggacagtcttggcccctggcgttgtgctgattgtgcagcagggtgacttggcacggcttcctgtcgatgtggtggtgaatgcatctaatgaggaccttaagcattatggtggcctggccgctgcgctctcaaaagcagctggccctgagctccaggccgactgtgaccagatagtgaagagagagggcagactcctaccgggcaatgccaccatctccaaggcaggaaagctgccctaccaccacgtgatccatgcagtggggccccgctggagcggatatgaggccccgaggtgtgtgtacctattaaggagagctgtgcaactcagtctctgtctagccgaaaaatacaagtaccgatccatagccatcccagctattagttctggagtctttggctttcccttaggccgatgcgtggagaccattgtttctgccatcaaggaaaacttccaattcaagaaggatggacactgcttgaaagaaatctaccttgtggatgtatctgagaagactgttgaggcctttgcagaagctgtgaaaactgtatttaaagccaccctgccagatacagctgccccgccaggtttaccaccagcagcagcggggcctgggaaaacatcatgggaaaaaggaagcctggtgtccccgggaggcctgcagatgctgttggtgaaagagggtgtgcagaatgctaagaccgatgttgttgtcaactccgttcccttggatctcgtgcttagtagagggcctctttctaagtccctcttggaaaaagctggaccagagctccaggaggaattggacacagttggacaaggggtggctgtcagcatgggcacagtgctcaaaaccagcagctggaatctggactgtcgctatgtgcttcacgtggtagctccggagtggagaaatggtagcacatcttcactcaagataatggaagacataatcagagaatgtatggagatcactgagagcttgtccttaaaatcaattgcatttccagcaataggaacaggaaacttgggatttcctaaaaacatattcgctgaattaatcatttcagaggtgttcaaatttagtagcaagaatcagctgaaaactttacaagaggttcactttctgctgcacccgagtgatcatgaaaatattcaggcattttcagatgaatttgccagaagggctaatggaaatctcgtcagtgacaaaattccgaaggctaaagatacacaaggtttttatgggactgtttctagccctgattcaggtgtgtatgaaatgaagattggctccatcatcttccaggtggcttctggagatatcacgaaagaagaggcagatgtgattgtaaattcaacatcaaactcattcaatctcaaagtaggggtctccaaagcaattttagaatgtgctggacaaaatgtagaaagggaatgttctcagcaagctcagcagcgcaaaaatgattatataatcaccggaggtggatttttgaggtgcaagaatatcattcatgtaattggtggaaatgatgtcaagagttcagtttcctctgttttgcaggagtgtgaaaaaaaaaattactcatccatttgcctcccagccattgggacaggaaatgccaaacaacacccagataaggttgctgaagccataattgatgccattgaagactttgtccagaaaggatcagcccagtctgtgaaaaaagttaaagttgttatctttctgcctcaagtactggatgtgttttatgccaacatgaagaaaagagaagggactcagctttcttcccaacagtctgtgatgtctaaacttgcatcatttttgggcttttcaaagcaatctccccaaaaaaagaatcatttggttttggaaaagaaaacagaatcagcaacttttcgggtgtgtggtgaaaatgtcacgtgtgtggaatatgctatctcctggctacaagacctgattgaaaaagaacagtgtccttacaccagtgaagatgagtgcatcaaagactttgatgaaaaggagtatcaggagttgaatgagctgcagaagaagttaaatattaacatttccctggaccataagagacctttgattaaggttttgggaattagcagagatgtgatgcaggctagagatgaaattgaggcgatgatcaagagagttcgattggccaaagaacaggaatcccgggcagattgtatcagtgagtttatagaatggcagtataatgacaataacacttctcattgttttaacaaaatgaccaatctgaaattagaggatgcaaggagagaaaagaaaaaaacagttgatgtcaaaattaatcatcggcactacacagtgaacttgaacacatacactgccacagacacaaagggccacagtttatctgttcagcgcctcacgaaatccaaagttgacatccctgcacactggagtgatatgaagcagcagaatttctgtgtggtggagctgctgcctagtgatcctgagtacaacacggtggcaagcaagtttaatcagacctgctcacacttcagaatagagaagattgagaggatccagaatccagatctctggaatagctaccaggcaaagaaaaaaactatggatgccaagaatggccagacaatgaatgagaagcaactcttccatgggacagatgccggctccgtgccacacgtcaatcgaaatggctttaaccgcagctatgccggaaagaatgctgtggcatatggaaagggaacctattttgctgtcaatgccaattattctgccaatgatacgtactccagaccagatgcaaatgggagaaagcatgtgtattatgtgcgagtacttactggaatctatacacatggaaatcattcattaattgtgcctccttcaaagaaccctcaaaatcctactgacctgtatgacactgtcacagataatgtgcaccatccaagtttatttgtggcattttatgactaccaagcatacccagagtaccttattacgtttagaaaataacactttggtatccttcccacaaaattattctccatttgtacatatctagttgtaaaacaagttttagcttttttttttaattcctcttaacagatttttctaatatccaaggatcattctttgtcgctgaagtcagtctttcttcagcttccctttcataatggaaatgaacttattatcttgagagcaaataacttggaaaatttaaatgagataatgcagttgcaactgtgtgtccacaagtatggacatcaaatctgtgggaaaagaacaggtttgtattttcaggaaggagagaataacagtcttatagacagagggcacagctaagcacagctgccactgcaggagacaggccccatgtcaggatgccatagtgctgtggggagcacagtattacccagtgggtagggcttctgtcttccctgggagcagggatggtatcttagtcaatttttttcccttgagatgaggtctgtgcctgatgtacaacggatactccataaatgtttgacaaaccaacgaagaatgaaaaaaagcctagtcagactcccatccaaagtaggaactatctctttaacattcttgactcactatcactttacctcaaattgaacagattccatgacggaacttcattcttcacaaactagccagtgacatgtgggacagctctggccagggctctgggactgcagtgtacttgcgctctgcacggtccaggagctgtgatgtggctgtggtctaggggaatcctgcctgccccatggagttgcgcagcacaaccctggctccaattgccagaaggctctttttaatgctgaaccaaaatgtgcctttttttttttttttttgagatggagtttcactcttgttgcccaggctggagtgcaatggcgcgatctcagctcactgcagccactgcctcccaggttcaagtgattctcctgcctcagcctcccgagtagctgggattacaggcatgcgctaacacacccagctaattttgtatttttagtagagacgaggtttctccatgttcgacaggctggtctcgaactcccacctcagcctcccaaactgctgggattacaggtgtgagccaccgtgaccagccaatgtgccttcttatagtgtctactcattggtctttgttctgcccagtgataacaatgggataacgcctgctacacatcttcattgtgaaacccttcccctgtgctgagattaaatgaactctaagattattaaatagtatattttccttgacagcctagcgtttgatgattttaaagccttatgtataaataaaccaaaggaagtaagcagtcatattgctaatttgctaactcctatctattgaatggtgaagttttaaaaatttccccaggtaagtttaagattcaaacaccatctattgagcacctacattgtgtgccaggtagtaaaataggtgctttcatacacattgtctcaattcctgtgaggtcagaattatctctgcatttgaaacttgaggaaacatgctcagagtgcaagaagcttccttgcctgagatcacctagaaaggaaccctcagagccggcaactgaatcttggtccctgtgatgtcaagcccattgctctcccactgcagaacatggcctctagattaatgccaccgattcaggaacacctccgacagtcttgaaatacccccatgttgccttgtttgttttttccttctggcttcttctattacagtctcttcattggaagctctgtaggccaaggccagagctgatactgacacggagccaatgcagatagcacatcagatgctaggggtcgctgggaggattaagggacttaatctgctaggaacacctgtacttgaagtggaggaggctagggggccacagttgctgcttcattaacatagaggttttggatttttttctcttgtggtttgttttttaagtggattggcagactccttgttgcttaagagtggctttctaggcaggccactggcatctgaattcatcattgacaataaatgtaagaaattggaataaaaaagagagacctgctgttattcgcttttgttctccagtgatttgattaactcagggcaaggctgaatatcagagtgtatcgcactgaagaataataatccattcagtaatgttatagttatcctcaatctaaatatgtcaactgtcattttgctacttttcaaataaaatacttgaaaactgtc

SEQ ID NO: 22868 - DNA, 7915 bp, Homo sapiens
  source 1..7915: mol_type = unassigned DNA
ccgtggagcacaggtgaactgaggccgccttcccggggcgccgctggccagccccaaagggttactttggccttggctgtgggccgaatgcgaaggtggggaggtgggcgggggatgactctgccattcctgggtccgctgtgttaggctgaaggcaaaaggaaaccaaggcctgggagttttccaggaaacgaaagcgaaagagtcaaagttagcggcccggagttggcgcggcccctgcagtccggcggagagcggagctgaggatggctgtgcccggctccttcccgctgctggtcgagggctcctggggccccgaccccccgaagaacttgaacaccaagttgcagatgtacttccagagcccgaagaggtcgggaggcggcgagtgtgaggtccgccaggatcccaggagcccatcccgcttcctggtgttcttctacccggaggacgttcggcagaaggttctggagagaaaaaatcatgagttggtatggcaaggaaaaggaacattcaagttaactgtccagttacctgcaaccccagatgaaatcgatcatgtctttgaagaggaacttctaacaaaagaatccaagaccaaagaagatgttaaagaaccagatgtgtcagaagaattggatacaaaactccctcttgatggtggattagacaaaatggaagatatcccagaggaatgtgaaaatatttcctctttggtggcatttgaaaacctcaaggcaaatgtgactgacataatgctaatcttgttagtggagaacataagtggcctgtctaatgatgactttcaagtggaaataataagagattttgatgttgctgttgttacctttcaaaagcacatagatactataagatttgttgatgattgtaccaagcaccattcaattaaacaacttcagctttctccaagacttctggaagtgacaaacacaatcagggttgaaaacctgccacctggtgctgatgactacagtttaaaacttttctttgaaaatccctataatggagggggaagagttgccaatgttgaatattttcctgaagagagttcagctctgattgaattttttgacagaaaagtgttagacaccatcatggccacaaaactcgacttcaataaaatgccactttctgtgttcccatactatgcctcattgggcacagccttgtatggaaaggagaagcctctgatcaagcttccagcaccatttgaagagtcactagatcttcccttatggaagttcttacagaaaaagaatcacctcattgaggagataaacgatgaaatgaggcgttgtcactgtgagctcacgtggtcccaactcagtggtaaagttaccatcagaccagcagccaccttagtcaatgaaggaagaccgagaatcaagacctggcaggcagatacttccacaacactctctagcatcaggtctaaatataaagtcaacccaattaaagtggatccaacaatgtgggacaccataaaaaatgatgtgaaagatgacaggattttgattgagtttgatacacttaaggagatggtaatcttagcagggaaatcagaggatgtccaaagcattgaggtacaagtcagggagttaatagaaagcactactcaaaaaattaaaagggaagagcaaagtttgaaggaaaaaatgatcatttctccaggcaggtattttcttttgtgtcacagcagtctactggaccatttactcacggagtgcccagagatagagatttgttacgatagagtcactcaacacttgtgcttgaaaggacctagtgcagatgtgtataaagcaaagtgtgaaatccaggaaaaggtgtacaccatggctcagaaaaacattcaggtttctcctgagatttttcagtttttgcaacaggtaaactggaaagaattctctaagtgtcttttcatagcacagaagattcttgcactttatgagctagagggtacaactgttctcttaaccagctgttcttctgaagccctgttagaagcagaaaagcaaatgctcagtgccttaaattataagcgcattgaagttgagaacaaagaagttcttcatggcaagaaatggaaagggctcactcacaatttgcttaagaaacaaaattcctccccaaacactgtaatcatcaatgagttaacttcagaaaccacagctgaagtcatcattacaggctgtgtaaaagaagtaaatgaaacctataaattgctttttaacttcgttgaacaaaacatgaaaatagagagactggttgaagtaaagccttccttagttattgactatttaaagacagaaaagaagctattctggccaaagataaagaaggtaaatgtgcaggtaagtttcaatcctgagaacaaacaaaaaggcattttactaactggctcaaagaccgaagtactgaaggcagtggacattgtcaagcaagtctgggattcagtctgtgttaaaagtgtccatactgataagccaggagccaagcagttcttccaggataaagcacggttttatcaaagtgagatcaaacggttgtttggttgttacattgaactacaggagaatgaagtaatgaaggagggaggcagccccgctgggcagaagtgcttctctcggacagtcttggcccctggcgttgtgctgattgtgcagcagggtgacttggcacggcttcctgtcgatgtggtggtgaatgcatctaatgaggaccttaagcattatggtggcctggccgctgcgctctcaaaagcagctggccctgagctccaggccgactgtgaccagatagtgaagagagagggcagactcctaccgggcaatgccaccatctccaaggcaggaaagctgccctaccaccacgtgatccatgcagtggggccccgctggagcggatatgaggccccgaggtgtgtgtacctattaaggagagctgtgcaactcagtctctgtctagccgaaaaatacaagtaccgatccatagccatcccagctattagttctggagtctttggctttcccttaggccgatgcgtggagaccattgtttctgccatcaaggaaaacttccaattcaagaaggatggacactgcttgaaagaaatctaccttgtggatgtatctgagaagactgttgaggcctttgcagaagctgtgaaaactgtatttaaagccaccctgccagatacagctgccccgccaggtttaccaccagcagcagcggggcctgggaaaacatcatgggaaaaaggaagcctggtgtccccgggaggcctgcagatgctgttggtgaaagagggtgtgcagaatgctaagaccgatgttgttgtcaactccgttcccttggatctcgtgcttagtagagggcctctttctaagtccctcttggaaaaagctggaccagagctccaggaggaattggacacagttggacaaggggtggctgtcagcatgggcacagtgctcaaaaccagcagctggaatctggactgtcgctatgtgcttcacgtggtagctccggagtggagaaatggtagcacatcttcactcaagataatggaagacataatcagagaatgtatggagatcactgagagcttgtccttaaaatcaattgcatttccagcaataggaacaggaaacttgggatttcctaaaaacatattcgctgaattaatcatttcagaggtgttcaaatttagtagcaagaatcagctgaaaactttacaagaggttcactttctgctgcacccgagtgatcatgaaaatattcaggcattttcagatgaatttgccagaagggctaatggaaatctcgtcagtgacaaaattccgaaggctaaagatacacaaggtttttatgggactgtttctagccctgattcaggtgtgtatgaaatgaagattggctccatcatcttccaggtggcttctggagatatcacgaaagaagaggcagatgtgattgtaaattcaacatcaaactcattcaatctcaaagcaggggtctccaaagcaattttagaatgtgctggacaaaatgtagaaagggaatgttctcagcaagctcagcagcgcaaaaatgattatataatcaccggaggtggatttttgaggtgcaagaatatcattcatgtaattggtggaaatgatgtcaagagttcagtttcctctgttttgcaggagtgtgaaaaaaaaaattactcatccatttgcctcccagccattgggacaggaaatgccaaacaacacccagataaggttgctgaagccataattgatgccattgaagactttgtccagaaaggatcagcccagtctgtgaaaaaagttaaagttgttatctttctgcctcaagtactggatgtgttttatgccaacatgaagaaaagagaagggactcagctttcttcccaacagtctgtgatgtctaaacttgcatcatttttgggcttttcaaagcaatctccccaaaaaaagaatcatttggttttggaaaagaaaacagaatcagcaacttttcgggtgtgtggtgaaaatgtcacgtgtgtggaatatgctatctcctggctacaagacctgattgaaaaagaacagtgtccttacaccagtgaagatgagtgcatcaaagactttgatgaaaaggagtatcaggagttgaatgagctgcagaagaagttaaatattaacatttccctggaccataagagacctttgattaaggttttgggaattagcagagatgtgatgcaggctagagatgaaattgaggcgatgatcaagagagttcgattggccaaagaacaggaatcccgggcagattgtatcagtgagtttatagaatggcagtataatgacaataacacttctcattgttttaacaaaatgaccaatctgaaattagaggatgcaaggagagaaaagaaaaaaacagttgatgtcaaaattaatcatcggcactacacagtgaacttgaacacatacactgccacagacacaaagggccacagtttatctgttcagcgcctcacgaaatccaaagttgacatccctgcacactggagtgatatgaagcagcagaatttctgtgtggtggagctgctgcctagtgatcctgagtacaacacggtggcaagcaagtttaatcagacctgctcacacttcagaatagagaagattgagaggatccagaatccagatctctggaatagctaccaggcaaagaaaaaaactatggatgccaagaatggccagacaatgaatgagaagcaactcttccatgggacagatgccggctccgtgccacacgtcaatcgaaatggctttaaccgcagctatgccggaaagaatgctgtggcatatggaaagggaacctattttgctgtcaatgccaattattctgccaatgatacgtactccagaccagatgcaaatgggagaaagcatgtgtattatgtgcgagtacttactggaatctatacacatggaaatcattcattaattgtgcctccttcaaagaaccctcaaaatcctactgacctgtatgacactgtcacagataatgtgcaccatccaagtttatttgtggcattttatgactaccaagcatacccagagtaccttattacgtttagaaaataacactttggtatccttcccacaaaattattctccatttgtacatatctagttgtaaaacaagttttagcttttttttttaattcctcttaacagatttttctaatatccaaggatcattctttgtcgctgaagtcagtctttcttcagcttccctttcataatggaaatgaacttattatcttgagagcaaataacttggaaaatttaaatgagataatgcagttgcaactgtgtgtccacaagtatggacatcaaatctgtgggaaaagaacaggtttgtattttcaggaaggagagaataacagtcttatagacagagggcacagctaagcacagctgccactgcaggagacaggccccatgtcaggatgccatagtgctgtggggagcacagtattacccagtgggtagggcttctgtcttccctgggagcagggatggtatcttagtcaatttttttcccttgagatgaggtctgtgcctgatgtacaacggatactccataaatgtttgacaaaccaacgaagaatgaaaaaaagcctagtcagactcccatccaaagtaggaactatctctttaacattcttgactcactatcactttacctcaaattgaacagattccatgacggaacttcattcttcacaaactagccagtgacatgtgggacagctctggccagggctctgggactgcagtgtacttgcgctctgcacggtccaggagctgtgatgtggctgtggtctaggggaatcctgcctgccccatggagttgcgcagcacaaccctggctccaattgccagaaggctctttttaatgctgaaccaaaatgtgcctttttttttttttttttgagatggagtttcactcttgttgcccaggctggagtgcaatggcgcgatctcagctcactgcagccactgcctcccaggttcaagtgattctcctgcctcagcctcccgagtagctgggattacaggcatgcgctaacacacccagctaattttgtatttttagtagagacgaggtttctccatgttcgacaggctggtctcgaactcccacctcagcctcccaaactgctgggattacaggtgtgagccaccgtgaccagccaatgtgccttcttatagtgtctactcattggtctttgttctgcccagtgataacaatgggataacgcctgctacacatcttcattgtgaaacccttcccctgtgctgagattaaatgaactctaagattattaaatagtatattttccttgacagcctagcgtttgatgattttaaagccttatgtataaataaaccaaaggaagtaagcagtcatattgctaatttgctaactcctatctattgaatggtgaagttttaaaaatttccccaggtaagtttaagattcaaacaccatctattgagcacctacattgtgtgccaggtagtaaaataggtgctttcatacacattgtctcaattcctgtgaggtcagaattatctctgcatttgaaacttgaggaaacatgctcagagtgcaagaagcttccttgcctgagatcacctagaaaggaaccctcagagccggcaactgaatcttggtccctgtgatgtcaagcccattgctctcccactgcagaacatggcctctagattaatgccaccgattcaggaacacctccgacagtcttgaaatacccccatgttgccttgtttgttttttccttctggcttcttctattacagtctcttcattggaagctctgtaggccaaggccagagctgatactgacacggagccaatgcagatagcacatcagatgctaggggtcgctgggaggattaagggacttaatctgctaggaacacctgtacttgaagtggaggaggctagggggccacagttgctgcttcattaacatagaggttttggatttttttctcttgtggtttgttttttaagtggattggcagactccttgttgcttaagagtggctttctaggcaggccactggcatctgaattcatcattgacaataaatgtaagaaattggaataaaaaagagagacctgctgttattcgcttttgttctccagtgatttgattaactcagggcaaggctgaatatcagagtgtatcgcactgaagaataataatccattcagtaatgttatagttatcctcaatctaaatatgtcaactgtcattttgctacttttcaaataaaatacttgaaaactgtca

SEQ ID NO: 22869 - DNA, 581 bp, Homo sapiens
  source 1..581: mol_type = unassigned DNA
agtccggcggagagcggagctgaggatggctgtgcccggctccttcccgctgctggtcgagggctcctggggccccgaccccccgaagaacttgaacaccaagttgcagatgtacttccagagcccgaagaggtcgggaggcggcgagtgtgaggtccgccaggatcccaggagcccatcccgcttcctggtgttcttctacccggaggacgttcggcagaaggttctggagagaaaaaatcatgagttggtatggcaaggaaaaggaacattcaagttaactgtccagttacctgcaaccccagatgaaatcgatcatgtctttgaagaggaacttctaacaaaagaatccaagaccaaagaagatgttaaagaaccagatactataagatttgttgatgattgtaccaagcaccattcaattaaacaacttcagctttctccaagacttctggaagtgacaaacacaatcagggttgaaaacctgccacctggtgctgatgactacagtttaaaacttttctttgaaaatccctataatggagggggaagagttgccaatgttgaatattttcctgaag

SEQ ID NO: 22870 - DNA, 1518 bp, Homo sapiens
  source 1..1518: mol_type = unassigned DNA
ttcctaggttgaaccgcaatcctttaagaagtctctgagggaagaggaaatattttgagaactattgttatcaactctttgatatctgatgatcaatgctccaaagaattggattaatatttttacacaatattgttgtagtcagtaactgtttctatttccaggcatttttagatgaattcactaactggtcaagaataaatcccaacaaggccaggattcccatggcaggagatacccaaggtgtggtcgggactgtctctaagccttgtttcacagcatatgaaatgaaaatcggtgcaattacttttcaggttgctactggagatatagccactgaacaggtagatgttattgtaaactcaacagcaaggacatttaatcggaaatcaggtgtgtcaagagctattttagaaggtgctggacaagctgtggaaagtgaatgtgctgtactagctgcacagcctcacagagattttataattacaccaggtggatgcttaaagtgcaaaataataattcatgttcctgggggaaaagatgtcaggaaaacggtcaccagtgttctagaagagtgtgaacagaggaagtacacatcggtttcccttccagccattggaacaggaaatgccggaaaaaaccctatcacagttgctgataacataatcgatgctattgtagacttctcatcacaacattccaccccatcattaaaaacagttaaagttgtcatttttcaacctgagctgctaaatatattctacgacagcatgaaaaaaagagacctctctgcatcactgaactttcagtccacattctccatgactacatgtaatcttcctgaacactggactgacatgaatcatcagctgttttgcatggtccagctagagccaggacaatcagaatataataccataaaggacaagttcacccgaacttgttcttcctacgcaatagagaagattgagaggatacagaatgcatttctctggcagagctaccaggtaaagaaaaggcaaatggatatcaagaatgaccataagaataatgagagactcctcttccatgggacagatgcagactcagtgccatatgtcaatcagcacggctttaatagaagttgtgctgggaaaaatgctgtatcctatggaaaaggaacctattttgctgtggatgccagttattctgccaaggacacctactccaagccagacagcaatgggagaaagcacatgtacgttgtgcgagtacttactggagtcttcacaaagggacgtgcaggattagtcacccctccacccaagaatcctcacaatcccacagatctctttgactcagtgacaaacaatacacgatctccaaagctatttgtggtattctttgataatcaggcttacccagaatatctcataactttcacggcttaaaaatatttttatcatcaaagagatgatttaagtcatctgtaagaacaacatgcaatctttgtctttgcttctggcctgtgtaagcaga

SEQ ID NO: 22871 - DNA, 2156 bp, Homo sapiens
  source 1..2156: mol_type = unassigned DNA
agagaaaagaagttcgaggcacaagcctgttgggtggggcgcaactgcagtcccagcgagctgaggatggctgcgccaggcccccttcctgccgctgctctgagtccaggggctccgacccccagagaacttatgcacggagttgcaggtgttacttccagagccggacgagatcgggaggcggggagcgtgctgccggccgggaaccgtggggcgcggaaggcctcccggcgctcttcctcccggagtatgtccagagacaacaagttcagcaagaaagattgtctttcaatcaggaatgttgtagcttcaatccaaaccaaagaaggtctgaatctcaagttgataagtggagatgttctgtacatctgggccgatgtcattgtcaacagcgttcccatgaatcttcagcttggaggaggaccactatctcgggcatttttgcagaaagctggtcccatgctccagaaagagttagatgacagaaggcgggaaacagaggaaaaagtaggtaacatattcatgacaagcggctgcaatctggactgcaaagctgtgctccatgctgtggctccatactggaataatggagcagagacttcttggcagatcatggcaaatataatcaagaaatgtttgacaactgtagaagtgctatctttctcatcaatcacatttcccatgattggaacaggaagtttgcagtttcccaaagctgtttttgctaaactaatcctttcagaagtgttcgaatacagtagcagcacaaggccgataactagccctttacaagaagtccactttctggtatatacaaatgacgatgaaggctgtcaggcatttttagatgaattcactaactggtcaagaataaatcccaacaaggccaggattcccatggcaggagatacccaaggtgtggtcgggactgtctctaagccttgtttcacagcatatgaaatgaaaatcggtgcaattacttttcaggttgctactggagatatagccactgaacaggtagatgttattgtaaactcaacagcaaggacatttaatcggaaatcaggtgtgtcaagagctattttagaaggtgctggacaagctgtggaaagtgaatgtgctgtactagctgcacagcctcacagagattttataattacaccaggtggatgcttaaagtgcaaaataataattcatgttcctgggggaaaagatgtcaggaaaacggtcaccagtgttctagaagagtgtgaacagaggaagtacacatcggtttcccttccagccattggaacaggaaatgccggaaaaaaccctatcacagttgctgataacataatcgatgctattgtagacttctcatcacaacattccaccccatcattaaaaacagttaaagttgtcatttttcaacctgagctgctaaatatattctacgacagcatgaaaaaaagagacctctctgcatcactgaactttcagtccacattctccatgactacatgtaatcttcctgaacactggactgacatgaatcatcagctgttttgcatggtccagctagagccaggacaatcagaatataataccataaaggacaagttcacccgaacttgttcttcctacgcaatagagaagattgagaggatacagaatgcatttctctggcagagctaccaggtaaagaaaaggcaaatggatatcaagaatgaccataagaataatgagagactcctcttccatgggacagatgcagactcagtgccatatgtcaatcagcacggctttaatagaagttgtgctgggaaaaatgctgtatcctatggaaaaggaacctattttgctgtggatgccagttattctgccaaggacacctactccaagccagacagcaatgggagaaagcacatgtacgttgtgcgagtacttactggagtcttcacaaagggacgtgcaggattagtcacccctccacccaagaatcctcacaatcccacagatctctttgactcagtgacaaacaatacacgatctccaaagctatttgtggtattctttgataatcaggcttacccagaatatctcataactttcacggcttaaaaatatttttatcatcaaagagatgatttaagtcatctgtaagaacaacatgc

SEQ ID NO: 22872 - DNA, 1867 bp, Homo sapiens
  source 1..1867: mol_type = unassigned DNA
atgaagcatactgcatttttagatgaattcactaactggtcaagaataaatcccaacaaggccaggattcccatggcaggagatacccaaggtgtggtcgggactgtctctaagccttgtttcacagcatatgaaatgaaaatcggtgcaattacttttcaggttgctactggagatatagccactgaacaggtagatgttattgtaaactcaacagcaaggacatttaatcggaaatcaggtgtgtcaagagctattttagaaggtgctggacaagctgtggaaagtgaatgtgctgtactagctgcacagcctcacagagattttataattacaccaggtggatgcttaaagtgcaaaataataattcatgttcctgggggaaaagatgtcaggaaaacggtcaccagtgttctagaagagtgtgaacagaggaagtacacatcggtttcccttccagccattggaacaggaaatgccggaaaaaaccctatcacagttgctgataacataatcgatgctattgtagacttctcatcacaacattccaccccatcattaaaaacagttaaagttgtcatttttcaacctgagctgctaaatatattctacgacagcatgaaaaaaagagacctctctgcatcactgaactttcagtccacattctccatgactacatgtaatcttcctgaacactggactgacatgaatcatcagctgttttgcatggtccagctagagccaggacaatcagaatataataccataaaggacaagttcacccgaacttgttcttcctacgcaatagagaagattgagaggatacagaatgcatttctctggcagagctaccaggtaaagaaaaggcaaatggatatcaagaatgaccataagaataatgagagactcctcttccatgggacagatgcagactcagtgccatatgtcaatcagcacggctttaatagaagttgtgctgggaaaaatgctgtatcctatggaaaaggaacctattttgctgtggatgccagttattctgccaaggacacctactccaagccagacagcaatgggagaaagcacatgtacgttgtgcgagtacttactggagtcttcacaaagggacgtgcaggattagtcacccctccacccaagaatcctcacaatcccacagatctctttgactcagtgacaaacaatacacgatctccaaagctatttgtggtattctttgataatcaggcttacccagaatatctcataactttcacggcttaaaaatatttttatcatcaaagagatgatttaagtcatctgtaagaacaacatgcaatctttgtctttgcttctggcctgtgtaagcagatgaaagtttcccttttaggtgccaaaatgctgaaaattacctttttaaagtgctctattgctgcgatttgtagcatacctttttttctcagcaaattgatgggtggaagctgagaaatgtatggtaaatgtcacagagctacaaccattcacagacaccaaatctctaggagaataaaaagcacattattctttttctatcagaaaaaaacaagatgcatcaccttaaaaccaagatgacattgttcttcttggaacatgttaagacatcgaatggtggcgggttaaactgtactgcttaagtggagcggctaccgttatgcatctatcacagttggggattttgccttattaaggaaaacttgtcaatagttcagctgaaatgactgaatcacagaatattaactctgttatggaacaaatcataacagattttacctgtttacatttcaggtaaaaatgtatcgcattgttatctaatattaaaaaattacccccaatt

SEQ ID NO: 22873 - DNA, 3198 bp, Homo sapiens
  source 1..3198: mol_type = unassigned DNA
gggcttcgtgttcctgggtgctgaccgtgcactccccgccgcccgaggacttagagctctggaagtagctctccagcttccttcgtactcgggggccggacttgtacacccgcacgaggagcggggacggcgggcgcagaagtgggccaccatatctggaaactacagtctatgctttgaagcgcaaaagggaataaacatttaaagactcccccggggacctggaggatggacttttccatggtggccggagcagcagcttacaatgaaaaatcaggtaggattacctcgctctcactcttgtttcagaaagtctttgctcagatctttcctcagtggagaaaggggaatacagaagaatgtctcccctacaagtgctcagagactggtgctcttggagaaaactatagttggcaaattcccattaaccacaatgacttcaaaattttaaaaaataatgagcgtcagctgtgtgaagtcctccagaataagtttggctgtatctctaccctggtctctccagttcaggaaggcaacagcaaatctctgcaagtgttcagaaaaatgctgactcctaggatagagttatcagtctggaaagatgacctcaccacacatgctgttgatgctgtggtgaatgcagccaatgaagatcttctgcatgggggaggcctggccctggccctggtaaaagctggtggatttgaaatccaagaagagagcaaacagtttgttgccagatatggtaaagtgtcagctggtgagatagctgtcacgggagcagggaggcttccctgcaaacagatcatccatgctgttgggcctcggtggatggaatgggataaacagggatgtactggaaagctgcagagggccattgtaagtattctgaattatgtcatctataaaaatactcacattaagacagtagcaattccagccttgagctctgggatttttcagttccctctgaatttgtgtacaaagactattgtagagactatccgggttagtttgcaagggaagccaatgatgagtaatttgaaagaaattcacctggtgagcaatgaggaccctactgttgctgcctttaaagctgcttcagaattcatcctagggaagagtgagctgggacaagaaaccaccccttctttcaatgcaatggtcgtgaacaacctgaccctccagattgtccagggccacattgaatggcagacggcagatgtaattgttaattctgtaaacccacatgatattacagttggacctgtggcaaagtcaattctacaacaagcaggagttgaaatgaaatcggaatttcttgccacaaaggctaaacagtttcaacggtcccagttggtactggtcacaaaaggatttaacttgttctgtaaatatatataccatgtactgtggcattcagaatttcctaaacctcagatattaaaacatgcaatgaaggagtgtttggaaaaatgcattgagcaaaatataacttccatttcctttcctgcccttgggactggaaacatggaaataaagaaggaaacagcagcagagattttgtttgatgaagttttaacatttgccaaagaccatgtaaaacaccagttaactgtaaaatttgtgatctttccaacagatttggagatatataaggctttcagttctgaaatggcaaagaggtccaagatgctgagtttgaacaattacagtgtcccccagtcaaccagagaggagaaaagagaaaatgggcttgaagctagatctcctgccatcaatctgatgggattcaacgtggaagagatgtatgaggcccacgcatggatccaaagaatcctgagtctccagaaccaccacatcattgagaataatcatattctgtaccttgggagaaaggaacatgacattttgtctcagcttcagaaaacttcaagtgtctccatcacagaaattatcagcccaggaaggacagagttagagattgaaggagcccgggctgacctcattgaggtggttatgaacattgaagatatgctttgtaaagtacaggaggaaatggcaaggaaaaaggagcgaggcctttggcgctcgttaggacagtggactattcagcaacaaaaaacccaagacgaaatgaaagaaaatatcatatttctgaaatgtcctgtgcctccaactcaagagcttctagatcaaaagaaacagtttgaaaaatgtggtttgcaggttctaaaggtggagaagatagacaatgaggtccttatggctgcctttcaaagaaagaagaaaatgatggaagaaaaactgcacaggcaacctgtgagccataggctgtttcagcaagtcccataccagttctgcaatgtggtatgcagagttggctttcaaagaatgtactcgacaccttgcgatccaaaatacggagctggcatatacttcaccaagaacctcaaaaacctggcagagaaggccaagaaaatctctgctgcagataagctgatctatgtgtttgaggctgaagtactcacaggcttcttctgccagggacatccgttaaatattgttcccccaccactgagtcctggagctatagatggtcatgacagtgtggttgacaatgtctccagccctgaaacctttgttatttttagtggcatgcaggctatacctcagtatttgtggacatgcacccaggaatatgtacagtcacaagattactcatcaggaccaatgagaccctttgcacagcatccttggaggggattcgcaagtggcagccctgttgattaatctctacatcattttaacagctggtatggccttaccttgggtgaactaaccaaataatgaccatcgatggctcaaagagtggcttgaatatatcccatgggttatctgtatggactgactgggttattgaaaggactagccacatactagcatcttagtgcctttatctgtctttatgtcttggggttggggtaggtagataccaaatgaaacactttcaggaccttccttcctcttgcagttgttctttaatctcctttactagaggagataaatattttgcatataatgaagaaatttttctagtatataacgcaggccttttattttctaaaatgatgatagtataaaaatgttaggataacagaatgattttagattttccagagaatattataaagtgct

SEQ ID NO: 22874 - DNA, 3025 bp, Homo sapiens
  source 1..3025: mol_type = unassigned DNA
gagtaggtccggtgcctctgggccctcggggtcccctctcctgcaggctcgaggtgggcggggagaagggggacgggcgcggacccgggtcccagggccaggcctcccttgtgagtagactatgcaaagaaaaagtgggccaccatatctggaaactacagtctatgctttgaagcgcaaaagggaataaacatttaaagactcccccggggacctggaggatggacttttccatggtggccggagcagcagcttacaatgaaaaatcagagactggtgctcttggagaaaactatagttggcaaattcccattaaccacaatgacttcaaaattttaaaaaataatgagcgtcagctgtgtgaagtcctccagaataagtttggctgtatctctaccctggtctctccagttcaggaaggcaacagcaaatctctgcgtgttcagaaaaatgctgactcctaggatagagttatcagtctggaaagatgacctcaccacacatgctgttgatgctgtggtgaatgcagccaatgaagatcttctgcatgggggaggcctggccctggccctggtaaaagctggtggatttgaaatccaagaagagagcaaacagtttgttgccagatatggtaaagtgtcagctggtgagatagctgtcacgggagcagggaggcttccctgcaaacagatcatccatgctgttgggcctcggtggatggaatgggataaacagggatgtactggaaagctgcagagggccattgtaagtattctgaattatgtcatctataaaaatactcacattaagacagtagcaattccagccttgagctctgggatttttcagttccctctgaatttgtgtacaaagactattgtagagactatccgggttagtttgcaagggaagccaatgatgagtaatttgaaagaaattcacctggtgagcaatgaggaccctactgttgctgcctttaaagctgcttcagaattcatcctagggaagagtgagctgggacaagaaaccaccccttctttcaatgcaatggtcgtgaacaacctgaccctccagattgtccagggccacattgaatggcagacggcagatgtaattgttaattctgtaaacccacatgatattacagttggacctgtggcaaagtcaattctacaacaagcaggagttgaaatgaaatcggaatttcttgccacaaaggctaaacagtttcaacggtcccagttggtactggtcacaaaaggatttaacttgttctgtaaatatatataccatgtactgtggcattcagaatttcctaaacctcagatattaaaacatgcaatgaaggagtgtttggaaaaatgcattgagcaaaatataacttccatttcctttcctgcccttgggactggaaacatggaaataaagaaggaaacagcagcagagattttgtttgatgaagttttaacatttgccaaagaccatgtaaaacaccagttaactgtaaaatttgtgatctttccaacagatttggagatatataaggctttcagttctgaaatggcaaagaggtccaagatgctgagtttgaacaattacagtgtcccccagtcaaccagagaggagaaaagagaaaatgggcttgaagctagatctcctgccatcaatctgatgggattcaacgtggaagagatgtatgaggcccacgcatggatccaaagaatcctgagtctccagaaccaccacatcattgagaataatcatattctgtaccttgggagaaaggaacatgacattttgtctcagcttcagaaaacttcaagtgtctccatcacagaaattatcagcccaggaaggacagagttagagattgaaggagcccgggctgacctcattgaggtggttatgaacattgaagatatgctttgtaaagtacaggaggaaatggcaaggaaaaaggagcgaggcctttggcgctcgttaggacagtggactattcagcaacaaaaaacccaagacgaaatgaaagaaaatatcatatttctgaaatgtcctgtgcctccaactcaagagcttctagatcaaaagaaacagtttgaaaaatgtggtttgcaggttctaaaggtggagaagatagacaatgaggtccttatggctgcctttcaaagaaagaagaaaatgatggaagaaaaactgcacaggcaacctgtgagccataggctgtttcagcaagtcccataccagttctgcaatgtggtatgcagagttggctttcaaagaatgtactcgacaccttgcgatccaaaatacggagctggcatatacttcaccaagaacctcaaaaacctggcagagaaggccaagaaaatctctgctgcagataagctgatctatgtgtttgaggctgaagtactcacaggcttcttctgccagggacatccgttaaatattgttcccccaccactgagtcctggagctatagatggtcatgacagtgtggttgacaatgtctccagccctgaaacctttgttatttttagtggcatgcaggctatacctcagtatttgtggacatgcacccaggaatatgtacagtcacaagattactcatcaggaccaatgagaccctttgcacagcatccttggaggggattcgcaagtggcagccctgttgattaatctctacatcattttaacagctggtatggccttaccttgggtgaactaaccaaataatgaccatcgatggctcaaagagtggcttgaatatatcccatgggttatctgtatggactgactgggttattgaaaggactagccacatactagcatcttagtgcctttatctgtctttatgtcttggggttggggtaggtagataccaaatgaaacactttcaggaccttccttcctcttgcagttgttctttaatctcctttactagaggagataaatattttgcatataatgaagaaatttttctagtatataacgcaggccttttattttctaaaatgatgatagt

SEQ ID NO: 22875 - DNA, 3091 bp, Homo sapiens
  source 1..3091: mol_type = unassigned DNA
gggcttcgtgttcctgggtgctgaccgtgcactccccgccgcccgaggacttagagctctggaagtagctctccagcttccttcgtactcgggggccggacttgtacacccgcacgaggagcggggacggcgggcgcagaagtgggccaccatatctggaaactacagtctatgctttgaagcgcaaaagggaataaacatttaaagactcccccggggacctggaggatggacttttccatggtggccggagcagcagcttacaatgaaaaatcagagactggtgctcttggagaaaactatagttggcaaattcccattaaccacaatgacttcaaaattttaaaaaataatgagcgtcagctgtgtgaagtcctccagaataagtttggctgtatctctaccctggtctctccagttcaggaaggcaacagcaaatctctgcaagtgttcagaaaaatgctgactcctaggatagagttatcagtctggaaagatgacctcaccacacatgctgttgatgctgtggtgaatgcagccaatgaagatcttctgcatgggggaggcctggccctggccctggtaaaagctggtggatttgaaatccaagaagagagcaaacagtttgttgccagatatggtaaagtgtcagctggtgagatagctgtcacgggagcagggaggcttccctgcaaacagatcatccatgctgttgggcctcggtggatggaatgggataaacagggatgtactggaaagctgcagagggccattgtaagtattctgaattatgtcatctataaaaatactcacattaagacagtagcaattccagccttgagctctgggatttttcagttccctctgaatttgtgtacaaagactattgtagagactatccgggttagtttgcaagggaagccaatgatgagtaatttgaaagaaattcacctggtgagcaatgaggaccctactgttgctgcctttaaagctgcttcagaattcatcctagggaagagtgagctgggacaagaaaccaccccttctttcaatgcaatggtcgtgaacaacctgaccctccagattgtccagggccacattgaatggcagacggcagatgtaattgttaattctgtaaacccacatgatattacagttggacctgtggcaaagtcaattctacaacaagcaggagttgaaatgaaatcggaatttcttgccacaaaggctaaacagtttcaacggtcccagttggtactggtcacaaaaggatttaacttgttctgtaaatatatataccatgtactgtggcattcagaatttcctaaacctcagatattaaaacatgcaatgaaggagtgtttggaaaaatgcattgagcaaaatataacttccatttcctttcctgcccttgggactggaaacatggaaataaagaaggaaacagcagcagagattttgtttgatgaagttttaacatttgccaaagaccatgtaaaacaccagttaactgtaaaatttgtgatctttccaacagatttggagatatataaggctttcagttctgaaatggcaaagaggtccaagatgctgagtttgaacaattacagtgtcccccagtcaaccagagaggagaaaagagaaaatgggcttgaagctagatctcctgccatcaatctgatgggattcaacgtggaagagatgtatgaggcccacgcatggatccaaagaatcctgagtctccagaaccaccacatcattgagaataatcatattctgtaccttgggagaaaggaacatgacattttgtctcagcttcagaaaacttcaagtgtctccatcacagaaattatcagcccaggaaggacagagttagagattgaaggagcccgggctgacctcattgaggtggttatgaacattgaagatatgctttgtaaagtacaggaggaaatggcaaggaaaaaggagcgaggcctttggcgctcgttaggacagtggactattcagcaacaaaaaacccaagacgaaatgaaagaaaatatcatatttctgaaatgtcctgtgcctccaactcaagagcttctagatcaaaagaaacagtttgaaaaatgtggtttgcaggttctaaaggtggagaagatagacaatgaggtccttatggctgcctttcaaagaaagaagaaaatgatggaagaaaaactgcacaggcaacctgtgagccataggctgtttcagcaagtcccataccagttctgcaatgtggtatgcagagttggctttcaaagaatgtactcgacaccttgcgatccaaaatacggagctggcatatacttcaccaagaacctcaaaaacctggcagagaaggccaagaaaatctctgctgcagataagctgatctatgtgtttgaggctgaagtactcacaggcttcttctgccagggacatccgttaaatattgttcccccaccactgagtcctggagctatagatggtcatgacagtgtggttgacaatgtctccagccctgaaacctttgttatttttagtggcatgcaggctatacctcagtatttgtggacatgcacccaggaatatgtacagtcacaagattactcatcaggaccaatgagaccctttgcacagcatccttggaggggattcgcaagtggcagccctgttgattaatctctacatcattttaacagctggtatggccttaccttgggtgaactaaccaaataatgaccatcgatggctcaaagagtggcttgaatatatcccatgggttatctgtatggactgactgggttattgaaaggactagccacatactagcatcttagtgcctttatctgtctttatgtcttggggttggggtaggtagataccaaatgaaacactttcaggaccttccttcctcttgcagttgttctttaatctcctttactagaggagataaatattttgcatataatgaagaaatttttctagtatataacgcaggccttttattttctaaaatgatgatagtataaaaatgttaggataacagaatgattttagattttccagagaatattataaagtg

SEQ ID NO: 22876 - DNA, 2782 bp, Homo sapiens
  source 1..2782: mol_type = unassigned DNA
ctggaaagccgagggtagccgagcggggcgggcgctctggagcggcgggtgctcgggctgccgtccgctccgccagaagcaccgagcagccgagccggggcccgccgccctcctcctccatgaggcccgagtgaggcgcggcggctatagccgacccgcggcgccttccccccgcgtcctatcgcgagcgcagcggcagcggcccctggaggaggaggcggaggaggaggagcatgtcggacggtttcgatcgggccccaggtgctggtcggggccggagccggggcctgggccgcggagggggcgggcctgagggcggcggtttcccgaacggagcggggcctgctgagcgggcgcggcaccagccgccgcaacccaaagccccgggcttcctgcagccaccgccgctgcgccagcccaggacgaccccgccgccaggggcccagtgcgaggtccccgccagcccccagcggccttcccggcccggggcgctcccagagcaaacgaggcccctgagagctccacctagttcacaggataaaatcccacagcagaactcggagtcagcaatggctaagccccaggtggttgtagctcctgtattaatgtctaagctgtctgtgaatgcccctgaattttacccttcaggttattcttccagttacacagaatcctatgaggatggttgtgaggattatcctactctatcagaatatgttcaggattttttgaatcatcttacagagcagcctggcagttttgaaactgaaattgaacagtttgcagagaccctgaatggttgtgttacaacagatgatgctttgcaagaacttgtggaactcatctatcaacaggccacatctatcccaaatttctcttatatgggagctcgcctgtgtaattacctgtcccatcatctgacaattagcccacagagtggcaacttccgccaattgctacttcaaagatgtcggactgaatatgaagttaaagatcaagctgcaaaaggggatgaagttactcgaaaacgatttcatgcatttgtactctttctgggagaactttatcttaacctggagatcaagggaacaaatggacaggttacaagagcagatattcttcaggttggtcttcgagaattgctgaatgccctgttttctaatcctatggatgacaatttaatttgtgcagtaaaattgttaaagttgacaggatcagttttggaagatgcttggaaggaaaaaggaaagatggatatggaagaaattattcagagaattgaaaacgttgtcctagatgcaaactgcagtagagatgtaaaacagatgctcttgaagcttgtagaactccggtcaagtaactggggcagagtccatgcaacttcaacatatagagaagcaacaccagaaaatgatcctaactactttatgaatgaaccaacattttatacatctgatggtgttcctttcactgcagctgatccagattaccaagagaaataccaagaattacttgaaagagaggacttttttccagattatgaagaaaatggaacagatttatccggggctggtgatccatacttggatgatattgatgatgagatggacccagagatagaagaagcttatgaaaagttttgtttggaatcagagcgtaagcgaaaacagtaaagttaaatttcagcatatcagttttataaagcagtttaggtatggtgatttagcagaacacaagagagcaagaaaatgtcacatctataccaaattaaggatgttgagttatgttactaatgtatgcaactttaattttgtttaacactatctgccaaaataaactttattccctataacttaaaatgtgtatatatatataatagtttattatgtacagttaattctactgttttggctgcaataaaatcgattttgaaataaatgaaatgttgaaaattttgctagttggttagatgcttatcctttaaattctacttttcttgaggggaaaaagtcttcttctggaaatacatattactgcaaaaatgtagcatccttttttaggtaggagtattatagctttcattttagtttgacatttagtgtcccaatgaattgaatttcaaatatgaatcataatcttgaaaatctttagcactaaagtcttggaatatatcaacaactgatttacatatgcagatgctatttgataccaagggctttttaaatgtcatgggggggaaaaacccaacttggtgaactcccagctaaacaaccaagacttcactgaagatttattccaattctagaattgttcttttttatttttattttttcaactgactaacttcattaccttaaaggctagaacattattctgctttatttatatggctttctcacttttattttgtagcatgggttgcatcgacttttttactagagaattttactagatatttgtcattcaagttttcatctgctttataattgatacaccttgagggtcacttttctaatacttttactataatgtggtaccacctcagccctaataaataatatttttacctaatgtcaaatctttttccagctaactaaaaactgtgtacaaaaggattgcttgtaaatatgcatgtaaatagttctgttaataacccactgttttacatttggtacatctgtgtctgctaatacagttagctttctcacttttctgcttgtttgttcagtctgaattaaaattagactttgaaaataaagcttaaatagttgtttcctctaaa

SEQ ID NO: 22877 - DNA, 1814 bp, Homo sapiens
  source 1..1814: mol_type = unassigned DNA
acattttcttgaaatttctggaggggaaggttaacgggaagagaacgaagcttgttaaacgtaggtgtgacctactgtggtaaacacctagggtgaattaaagaggggacacatattttgattccgtttctactcccttcccccgatgctaacggagcaggtgacagtctcccagggaccactcctcagcagtccgcgggtctcggccggagccgagtcattgaacacacctgtgcgccagcgaaccctggcgcagggtccacgccccctccccccgtgtttttatttcccgggcgtcaactgtcggtctcgcacgtctctcctgagaactaccgagtaggtcgggcctgcctgtgagcaaacgaggcccctgagagctccacctagttcacaggataaaatcccacagcagaactcggagtcagcaatggctaagccccaggtggttgtagctcctgtattaatgtctaagctgtctgtgaatgcccctgaattttacccttcaggttattcttccagttacacagaatcctatgaggatggttgtgaggattatcctactctatcagaatatgttcaggattttttgaatcatcttacagagcagcctggcagttttgaaactgaaattgaacagtttgcagagaccctgaatggttgtgttacaacagatgatgctttgcaagaacttgtggaactcatctatcaacaggccacatctatcccaaatttctcttatatgggagctcgcctgtgtaattacctgtcccatcatctgacaattagcccacagagtggcaacttccgccaattgctacttcaaagatgtcggactgaatatgaagttaaagatcaagctgcaaaaggggatgaagttactcgaaaacgatttcatgcatttgtactctttctgggagaactttatcttaacctggagatcaagggaacaaatggacaggttacaagagcagatattcttcaggttggtcttcgagaattgctgaatgccctgttttctaatcctatggatgacaatttaatttgtgcagtaaaattgttaaagttgacaggatcagttttggaagatgcttggaaggaaaaaggaaagatggatatggaagaaattattcagagaattgaaaacgttgtcctagatgcaaactgcagtagagatgtaaaacagatgctcttgaagcttgtagaactccggtcaagtaactggggcagagtccatgcaacttcaacatatagagaagcaacaccagaaaatgatcctaactactttatgaatgaaccaacattttatacatctgatggtgttcctttcactgcagctgatccagattaccaagagaaataccaagaattacttgaaagagaggacttttttccagattatgaagaaaatggaacagatttatccggggctggtgatccatacttggatgatattgatgatgagatggacccagagatagaagaagcttatgaaaagttttgtttggaatcagagcgtaagcgaaaacagtaaagttaaatttcagcatatcagttttataaagcagtttaggtatggtgatttagcagaacacaagagagcaagaaaatgtcacatctataccaaattaaggatgttgagttatgttactaatgtatgcaactttaattttgtttaacactatctgccaaaataaactttattccctataacttaaaatgtgtatatatatataatagtttattatgtacagttaattctactgttttggctgcaataaaatcgattttgaaataaatgaaatgttgaaaatttt

SEQ ID NO: 22878 - DNA, 1734 bp, Homo sapiens
  source 1..1734: mol_type = unassigned DNA
gttttgggggagaactggaaagccgagggtagccgagcggggcgggcgctctggagcggcgggtgctcgggctgccgtccgctccgccagaagcaccgagcagccgagccggggcccgccgccctcctcctccatgaggcccgagtgaggcgcggcggctatagccgacccgcggcgccttccccccgcgtcctatcgcgagcgcagcggcagcggcccctggaggaggaggcggaggaggaggagcatgtcggacggtttcgatcgggccccagagcaaacgaggcccctgagagctccacctagttcacaggataaaatcccacagcagaactcggagtcagcaatggctaagccccaggtggttgtagctcctgtattaatgtctaagctgtctgtgaatgcccctgaattttacccttcaggttattcttccagttacacagaatcctatgaggatggttgtgaggattatcctactctatcagaatatgttcaggattttttgaatcatcttacagagcagcctggcagttttgaaactgaaattgaacagtttgcagagaccctgaatggttgtgttacaacagatgatgctttgcaagaacttgtggaactcatctatcaacaggccacatctatcccaaatttctcttatatgggagctcgcctgtgtaattacctgtcccatcatctgacaattagcccacagagtggcaacttccgccaattgctacttcaaagatgtcggactgaatatgaagttaaagatcaagctgcaaaaggggatgaagttactcgaaaacgatttcatgcatttgtactctttctgggagaactttatcttaacctggagatcaagggaacaaatggacaggttacaagagcagatattcttcaggttggtcttcgagaattgctgaatgccctgttttctaatcctatggatgacaatttaatttgtgcagtaaaattgttaaagttgacaggatcagttttggaagatgcttggaaggaaaaaggaaagatggatatggaagaaattattcagagaattgaaaacgttgtcctagatgcaaactgcagtagagatgtaaaacagatgctcttgaagcttgtagaactccggtcaagtaactggggcagagtccatgcaacttcaacatatagagaagcaacaccagaaaatgatcctaactactttatgaatgaaccaacattttatacatctgatggtgttcctttcactgcagctgatccagattaccaagagaaataccaagaattacttgaaagagaggacttttttccagattatgaagaaaatggaacagatttatccggggctggtgatccatacttggatgatattgatgatgagatggacccagagatagaagaagcttatgaaaagttttgtttggaatcagagcgtaagcgaaaacagtaaagttaaatttcagcatatcagttttataaagcagtttaggtatggtgatttagcagaacacaagagagcaagaaaatgtcacatctataccaaattaaggatgttgagttatgttactaatgtatgcaactttaattttgtttaacactatctgccaaaataaactttattccctataacttaaaatgtgtatatatatataatagtttattatgtacagttaattctactgttttggctgcaataaaatcgattttgaaataaatgaaatgttgaaaattttg

SEQ ID NO: 22879 - DNA, 752 bp, Homo sapiens
  source 1..752: mol_type = unassigned DNA
tggggggaggggccgggtgcgcggtctcggagttcggggtcccgggaggaagtaaaaatcgcctcccctcagcagccctctaaagcgagaccctagcgagtaaccacctcttttccaccgacccctttaaaacgacagagaggaaaaaagctcgcaagcactcatttgagaggcagagcaaacgaggcccctgagagctccacctagttcacaggataaaatcccacagcagaactcggagtcagcaatggctaagccccaggtggttgtagctcctgtattaatgtctaagctgtctgtgaatgcccctgaattttacccttcaggttattcttccagttacacagaatcctatgaggatggttgtgaggattatcctactctatcagaatatgttcaggattttttgaatcatcttacagagcagcctggcagttttgaaactgaaattgaacagtttgcagagaccctgaatggttgtgttacaacagatgatgctttgcaagaacttgtggaactcatctatcaacaggccacatctatcccaaatttctcttatatgggagctcgcctgtgtaattacctgtcccatcatctgacaattagcccacagagtggcaacttccgccaattgctacttcaaagatgtcggactgaatatgaagttaaagatcaagctgcaaaaggggatgaagttactcgaaaacgatttcatgcatttgtactctttctgggagaactttatcttaacc

SEQ ID NO: 22880 - DNA, 706 bp, Homo sapiens
  source 1..706: mol_type = unassigned DNA
caagatgaaaaagagggcagagttacactgaaagagcaaacgaggcccctgagagctccacctagttcacaggataaaatcccacagcagaactcggagtcagcaatggctaagccccaggtggttgtagctcctgtattaatgtctaagctgtctgtgaatgcccctgaattttacccttcaggttattcttccagttacacagaatcctatgaggatggttgtgaggattatcctactctatcagaatatgttcaggattttttgaatcatcttacagagcagcctggcagttttgaaactgaaattgaacagtttgcagagaccctgaatggttgtgttacaacagatgatgctttgcaagaacttgtggaactcatctatcaacaggccacatctatcccaaatttctcttatatgggagctcgcctgtgtaattacctgtcccatcatctgacaattagcccacagagtggcaacttccgccaattgctacttcaaagatgtcggactgaatatgaagttaaagatcaagctgcaaaaggggatgaagttactcgaaaacgatttcatgcatttgtactctttctgggagaactttatcttaacctggagatcaagggaacaaatggacaggttacaagagcagatattcttcaggttggtcttcgagaattgctgaatgccctgttttctaatcctatgg

SEQ ID NO: 22881 - DNA, 1603 bp, Homo sapiens
  source 1..1603: mol_type = unassigned DNA
ggaaagccgagggtagccgagcggggcgggcgctctggagcggcgggtgctcgggctgccgtccgctccgccagaagcaccgagcagccgagccggggcccgccgccctcctcctccatgaggcccgagtgaggcgcggcggctatagccgacccgcggcgccttccccccgcgtcctatcgcgagcgcagcggcagcggcccctggaggaggaggcggaggaggaggagcatgtcggacggtttcgatcgggccccagagcaaacgaggcccctgagagctccacctagttcacaggataaaatcccacagcagaactcggagtcagcaatggctaagccccaggtggttgtagctcctgtattaatgtctaagctgtctgtgaatgcccctgaattttacccttcaggttattcttccagttacacagaatcctatgaggatggttgtgaggattatcctactctatcagaatatgttcaggattttttgaatcatcttacagagcagcctggcagttttgaaactgaaattgaacagtttgcagagaccctgaatggttgtgttacaacagatgatgctttgcaagaacttgtggaactcatctatcaacaggccacatctatcccaaatttctcttatatgggagctcgcctgtgtaattacctgtcccatcatctgacaattagcccacagagtggcaacttccgccaattgctacttcaaagatgtcggactgaatatgaagttaaagatcaagctgcaaaaggggatgaagttactcgaaaacgatttcatgcatttgtactctttctgggagaactttatcttaacctggagatcaagggaacaaatggacaggttacaagagcagatattcttcaggttggtcttcgagaattgctgaatgccctgttttctaatcctatggatgacaatttaatttgtgcagtaaaattgttaaagttgacaggatcagttttggaagatgcttggaaggaaaaaggaaagatggatatggaagaaattattcagagaattgaaaacgttgtcctagatgcaaactgcagtagagatgtaaaacagatgctcttgaagcttgtagaactccggtcaagtaactggggcagagtccatgcaacttcaacatatagagaagcaacaccagaaaatgatcctaactactttatgaatgaaccaacattttatacatctgatggtgttcctttcactgcagctgatccagatacttggatgatattgatgatgagatggacccagagatagaagaagcttatgaaaagttttgtttggaatcagagcgtaagcgaaaacagtaaagttaaatttcagcatatcagttttataaagcagtttaggtatggtgatttagcagaacacaagagagcaagaaaatgtcacatctataccaaattaaggatgttgagttatgttactaatgtatgcaactttaattttgtttaacactatctgccaaaataaactttattccctataacttaaaatgtgtatatatatataatagtttattatgtacagttaattctactgttttggctgcaataaaatcgattttgaaata

SEQ ID NO: 22882 - DNA, 726 bp, Homo sapiens
  source 1..726: mol_type = unassigned DNA
tattttcattggacagcactgatgcaagatgaaaaagagggcagagttacactgaaaggtagcacattttcttgaaatttctggaggggaaggttaacgggaagagaacgaagcttgttaaacgtaggtgtgacctactgtggtaaacacctagggtgaattaaagaggggacacatattttgattccgtttctactcccttcccccgatgctaacggagcaggtgacagtctcccagggaccactcctcagcagtccgcgggtctcggccggagccgagtcattgaacacacctgtgcgccagcgaaccctggcgcagggtccacgccccctccccccgtgtttttatttcccgggcgtcaactgtcggtctcgcacgtctctcctgagaactaccgagtaggtcgggataaaatcccacagcagaactcggagtcagcaatggctaagccccaggtggttgtagctcctgtattaatgtctaagctgtctgtgaatgcccctgaattttacccttcaggttattcttccagttacacagaatcctatgaggatggttgtgaggattatcctactctatcagaatatgttcaggattttttgaatcatcttacagagcagcctggcagttttgaaactgaaattgaacagtttgcagagaccctgaatggttgtgttacaacagatgatgctttgcaagaacttgtggaactcatctatcaacag

SEQ ID NO: 22883 - DNA, 1459 bp, Homo sapiens
  source 1..1459: mol_type = unassigned DNA
gaagtcacttccgggctggggtgtttgtttggactggagaagggaggcggcgggcgaagcgcacgtcgagcgggggagcggcgctgcctgtggagatccgcggaggccgacaggattcgttggctgccgtccccgctgctgtgcattgggttaaaaacgacaaccaacatcagccatgaaagatccaagtcgcagcagtactagcccaagcatcatcaatgaagatgtgattattaacggtcattctcatgaagatgacaatccatttgcagagtacatgtggatggaaaatgaagaagaattcaacagacaaatagaagaggagttatgggaagaagaatttattgaacgctgtttccaagaaatgctggaagaggaagaagagcatgaatggtttattccagctcgagatctcccacaaactatggaccaaatccaagaccagtttaatgaccttgttatcagtgatggctcttctctggaagatcttgtggtcaagagcaatctgaatccaaatgcaaaggagtttgttcctggggtgaagtacggaaatatttgagtagacggggccctcttttggtggatgtagcacaatttccacactgtgaaggcagtattagaagacttaattgtaaaagctctcttgtcactgtgttacacttatgcattgccaaagtttttgttagtcttgcatgcttaataaaagtgctgagactgttactaagtaaaaagctgtcaaacatttactgaaaatagaattggccccatggcttgatgtgaagacagcaaggaaagaagcaccagtcaagttgtgaacaagcaccaaattaaaagacctaaaccttaccaaattgtctttttttgaggctaatctatcacttgttaatgtctaaactttaaaatcagtacatttaatttgagttccaactgttaagcatatttctcagacttaaatttgattatgtccccatcaaaaagaatctccattttctgaaggtctgttagttaatttgagataatttgttaaaggcaagtatgtcatattactgaggctacaagttagtcagcagatgagtgccagtccagccttttctggtatgttattgttagaaatattgagttctaatgttacatctgaggaagtatgtaatttgagaattgtaacttctaagggattcactgcatcatagctatgcctgtatggagtctaacatatgaccaataccaacccataatccagctgaacaaagatactgtaacatgatttgagtggtgcttttccttgctttgttaaccatcacgagagtctgcagcacaacttttaacaaagctagaacagttttggcttcttaaacttcatatttgggtaggttaagctgccatacgtgttcagtgtgaatagtgtttaagttgaaaatattgtaaaaaaattatattttttcaaaaatatttaaaaaaa

SEQ ID NO: 22884 - DNA, 2294 bp, Homo sapiens
  source 1..2294: mol_type = unassigned DNA
ctggggtttggggagagaggggcggagggactggcgggctcttggcgtcttgggggaacgctgcaaccgtcgacgggcctgatcagaagatcgtctttctcccgtttcttcgccatcgctaccccttatttttggttgtattgcagctcatgccctggaaaaaagaacctttggggtactgggaacccttaccctaggagggcgttgagttagatgaactttaaggtcctcttaccttttaataattttctgtgcttactctcctccttccccaccatcgccaccagaaataaataaggcttgtggtgaacttaggtcttcaaaacatttgttgcagcagccagcagtgatattttttagggactcctaaaaggggtcttacctgcttccttttgtttcttttttccctgatttggcacccgtatcaactcataaaaaccccaaactctagaaagaatttggcttccaatttgccttggaaggtgtagcagctgacagcctttgacgtttatttcaacggaaagtagatgttcatgttgggtgtgctggctaatgttgaaacgtggtggcattgttttttcacagatttcattagcacagttagatcaggtgttggtttatattttcattaagtcgcttttgaaatttcttctggcgtaggttgtgtttgcaataagtaaaagttctctacaataatttttaatgagactccactatttgcttttgtgattctgtttccagttagtgaaagacaggatatttggggaaaattagtctgtttatactacttgtcagttgtgaacttgaataaaactttttcacacacacacaaaatcacaggataggtaacttgacaagaactatagaacccacttgtgtttctttaagggatggaggttagggaatggagatttcctctaatgattcaaggctgtgcacgttgctccttaggaactcaaattgaggttaaaaacgacaaccaacatcagccatgaaagatccaagtcgcagcagtactagcccaagcatcatcaatgaagatgtgattattaacggtcattctcatgaagatgacaatccatttgcagagtacatgtggatggaaaatgaagaagaattcaacagacaaatagaagaggagttatgggaagaagaatttattgaacgctgtttccaagaaatgctggaagaggaagaagagcatgaatggtttattccagctcgagatctcccacaaactatggaccaaatccaagaccagtttaatgaccttgttatcagtgatggctcttctctggaagatcttgtggtcaagagcaatctgaatccaaatgcaaaggagtttgttcctggggtgaagtacggaaatatttgagtagacggggccctcttttggtggatgtagcacaatttccacactgtgaaggcagtattagaagacttaattgtaaaagctctcttgtcactgtgttacacttatgcattgccaaagtttttgttagtcttgcatgcttaataaaagtgctgagactgttactaagtaaaaagctgtcaaacatttactgaaaatagaattggccccatggcttgatgtgaagacagcaaggaaagaagcaccagtcaagttgtgaacaagcaccaaattaaaagacctaaaccttaccaaattgtctttttttgaggctaatctatcacttgttaatgtctaaactttaaaatcagtacatttaatttgagttccaactgttaagcatatttctcagacttaaatttgattatgtccccatcaaaaagaatctccattttctgaaggtctgttagttaatttgagataatttgttaaaggcaagtatgtcatattactgaggctacaagttagtcagcagatgagtgccagtccagccttttctggtatgttattgttagaaatattgagttctaatgttacatctgaggaagtatgtaatttgagaattgtaacttctaagggattcactgcatcatagctatgcctgtatggagtctaacatatgaccaataccaacccataatccagctgaacaaagatactgtaacatgatttgagtggtgcttttccttgctttgttaaccatcacgagagtctgcagcacaacttttaacaaagctagaacagttttggcttcttaaacttcatatttgggtaggttaagctgccatacgtgttcagtgtgaatagtgtttaagttgaaaatattgtaaaaaaattatattttttcaaaaatatttaaaaaaataaataatagtagaactga

SEQ ID NO: 22885 - DNA, 776 bp, Homo sapiens
  source 1..776: mol_type = unassigned DNA
ggaagatgggcgggtgtgggaacagtggtacgcccccattcctgccttccagagagaacgtgcgacagcgttcctgctacacccggcagccggccgtaggggcgcgctggaaaggctgctgcgcgtgcacacgtgtgcagccttggagacagacttcggggtcgcgcgttctcgcgcgcgctctctagtggcttcggagggcagagctgacagaacaagagggcggggttggcggcgacggaagtgaagtcacttccgggctggggtgtttgtttggactggagaagggaggcggcgggcgaagcgcacgtcgagcgggggagcggcgctgcctgtggagatccgcggaggccgacaggattcgttggctgccgtccccgctgctgtgcattggggatggaggttagggaatggagatttcctctaatgattcaaggctgtgcacgttgctccttaggaactcaaattgaggttaaaaacgacaaccaacatcagccatgaaagatccaagtcgcagcagtactagcccaagcatcatcaatgaagatgtgattattaacggtcattctcatgaagatgacaatccatttgcagagtacatgtggatggaaaatgaagaagaattcaacagacaaatagaagaggagttatgggaagaagaatttattgaacgctgtttccaagaaatgctggaagaggaagaagagcatgaatggtttattccagctcgagatctcccacaaactatggaccaaatccaagaccagtttaatgac

SEQ ID NO: 22886 - DNA, 858 bp, Homo sapiens
  source 1..858: mol_type = unassigned DNA
ggggagagaggggcggagggactggcgggctcttggcgtcttgggggaacgctgcaaccgtcgacgggcctgatcagaagatcgtctttctcccgtttcttcgccatcgctaccccttatttttggttgtattgcagctcatgccctggaaaaaagaacctttggggttaaaaacgacaaccaacatcagccatgaaagatccaagtcgcagcagtactagcccaagcatcatcaatgaagatgtgattattaacggtcattctcatgaagatgacaatccatttgcagagtacatgtggatggaaaatgaagaagaattcaacagacaaatagaagaggagttatgggaagaagaatttattgaacgctgtttccaagaaatgctggaagaggaagaagagcatgaatggtttattccagctcgagatctcccacaaactatggaccaaatccaagaccagtttaatgaccttgttatcagtgatggctcttctctggaagatcttgtggtcaagagcaatctgaatccaaatgcaaaggagtttgttcctggggtgaagtacggaaatatttgagtagacggggccctcttttggtggatgtagcacaatttccacactgtgaaggcagtattagaagacttaattgtaaaagctctcttgtcactgtgttacacttatgcattgccaaagtttttgttagtcttgcatgcttaataaaagtgctgagactgttactaagtaaaaagctgtcaaacatttactgaaaatagaattggccccatggcttgatgtgaagacagcaaggaaagaagcaccagtcaagttgtgaacaagcaccaaattaaaagacctaaa

SEQ ID NO: 22887 - DNA, 6279 bp, Homo sapiens
  source 1..6279: mol_type = unassigned DNA
ctggcaagtggtagtggcgcttctcgggtgctgtgcttcacgttttggtactaaaggccgagactgttgtggcgacggcgacctctacggcaacggcttaagctctcggaggagtggcagagtacgatctgaaggaggggcttctggttagcccaggttccatcataatgaatggatccaatatggcaaatacatcaccgagtgtaaaatccaaagaggaccaggggttaagtgggcacgatgaaaaggaaaacccatttgcagagtacatgtggatggagaatgaagaggatttcaacagacaggtggaggaggaactgcaggagcaagacttcttggaccgctgcttccaagagatgctggatgaagaagaccaagactggtttattccctcacgagacctgcctcaggccatgggacagttgcaacagcagttaaatggactgtcagtcagtgaaggtcatgattctgaagatattttgagcaaaagtaacctgaacccagatgccaaggagtttattccaggagagaagtactgagccgagaaagctttgaggaagacttgtctgtccccacatctggggatagtaatgcacaaaatggtggagctgaagagggggatggggcgggcgaggggtgcacagcgggaaggggagtggtggtctcacaatactgtgactctgagtaactaatatgctcagtcttattctaagcctctgagtatttctattttgttctgctgacttttgtttggggagtttcctgttttgtttttttaaatagctctttcgagttaaggaaattgcattttccccccttcatcagaagtgttccgcggtgtgtatttaaacaaaataagctgactaagaaaaactggatatttaggaaatgcccctctcaccctgctgtatacttatcagggacagtgagcacctggagagctttttgtggaatctattgagttggatgggaaaagggacaagcagaaagagcaggtggtgcaaactggaatttgaggctcagctgccccacccccggggtctcctgcaatgaactcggataaccaatgtgctgtcaagcccttgcctgtttgtcctgaaccccattcaagaaaacacagacttaaagtacttagtttacagtaacttttgatgattgttgaaagttgtaaatcagaaggtagggctgtgatggtggttgtcacttgagtcatttagttactgttgtcctgttcataagcctgtgttcaccaccaccatcagactcaccatttataagtagaagagcactagggttgatctgccacctcatctttcatgaagtctattccccagcctcctttttaagaaaagatactgctaccaaaggcataggggaggcctgctgtgctggcaattagcatgagcctgcagaagtcatccttgaatctgttgtgtcttaattttatttggacagtttttttttccagcctcatcaacacttggtcttcctggtgtcttaattccctcagacaagtttatgcacttttttaaggaaatatttttcaggacactagtaagaagctcagttcacagtttggatatttcttcccacattacagaattatggaaaggaactcaaaatcagcctaggaaagtgagtcctgcttgacccatgtgactgtgtacctgaccttctgggatcttttcagctattaaaacattttactgttcccacatacccagctttgcaagttttgtagattgacctcttagggtgtgtttctttgtctttcctgcctttaacttgctggggtcttttgttgctacccctaaggaactaaactgggtgccaggagctaccttcgtgtatagagatgtagatggcagtgtggggtacaggagagccatccaggccattctcccagggatgaggaattggagagccctgaagataatagtggcttctttctgattgctactgtgctgtgtgataggcctaatagggaaaagatatgtaacttgaaacaaagttggtataaattcagtatgtggctgtgggacagaggttggaaggaaaggactagggtatggaaagctgaagaaattctccttatgagctctcgttgactttttgaacagtgataagctaatgccagatttaaaatacacattttttcctatttgagtctttaggattatatcatttgaaaaaattgccttccttgttaggtcacatgtcataggagagtagcttagagaacttgcattaccagacagacacattaattcccaaagcctctatgttgagagaatgaaactgttaactctttttcagagaggactatgaataaagaaacttctttattcaagcttcagctttcagctgggttgtttcctctaaaagggaaagggcattgcaagtgcatagaggaaatctctcccttctgggactgcttttcctccttcatcctcgtgagcctgtccaagctcagaattccgaaggctgttagaaatgcgttgggattgcagagagaaaggagcttgtctttccttctgctgtgctggtctgttttggatgtcagtcttcaggactatgaaaacttcctgccagtttagcatggacactgagggctggcatttctagtcttcttcagacactgaacatactgactccaggtataggaagcagctagcaaattgattcttttttaaatgcataggactctgcttccggcggttcctcttgtagtccaactctttttgccatctatttatgttgggaggtaggggcacaattgtcactcacaacacaggctagttagagtttgctaccttcttagcagaaaatgcatgtgtgtcttgttggaccttcactggggaaaggctgggagcctctggctgtcagtgacttttctcacagaagaagaaccagcaagccagactggacacctttaccctttaatggtaagacttgtatttataaggggtaattttgatgttgaatttaagccactactttgtttaaacttttttaaattggcaactagaagtttgagaatttgtatagaaatggaacatgtatttctaacagttgccaatctggctggtcccaatgttagtttattagtgattgatctgtaattattgggattatttattcaactctaaaattccaagatgaaaataatttatctctttcttttcaagggaaaaaacccaaatgaatgcattttcagtttctccaggcctttgaactgcagcagaaaattcaaggatacagcctaggcctgggcaaatgcagccctgggtctttgggccagtttctgacaataatagttgagttttgggaatcacataagggtgaaaccagaaacgatcctaaggaaaggcttgacctttgttaacacctttagtttccaaagtcacagcagctggggtccctcttttttttttttttttctttttttttgagacatagtctcactctgtcacccaggctggagtgcagtggtatgaccatagctcactgcagcatcaaattcctaggctcaagcaatcctcccatcttagcctcccgagtagctgggacaacaggtacgcaccaccacggccagctaattatttttattatttttattttttgtagagactggatcttgctctatttcccaagctactcttgaattgttgtgctcaagtgattctcccatctcagcctcccaaagtgctgggattataggctgggtgtggtgagccaccccagcctggggtctctttaattaaggttataatgctaaccatggcttaaaatactaagcaacattttccaaattgtttattactattgctttgattttggagaagctgggaagtaaggaggtgaggtgaatactctgataattaacacgtgttagagaggaaagttgtgtgaagaggctgccaaagtaaacagcacgaatgaatcttcttgtactagggctgctgcaaaccccaggtagacaaatgacagcccaggctcctgaaccatcaggaacccaggaatctacccaactgtgaggagggggcaggccttcgtcaataagggtcccaccatcacgggctaataatctttctcagtttaggtgatattgaggtattgaaactgttagaaatctgacagatttgaccaagatttggagacgtccacataattgggaaggactgagtgtccctagccactctcctctgggataacgcggacgtcattagtttgcgaagtgggtggggagaacaggaggattgactctaatttggtgtgtagtgggggccttgatgtccttctgcctctgtccacatttccccatgtgactcattgcaccctgcattgctcacagggatcattagttctcccggtagacagagcacctctgcagcctctgctctgctgccttgtgaatttcctacacagacttggttagttacaatttggaaacagtttttttgggtttttttcctttgttttaatcttctcacaatgaagctgctattggtgacagggacaggggagcaggaagccaacccagggaaacatgcgagtttcctgcacaccacttagtcacctgccctcactggccaaccccctactgctgttcccagtcagtctggtttttagaggcatcgtggcaatagaatagctggatacactaatctctacaaggtgtcaggcaggagattcaccttccccagtcccaggggacaggagagaaatctgtaaagggacagatgcaccatctttatttcaaaagaaaaagctccctcagattgtgttactaggagtctcttttgtgacatttactgagctttctccccaatcttaccttcctattggctactttttaaataaaaataaacattttaggctaatatgacaaaaatgagataaaatcttaaaaacattgtactagtgtacagttactaaaatgtgcttactacaaaacagtaaaatatttcactctgtaaatcatcactaagtagttattctgtcctgttgattatgagcctccaaaaatgtttaatgcttgaaggatggtttgggaggcagggaatccttttcttaaaacaactttaatgaggcatatgttacatatcataaaacacccatttcaagtgtacatttcagtgattttagtaacttccctcagtggtgtagctgtaactattactcagttttagaacatttttatccctcccaataagatccttcatgctcttttacagttaatcctgttcttacccccggcaaccactaatctactttctctataaatttgccctttctggacagttcaaatcaatggaatcatacaatatgtggtcccttgggtctggcttttttacttagctaatgtttttgaggtttgtccatgacagataacgtcttggtagtttgttccttttattgctgagtagaattctgttgatggatgtaccacattttgtcagcagagagccttttaaacttggattccaacttcctgttgtctaaacggaaccctccgaacgtaggacttataggggaagctgctgtgcatgtcaaaaaaactactaatcagaatgagctttgtcatccagagccagaactgctgcagaaatttttataattttgcaacttctttttttacaaggaacttttgtgctactacacatcaggacttttgaagcatccaataaatccatttaataagtatgagcatgtgtctgagtggacaagaaagtgaaaccatccatgctacattggataatttttcctcccccagactggacagggaatctcagctttcaaaacagagtaacctggctccacttacaaagctgcacaggcattaaagatcgtgctgcctttgttaggcagatttggaggggaggcccaacagcaaagatggagaggaaaaagggagtggagcttgtggaacaggaagccccccagggtctgtgcagggctgctcagctcttgaggatgttgtggatggtgaagtggtgatggtgtcccggagcagcccagcacctccactgggcccagaaggtcttgacttcggacacttacccctgtttcacaagtgtttataaagctgtttttgctttttttcccctaatcattacttggtagttattaatccttctttgggggagggacagggctttaaaactgaagaaaataattttcataaaaatatcaaaaatggaaaaaagttactttgtaaaaaatttgctatacaaaccaaatggcagctgttgagaatctcaataaaatgttaaatgc

SEQ ID NO: 22888 - DNA, 3090 bp, Homo sapiens
  source 1..3090: mol_type = unassigned DNA
gtcgcggcttgtgtgcctgcgggcagccgtgccgagaatgaaccccagcacccccagctacccaacggcctcgctctacgtgggggacctccaccccgacgtgactgaggcgatgctctacgagaagttcagcccggcagggcccatcctctccatccggatctgcagggacttgatcaccagcggctcctccaactacgcgtatgtgaacttccagcatacgaaggacgcggagcatgctctggacaccatgaattttgatgttataaagggcaagccagtacgcatcatgtggtctcagcgtgatccatcacttcgaaaaagtggagtgggcaacatattcgttaaaaatctggataagtccattaataataaagcactgtatgatacagtttctgcttttggtaacatcctttcgtgtaacgtggtttgtgatgaaaatggttccaagggttatggatttgtacactttgagacacacgaagcagctgaaagagctattaaaaaaatgaacggaatgctcctaaatggtcgcaaagtatttgttggacaatttaagtctcgtaaagaacgagaagctgaacttggagctagggcaaaagagttccccaatgtttacatcaagaattttggagaagacatggatgatgagcgccttaaggatctctttggcaagttcgggcccgccttaagtgtgaaagtaatgaccgatgaaagtggaaaatccaaaggatttggatttgtaagctttgaaaggcatgaagatgcacagaaagctgtagatgagatgaatggaaaggagctcaatggaaaacaaatttacgttggtcgagctcagaaaaaagtggaacggcagacggaacttaagcgcacatttgaacagatgaagcaagataggatcaccagataccaggttgttaatctttatgtgaaaaatcttgatgatggtattgatgatgaacgtctccggaaagcgttttctccatttggtacaatcactagtgcaaaggttatgatggaaggtggtcgcagcaaagggtttggttttgtatgtttctcctccccagaagaagccactaaagcagttacagaaatgaacggtagaattgtggccacaaagccattgtatgtagctttagctcagcgcaaagaagagcgccaggcttacctcactaacgagtatatgcagagaatggcaagtgtacgagctgtgcccaaccagcgagcacctccttcaggttacttcatgacagctgtcccacagactcagaaccatgctgcatactatcctcctagccaaattgctcgactaagaccaagtcctcgctggactgctcagggtgccagacctcatccattccaaaataagcccagtgctatccgcccaggtgctcctagagtaccatttagtactatgagaccagcttcttcacaggttccacgagtcatgtcaacgcagcgtgttgctaacacatcaacacagacagtgggtccacgtcctgcagctgctgctgctgctgcagctacccctgctgtgcgcacggttccacggtataaatatgctgcgggagttcgcaatcctcagcaacatcgtaatgcacagccacaagttacaatgcaacagcttgctgttcatgtacaaggtcaggaaactttgactgcctccaggttggcatctgcccctcctcaaaagcaaaagcaaatgttaggtgaacggctctttcctcttattcaagccatgcaccctactcttgctgggaaaatcactggcatgttgttggagattgataattcagaacttctttatatgctcgagtctccagagtcactccgttctaaggttgatgaagctgtagctgtactacaagcccaccaagctaaagaggctacccagaaagcagttaacagtgctaccggtgttccaactgtttaaaattgatcagagaccacgaaaagaaatttgtgcttcaccgaagaaaaatatctaaacatcgagaaactatgggaaaaaaaattgcaaaatctaaaataaaaaatgcaaaatctaaaataaaaaatggaaaggaaactttgaaccttatgtaccgagcaaatgcaaggtctagcaaatataatgctagtcctagattacttattgatttaaaaacaaaaaaaagattacttaattttgatttaaaaacaaaaaatcgtaaaatacaaaaaccagttaatgttttgtagaccctgggaaaagaattttcagcaaagtacaaaaatttaaagcattcctttaattttttaattctttactgtggaatagctcaaaatgtccattctgttttaagtaacagaattgataactgagcaaggaaacatggtttggattataaaattcttgctttaataaaaatttcttaaacagtgaaaaaaagaaaaatcatcaattttactaatagtctttctttacattttctattattctatctcccactatatttcaaatatgaaaatcactttttcaccaaaattttaggtctttacataatagtgtttatttttaatattcataaatgaaaatatgcaatgacaaaatagtaattataaattcagtaacatttgttcaaaattgtaagacaattattaatttatactgcattatttttaaataaaaaataaatacatagttttaaaaatctaattgaacaggaggctaaacatggttctgatcacagagataatcacttttaatcatttggttttagtgtttctggtagttgattttcttcaataataattgtacatagttatttcttggtttatcaattttgtaatttaactattgacttcctgctgtaacaaataaggatatgtttcatctacctcttcccaccatccctcctcctcctcccaatataatttatcactacttgtagctcctttattggtaatattaattaatataaatatttataattaatgttacacctagtgaattgtataaaaggacagcccatttgagcattctcctttaagatgagtagaggctgtgacattgcactacatagaaatataattataccatattactttgcaataaactatgtattatag

SEQ ID NO: 22889 - DNA, 3016 bp, Homo sapiens
  source 1..3016: mol_type = unassigned DNA
gggcttcgcagcctgaggaaaaaaagagaaaaagataaaaaaaatctgaaaacgcttcaaaatcctgaaaaaaaaaaaggaaaagaaaaaacgaatcctcggagaacccgcggggaagtcactttcgtacgcttccggcctgccccgcgcccgccgccgcagcgcttggcgtccgtcggtctccgtccgtcggtccgggggtgagccgcccgcccggcccgccgtgccctccccccgctcgggccccgagccccgcgccccgcgcctgccccggcgcaccacgtgtccgtgctgcccttcgccgcccgcccggggctcgccgagtcggcgcccacaaagatttggtttccctctgccccggcggttgtaatcttaaaccgccggagcccgaggcctatatttatagagaaacgcgtgtccccgaggccgccgtgggcagcgtccggtcgcctcttaaaggatttttacccttcggaaggggattccccgtttaatttttttcctactttgattttttgaaatttggagcttcgcaccaggaccgcggagaagtgcaaagtcgcggggagggccgtattgtgcggagagccttttgtctgcggtgctgcggccgtgggagccggcccccgcctcccgtttccgtcccgtctccaagcccgccgactccagctcgtcctcgccgcgccggtgccacctgtgagccgcggcgcgggcccgggctccgaaggcgcccctttgtcctgcggcgggcccgataagaagtcctcctggcggggctcggggtggtggggggcggggagatgaacgctgcggccagcagctaccccatggcctccctgtacgtgggcgacctgcattcggacgtcaccgaggccatgctgtacgaaaagttcagccccgcggggcctgtgctgtccatccgggtctgccgcgatatgatcacccgccgctccctgggctatgcctacgtcaacttccagcagccggccgacgctgagcgggctttggacaccatgaactttgatgtgattaagggaaagccaatccgcatcatgtggtctcagagggatccctctttgagaaaatctggtgtgggaaacgtcttcatcaagaacctggacaaatctatagataacaaggcactttatgatactttttctgcttttggaaacatactgtcctgcaaggtggtgtgtgatgagaacggctctaagggttatgcctttgtccacttcgagacccaagaggctgccgacaaggccatcgagaagatgaatggcatgctcctcaatgaccgcaaagtatttgtgggcagattcaagtctcgcaaagagcgggaagctgagcttggagccaaagccaaggaattcaccaatgtttatatcaaaaactttggggaagaggtggatgatgagagtctgaaagagctattcagtcagtttggtaagaccctaagtgtcaaggtgatgagagatcccaatgggaaatccaaaggctttggctttgtgagttacgaaaaacacgaggatgccaataaggctgtggaagagatgaatggaaaagaaataagtggtaaaatcatatttgtaggccgtgcacaaaagaaagtagaacggcaggcagagttaaaacggaaatttgaacagttgaaacaggagagaattagtcgatatcagggggtgaatctctacattaagaacttggatgacactattgatgatgagaaattaaggaaagaattttctccttttggatcaattaccagtgctaaggtaatgctggaggatggaagaagcaaagggtttggcttcgtctgcttctcatctcctgaagaagcaaccaaagcagtcactgagatgaatggacgcattgtgggctccaagccactatatgttgccctggcccagaggaaggaagagagaaaggctcacctgaccaaccagtatatgcaacgagtggctggaatgagagcacttcctgccaatgccatcttaaatcagttccagcctgcagcgggtggctactttgtgccagcagtcccacaggctcagggaaggcctccatattatacacctaaccagttagcacagatgaggcctaatccacgctggcagcaaggtgggagacctcaaggcttccaaggaatgccaagtgctatacgccagtctgggcctcgtccaactcttcgccatctggctccaactggtaatgctccggcctctcgtggcctccctactaccactcagagagtcggcgttcccacagctgtgcagaacttagcgccacgcgctgctgttgctgctgctgctccccgggctgttgccccctacaaatacgcctccagtgtccgcagccctcatcctgccatacagcctctgcaggcaccccagcctgcggtccatgtgcaggggcaggagccactgactgcctccatgctggctgcagcacccccccaggaacagaagcagatgctgggagaacgcttgttcccactcatccaaacaatgcattcaaatctggctgggaagatcacgggaatgctgctggagatagacaactctgagctgctgcacatgttagagtcccccgagtctctccgctccaaggtggatgaagctgtagcagttctacaggctcatcatgccaagaaagaagctgcccagaaggtgggcgctgttgctgctgctacctcttagacaaggaaaaaccgattcaaaagccaaataaccccttatggaattcaactcaaggtttgaagacttcctagcttgtcctatggacctcaacaccaaggattacaaattgcaaatttaataggtcattttgtatcaaaaggtcaattatgaagcacctagaatttttcaattatacgaatatgttctttgggttctgctgtggcccagacagtgttaactttttttttattgtgggttttgattttttcccccagaaattggttttatttgatgtacccaagtcttacgtttcccaataaagaaaaaaaatctccataaaa

SEQ ID NO: 22890 - DNA, 3048 bp, Homo sapiens
  source 1..3048: mol_type = unassigned DNA
gcagcctgaggaaaaaaagagaaaaagataaaaaaaatctgaaaacgcttcaaaatcctgaaaaaaaaaaaggaaaagaaaaaacgaatcctcggagaacccgcggggaagtcactttcgtacgcttccggcctgccccgcgcccgccgccgcagcgcttggcgtccgtcggtctccgtccgtcggtccgggggtgagccgcccgcccggcccgccgtgccctccccccgctcgggccccgagccccgcgccccgcgcctgccccggcgcaccacgtgtccgtgctgcccttcgccgcccgcccggggctcgccgagtcggcgcccacaaagatttggtttccctctgccccggcggttgtaatcttaaaccgccggagcccgaggcctatatttatagagaaacgcgtgtccccgaggccgccgtgggcagcgtccggtcgcctcttaaaggatttttacccttcggaaggggattccccgtttaatttttttcctactttgattttttgaaatttggagcttcgcaccaggaccgcggagaagtgcaaagtcgcggggagggccgtattgtgcggagagccttttgtctgcggtgctgcggccgtgggagccggcccccgcctcccgtttccgtcccgtctccaagcccgccgactccagctcgtcctcgccgcgccggtgccacctgtgagccgcggcgcgggcccgggctccgaaggcgcccctttgtcctgcggcgggcccgataagaagtcctcctggcggggctcggggtggtggggggcggggagatgaacgctgcggccagcagctaccccatggcctccctgtacgtgggcgacctgcattcggacgtcaccgaggccatgctgtacgaaaagttcagccccgcggggcctgtgctgtccatccgggtctgccgcgatatgatcacccgccgctccctgggctatgcctacgtcaacttccagcagccggccgacgctgagcgggctttggacaccatgaactttgatgtgattaagggaaagccaatccgcatcatgtggtctcagagggatccctctttgagaaaatctggtgtgggaaacgtcttcatcaagaacctggacaaatctatagataacaaggcactttatgatactttttctgcttttggaaacatactgtcctgcaaggtggtgtgtgatgagaacggctctaagggttatgcctttgtccacttcgagacccaagaggctgccgacaaggccatcgagaagatgaatggcatgctcctcaatgaccgcaaagtatttgtgggcagattcaagtctcgcaaagagcgggaagctgagcttggagccaaagccaaggaattcaccaatgtttatatcaaaaactttggggaagaggtggatgatgagagtctgaaagagctattcagtcagtttggtaagaccctaagtgtcaaggtgatgagagatcccaatgggaaatccaaaggctttggctttgtgagttacgaaaaacacgaggatgccaataaggctgtggaagagatgaatggaaaagaaataagtggtaaaatcatatttgtaggccgtgcacaaaagaaagtagaacggcaggcagagttaaaacggaaatttgaacagttgaaacaggagagaattagtcgatatcagggggtgaatctctacattaagaacttggatgacactattgatgatgagaaattaaggaaagaattttctccttttggatcaattaccagtgctaaggtaatgctggaggatggaagaagcaaagggtttggcttcgtctgcttctcatctcctgaagaagcaaccaaagcagtcactgagatgaatggacgcattgtgggctccaagccactatatgttgccctggcccagaggaaggaagagagaaaggctcacctgaccaaccagtatatgcaacgagtggctggaatgagagcacttcctgccaatgccatcttaaatcagttccagcctgcagcgggtggctactttgtgccagcagtcccacaggctcagggaaggcctccatattatacacctaaccagttagcacagatgaggcctaatccacgctggcagcaaggtgggagacctcaaggcttccaaggaatgccaagtgctatacgccagtctgggcctcgtccaactcttcgccatctggctccaactgggtctgagtgcccggaccgcttggctatggactttggtggggctggtgccgcccagcaagggctgactgacagctgccagtctggaggcgttcccacagctgtgcagaacttagcgccacgcgctgctgttgctgctgctgctccccgggctgttgccccctacaaatacgcctccagtgtccgcagccctcatcctgccatacagcctctgcaggcaccccagcctgcggtccatgtgcaggggcaggagccactgactgcctccatgctggctgcagcacccccccaggaacagaagcagatgctgggagaacgcttgttcccactcatccaaacaatgcattcaaatctggctgggaagatcacgggaatgctgctggagatagacaactctgagctgctgcacatgttagagtcccccgagtctctccgctccaaggtggatgaagctgtagcagttctacaggctcatcatgccaagaaagaagctgcccagaaggtgggcgctgttgctgctgctacctcttagacaaggaaaaaccgattcaaaagccaaataaccccttatggaattcaactcaaggtttgaagacttcctagcttgtcctatggacctcaacaccaaggattacaaattgcaaatttaataggtcattttgtatcaaaaggtcaattatgaagcacctagaatttttcaattatacgaatatgttctttgggttctgctgtggcccagacagtgttaactttttttttattgtgggttttgattttttcccccagaaattggttttatttgatgtacccaagtcttacgtttcccaataaagaaaaaaaatctccataaaa

SEQ ID NO: 22891 - DNA, 2753 bp, Homo sapiens
  source 1..2753: mol_type = unassigned DNA
ctctgccccggcggttgtaatcttaaaccgccggagcccgaggcctatatttatagagaaacgcgtgtccccgaggccgccgtgggcagcgtccggtcgcctcttaaaggatttttacccttcggaaggggattccccgtttaatttttttcctactttgattttttgaaatttggagcttcgcaccaggaccgcggagaagtgcaaagtcgcggggagggccgtattgtgcggagagccttttgtctgcggtgctgcggccgtgggagccggcccccgcctcccgtttccgtcccgtctccaagcccgccgactccagctcgtcctcgccgcgccggtgccacctgtgagccgcggcgcgggcccgggctccgaaggcgcccctttgtcctgcggcgggcccgataagaagtcctcctggcggggctcggggtggtggggggcggggagatgaacgctgcggccagcagctaccccatggcctccctgtacgtgggcgacctgcattcggacgtcaccgaggccatgctgtacgaaaagttcagccccgcggggcctgtgctgtccatccgggtctgccgcgatatgatcacccgccgctccctgggctatgcctacgtcaacttccagcagccggccgacgctgagcgggctttggacaccatgaactttgatgtgattaagggaaagccaatccgcatcatgtggtctcagagggatccctctttgagaaaatctggtgtgggaaacgtcttcatcaagaacctggacaaatctatagataacaaggcactttatgatactttttctgcttttggaaacatactgtcctgcaaggtggtgtgtgatgagaacggctctaagggttatgcctttgtccacttcgagacccaagaggctgccgacaaggccatcgagaagatgaatggcatgctcctcaatgaccgcaaagtatttgtgggcagattcaagtctcgcaaagagcgggaagctgagcttggagccaaagccaaggaattcaccaatgtttatatcaaaaactttggggaagaggtggatgatgagagtctgaaagagctattcagtcagtttggtaagaccctaagtgtcaaggtgatgagagatcccaatgggaaatccaaaggctttggctttgtgagttacgaaaaacacgaggatgccaataaggctgtggaagagatgaatggaaaagaaataagtggtaaaatcatatttgtaggccgtgcacaaaagaaagtagaacggcaggcagagttaaaacggaaatttgaacagttgaaacaggagagaattagtcgatatcagggggtgaatctctacattaagaacttggatgacactattgatgatgagaaattaaggaaagaattttctccttttggatcaattaccagtgctaaggtaatgctggaggatggaagaagcaaagggtttggcttcgtctgcttctcatctcctgaagaagcaaccaaagcagtcactgagatgaatggacgcattgtgggctccaagccactatatgttgccctggcccagaggaaggaagagagaaaggctcacctgaccaaccagtatatgcaacgagtggctggaatgagagcacttcctgccaatgccatcttaaatcagttccagcctgcagcgggtggctactttgtgccagcagtcccacaggctcagggaaggcctccatattatacacctaaccagttagcacagatgaggcctaatccacgctggcagcaaggtgggagacctcaaggcttccaaggaatgccaagtgctatacgccagtctgggcctcgtccaactcttcgccatctggctccaactggtaatgctccggcctctcgtggcctccctactaccactcagagagtcgggtctgagtgcccggaccgcttggctatggactttggtggggctggtgccgcccagcaagggctgactgacagctgccagtctggaggcgttcccacagctgtgcagaacttagcgccacgcgctgctgttgctgctgctgctccccgggctgttgccccctacaaatacgcctccagtgtccgcagccctcatcctgccatacagcctctgcaggcaccccagcctgcggtccatgtgcaggggcaggagccactgactgcctccatgctggctgcagcacccccccaggaacagaagcagatgctgggagaacgcttgttcccactcatccaaacaatgcattcaaatctggctgggaagatcacgggaatgctgctggagatagacaactctgagctgctgcacatgttagagtcccccgagtctctccgctccaaggtggatgaagctgtagcagttctacaggctcatcatgccaagaaagaagctgcccagaaggtgggcgctgttgctgctgctacctcttagacaaggaaaaaccgattcaaaagccaaataaccccttatggaattcaactcaaggtttgaagacttcctagcttgtcctatggacctcaacaccaaggattacaaattgcaaatttaataggtcattttgtatcaaaaggtcaattatgaagcacctagaatttttcaattatacgaatatgttctttgggttctgctgtggcccagacagtgttaactttttttttattgtgggttttgattttttcccccagaaattggttttatttgatgtacccaagtcttacgtttcccaataaagaaaaaaaatctccataaaa

SEQ ID NO: 22892 - DNA, 898 bp, Homo sapiens
  source 1..898: mol_type = unassigned DNA
ctctctccgccccgggtcgctgccgcctccgccgctttcgggcttcgcagcctgaggaaaaaaagagaaaaagataaaaaaaatctgaaaacgcttcaaaatcctgaaaaaaaaaaaggaaaagaaaaaacgaatcctcggagaacccgcggggaagtcactttcgtacgcttccggcctgccccgcgcccgccgccgcagcgcttggcgtccgtcggtctccgtccgtcggtccggggcttcgcaccaggaccgcggagaagtgcaaagtcgcggggagggccgtattgtgcggagagccttttgtctgcggtgctgcggccgtgggagccggcccccgcctcccgtttccgtcccgtctccaagcccgccgactccagctcgtcctcgccgcgccggtgccacctgtgagccgcggcgcgggcccgggctccgaaggcgcccctttgtcctgcggcgggcccgataagaagtcctcctggcggggctcggggtggtggggggcggggagatgaacgctgcggccagcagctaccccatggcctccctgtacgtgggcgacctgcattcggacgtcaccgaggccatgctgtacgaaaagttcagccccgcggggcctgtgctgtccatccgggtctgccgcgatatgatcacccgccgctccctgggctatgcctacgtcaacttccagcagccggccgacgctgagcgggctttggacaccatgaactttgatgtgattaagggaaagccaatccgcatcatgtggtctcagagggatccctctttgagaaaatctggtgtgggaaacgtcttcatcaagaacctggacaaatctatagataacaaggcactttatgatactttttctgcttttggaaacatactgtcctgcaag

SEQ ID NO: 22893 - DNA, 352 bp, Homo sapiens
  source 1..352: mol_type = unassigned DNA
cactcatccaaacaatgcattcaaatctggctgggaagatcacgggaatgctgctggagatagacaactctgagctgctgcacatgttagagtcccccgagtctctccgctccaaggtggatgaagctgtagcagttctacaggctcatcatgccaagaaagaagctgcccagaaggtgggcgctgttgctgctgctacctcttagacaaggaaaaaccgtatgtgtggctattttcatttttgttcctatgagcattgttcctatgagcattgtctttgtggtttgacctgaggttgtatatatgctcactgcttagctctgggaatacaataagtacagttagttacacg

SEQ ID NO: 22894 - DNA, 634 bp, Homo sapiens
  source 1..634: mol_type = unassigned DNA
tctccgccccgggtcgctgccgcctccgccgctttcgggcttcgcagcctgaggaaaaaaagagaaaaagataaaaaaaatctgaaaacgcttcaaaatcctgaaaaaaaaaaaggaaaagaaaaaacgaatcctcggagaacccgcggggaagtcactttcgtacgcttccggcctgccccgcgcccgccgccgcagcgcttggcgtccgtcggtctccgtccgtcggtccggggaaatttggagcttcgcaccaggaccgcggagaagtgcaaagtcgcggggagggccgtattgtgcggagagccttttgtctgcggtgctgcggccgtgggagccggcccccgcctcccgtttccgtcccgtctccaagcccgccgactccagctcgtcctcgccgcgccggtgccacctgtgagccgcggcgcgggcccgggctccgaaggcgcccctttgtcctgcggcgggcccgataagaagtcctcctggcggggctcggggtggtggggggcggggagatgaacgctgcggccagcagctaccccatggcctccctgtacgtgggcgacctgcattcggacgtcaccgaggccatgctgtacgaaaagttcagccccgcggggcctgtgctgtc

SEQ ID NO: 22895 - DNA, 3221 bp, Homo sapiens
  source 1..3221: mol_type = unassigned DNA
gcgcgtttgccagtcagtctctccggacctgcctcgagcctcaggctgctgaaatcaccgcgcctcactcgcctcgacagtgattctgagtctgcttttagcttccttttgcctgccttggctttttctgttcgtgaacagctgtttggcccatagcttagagaaagcagccttttttctcttcaaagagaacctcctcccagtgctcagagagatggggagcggggagcctaatcctgctggcaagaaaaagaagtatctcaaggccgctctgtacgtgggtgacttggacccagatgtcaccgaggacatgctctataagaagttcaggcctgctggccctctgcgattcacccgaatctgccgtgatccggtgacccgcagccccctgggctatgggtatgttaacttccgctttcccgcggatgcagagtgggccttgaacaccatgaattttgatttgattaatggaaaaccattccgccttatgtggtctcagccagatgaccgcttaagaaagtctggagtgggaaatatattcatcaaaaacctggacaaatccatagacaatagggccctgttttacttattttctgcttttgggaacattctgtcctgcaaagtcgtatgcgatgacaacggctctaagggttatgcctatgttcactttgacagcctggccgctgccaatagagccatctggcacatgaatggagtgcggctcaacaaccgccaggtgtatgttggcagattcaaattcccagaagagcgggcggctgaggtcagaaccagggatagagcaactttcaccaatgttttcgttaaaaacattggagacgacatagatgacgaaaaactgaaggaacttttctgtgaatatgggccaactgagagtgttaaagtaataagagatgccagtgggaaatctaaaggctttggatttgtgagatatgagacacacgaggctgcccaaaaggctgtgctagacttgcatggaaagtccatcgatggaaaagtcctctatgtagggcgagcacagaagaaaattgaacgcctggctgagttgaggcggagatttgaacggctgaggttaaaagaaaaaagtcggcccccaggggtgcctatctatattaagaacttggatgagacaatcaatgatgaaaaactgaaggaggaattttcttcctttgggtcaattagtcgggccaaagtgatgatggaagtggggcaaggcaaaggatttggtgtggtctgcttttcctcttttgaagaggctaccaaagcagtggatgagatgaatggccgcatagtgggctccaagcccctgcatgtcaccctgggccaggccaggcgcaggtgctgagaataagaatgctcagtttgtttcagccttagttggtgcctccttagtttgggctcctttgtgataaggggttattttatgctaattcacaagtttttttttgaagtgaattcttttgaaaaaaaaatgcaaaactagaaaactttattcattttagaatagaacataatttctaactgtaaaattgtcattttgtactttttttgatgtaatatccttagaaatctgtagaataaagtgtattcctccacttttttttcctgaacagtcaaggtgaggcaattgattgagtatatttcccttcttatttcagtaatactctattttttttcatgaaaatgtcaacatggttcttctgaatctatcacagtgaaaagttctaacttgtttttgagaagtcagtacagcaggggaaaacatatgtgatgcaattaacatctgcataatttcacttaaaattattatgcaaaaatgaatgttttttcaaaaaatgtgaaatgtattttattttctttatttgtattcttgtttcattttttaatatgttgtgaacatgctacagatttgatagtacttttgactaaatgttgggagtggtcgtattaacttcttgcccaaagaagtaagcatattggtgttttctcaattagtcactgagaaaattaacactttaggcagtggctatttaaagtaggaattgcatcttaaaaacctttcctaagagatttggtatgtgaggatactttcagtaccactcctaccattcatttttctaaattccttagtacatatacttggatcatgttaaattaacaagaaagatgaataactgcgctgaattgcctttacctataaataatttaatattttaccttcgggttttatcaactgtcaatataaaaggcagtactccacagaatgatgttgaaaaacttcttcgaagaacaccttctattaaacttgttatctcttgtaaattattgtgtgtgtccttttgataatattcacaggtgtttcaaaggtaaggaataggttgtctcttggattaagtcatatgcctccagccattatatgagaactgtgaaaccaatatggttttctttatgtcttggctgcttgaaaattaaaaaaaaaaaaggtttgttcaatattgccgttacatttattagcctgtaatttctaaattggagattctctacatttcacttgcagtttcctgttctcctcattgcctgccttccattcatattacacttatttttctattttttgtattacctttttaaaaatatataccagttcaagtccttttaggaagaagaaaatacctaatttatgtaaaatttaaataattacttttttataatatgattcacttatgccacagattcaacattagaatatgttttatctctactgtcagttttattaccttatatacaaatcttcattttcatacatagtacaatgtaaatatataactttgttaacacttttgttagctctttgaccataaaataatgacaataagctgtttctatgtatttgtttatctacaaattacaggtttatccatttgcaaatattttcaaaatggaaatcactgtttatattgattataaacataagacatgctcattgtaaaaaatgtacacaaggcagaaggaagtaaaatttccacagttcagaaataccacaattaatattttcaatgtgtaaatatcttttcataatttttcctacgtatacacaaacattttgaccaaaaatccacactatatgtactgttctgtatttttaattttaaactgaacaataatcatcttttcctgacaataaatatcaatctctatcatca

SEQ ID NO: 22896 - DNA, 1262 bp, Homo sapiens
  source 1..1262: mol_type = unassigned DNA
cagaggaagcgggaagttacttagcacggttccgggtttctcgcgccccgcctgtcccccctccctatcactgctactggctcttggtccctccgttggactgtcctgcggagagaaaccccagcccatcggtctgcgctgggaccgcccgccgcgcatctgcccttcttcgctgactccgccccgcatctggccagacccgcctcgcgtcagagctgacccactcactgcgcgtttgccagtcagtctctccggacctgcctcgagcctcaggctgctgaaatcaccgcgcctcactcgcctggccgctgccaatagagccatctggcacatgaatggagtgcggctcaacaaccgccaggtgtatgttggcagattcaaattcccagaagagcgggcggctgaggtcagaaccagggatagagcaactttcaccaatgttttcgttaaaaacattggagacgacatagatgacgaaaaactgaaggaacttttctgtgaatatgggccaactgagagtgttaaagtaataagagatgccagtgggaaatctaaaggctttggatttgtgagatatgagacacacgaggctgcccaaaaggctgtgctagacttgcatggaaagtccatcgatggaaaagtcctctatgtagggcgagcacagaagaaaattgaacgcctggctgagttgaggcggagatttgaacggctgaggttaaaagaaaaaagtcggcccccaggggtgcctatctatattaagaacttggatgagacaatcaatgatgaaaaactgaaggaggaattttcttcctttgggtcaattagtcgggccaaagtgatgatggaagtggggcaaggcaaaggatttggtgtggtctgcttttcctcttttgaagaggctaccaaagcagtggatgagatgaatggccgcatagtgggctccaagcccctgcatgtcaccctgggccaggccaggcgcaggtgctgagaataagaatgctcagtttgtttcagccttagttggtgcctccttagtttgggctcctttgtgataaggggttattttatgctaattcacaagtttttttttgaagtgaattcttttgaaaaaaaaatgcaaaactagaaaactttattcattttagaatagaacataatttctaactgtaaaattgtcattttgtactttttttgatgtaatatccttagaaatctgtagaataaagtgtattcctccacttttttttcctgaacagtcaagg

SEQ ID NO: 22897 - DNA, 1671 bp, Homo sapiens
  source 1..1671: mol_type = unassigned DNA
agtctctccggacctgcctcgagcctcaggctgctgaaatcaccgcgcctcactcgcctcgacagtgattctgagtctgcttttagcttccttttgcctgccttggctttttctgttcgtgaacagctgtttggcccatagcttagagaaagcagccttttttctcttcaaagagaacctcctcccagtgctcagatgtcaccgaggacatgctctataagaagttcaggcctgctggccctctgcgattcacccgaatctgccgtgatccggtgacccgcagccccctgggctatgggtatgttaacttccgctttcccgcggatgcagagtgggccttgaacaccatgaattttgatttgattaatggaaaaccattccgccttatgtggtctcagccagatgaccgcttaagaaagtctggagtgggaaatatattcatcaaaaacctggacaaatccatagacaatagggccctgttttacttattttctgcttttgggaacattctgtcctgcaaagtcgtatgcgatgacaacggctctaagggttatgcctatgttcactttgacagcctggccgctgccaatagagccatctggcacatgaatggagtgcggctcaacaaccgccaggtgtatgttggcagattcaaattcccagaagagcgggcggctgaggtcagaaccagggatagagcaactttcaccaatgttttcgttaaaaacattggagacgacatagatgacgaaaaactgaaggaacttttctgtgaatatgggccaactgagagtgttaaagtaataagagatgccagtgggaaatctaaaggctttggatttgtgagatatgagacacacgaggctgcccaaaaggctgtgctagacttgcatggaaagtccatcgatggaaaagtcctctatgtagggcgagcacagaagaaaattgaacgcctggctgagttgaggcggagatttgaacggctgaggttaaaagaaaaaagtcggcccccaggggtgcctatctatattaagaacttggatgagacaatcaatgatgaaaaactgaaggaggaattttcttcctttgggtcaattagtcgggccaaagtgatgatggaagtggggcaaggcaaaggatttggtgtggtctgcttttcctcttttgaagaggctaccaaagcagtggatgagatgaatggccgcatagtgggctccaagcccctgcatgtcaccctgggccaggccaggcgcaggtgctgagaataagaatgctcagtttgtttcagccttagttggtgcctccttagtttgggctcctttgtgataaggggttattttatgctaattcacaagtttttttttgaagtgaattcttttgaaaaaaaaatgcaaaactagaaaactttattcattttagaatagaacataatttctaactgtaaaattgtcattttgtactttttttgatgtaatatccttagaaatctgtagaataaagtgtattcctccacttttttttcctgaacagtcaaggtgaggcaattgattgagtatatttcccttcttatttcagtaatactctattttttttcatgaaaatgtcaacatggttcttctgaatctatcacagtgaaaagttctaacttgtttttgagaagtcagtacagca

SEQ ID NO: 22898 - DNA, 2001 bp, Homo sapiens
  source 1..2001: mol_type = unassigned DNA
cgggatttgagaatttggcgcagtgccccgccttagaggtggggccttatttgattgccaagtaatattccccaatggagtactagctcatggtgacgggcaggcagcttgactaatgagtcctcggcgtggccggcgcagctctccaatcgccgggcggcgggccccagtctgagcggcgatggcggcggcggcggcggcggcagcagcagcgggggctgcgggcggtcggggctccgggccggggcggcggcgccatcttgtgcccggggccggtggggaggccggggagggggccccggggggcgcaggggactacgggaacggcctggagtctgaggaactggagcctgaggagctgctgctggagcccgagccggagcccgagcccgaagaggagccgccccggccccgcgcccccccgggagctccgggccctgggcctggttcgggagcccccggcagccaagaggaggaggaggagccgggactggtcgagggtgacccgggggacggcgccattgaggacccggagctggaagctatcaaagctcgagtcagggagatggaggaagaagctgagaagctaaaggagctacagaacgaggtagagaagcagatgaatatgagtccacctccaggcaatgctggcccggtgatcatgtccattgaggagaagatggaggctgatgcccgttccatctatgttggcaatgtggactatggtgcaacagcagaagagctggaagctcactttcatggctgtggttcagtcaaccgtgttaccatactgtgtgacaaatttagtggccatcccaaagggtttgcgtatatagagttctcagacaaagagtcagtgaggacttccttggccttagatgagtccctatttagaggaaggcaaatcaaggtgatcccaaaacgaaccaacagaccaggcatcagcacaacagaccggggttttccacgagcccgctaccgcgcccggaccaccaactacaacagctcccgctctcgattctacagtggttttaacagcaggccccggggtcgcgtctacaggggccgggctagagcgacatcatggtattccccttactaaaaaaagtgtgtattaggaggagagagaggaaaaaaagaggaaagaaggaaaaaaaaaagaattaaaaaaaaaaaaaagaaaaacagaagatgaccttgatggaaaaaaaatattttttaaaaaaaagatatactgtggaaggggggagaatcccataactaactgctgaggagggacctgctttggggagtaggggaaggcccagggagtggggcagggggctgcttattcactctggggattcgccatggacacgtctcaactgcgcaagctgctgcccatgtttccctgccccacttcacccccttgggggctgctcaagggtaggtgggcgtgggtggtaggaggtttttttttttacccagggctctggaaggacaccaaactgttctgcttgttaccttccctccgtcttctcctcgcctttcacagtcccctcctgcctgctcctgtccagccaggtctaccacccaccccacccctcttctccggctccctgcccctccagattgcctggtgatctattttgtttccttttgtgtttctttttctgttttgagtgtctttctttgcaggtttctgtagccggaagatctccgttccgctcccagcggctccagtgtaaattccccttccccctggggaaatgcactaccttgttttggggggtttaggggtgtttttgtttttcagttgttttgtttttttgttttttttttttttcctttgccttttttcccttttatttggagggaatgggaggaagtgggaacagggaggtgggaggtggattttgtttatttttttagctcatttccaggggtgggaatttttttttaatatgtgtcatgaataaagttgtttttgaaaataaaaattgtttggccttttgggtgtaa

SEQ ID NO: 22899 - DNA, 2768 bp, Homo sapiens
  source 1..2768: mol_type = unassigned DNA
agtctgagcggcgatggcggcggcggcggcggcggcagcagcagcgggggctgcgggcggtcggggctccgggccggggcggcggcgccatcttgtgcccggggccggtggggaggccggggagggggccccggggggcgcaggggactacgggaacggcctggagtctgaggaactggagcctgaggagctgctgctggagcccgagccggagcccgagcccgaagaggagccgccccggccccgcgcccccccgggagctccgggccctgggcctggttcgggagcccccggcagccaagaggaggaggaggagccgggactggtcgagggtgacccgggggacggcgccattgaggacccggagctggaagctatcaaagctcgagtcagggagatggaggaagaagctgagaagctaaaggagctacagaacgaggtagagaagcagatgaatatgagtccacctccaggcaatgctggcccggtgatcatgtccattgaggagaagatggaggctgatgcccgttccatctatgttggcaatgtggactatggtgcaacagcagaagagctggaagctcactttcatggctgtggttcagtcaaccgtgttaccatactgtgtgacaaatttagtggccatcccaaagggtttgcgtatatagagttctcagacaaagagtcagtgaggacttccttggccttagatgagtccctatttagaggaaggcaaatcaaggtgatcccaaaacgaaccaacagaccaggcatcagcacaacagaccggggttttccacgagcccgctaccgcgcccggaccaccaactacaacagctcccgctctcgattctacagtggttttaacagcaggccccggggtcgcgtctacaggtcaggatagatgggctgctcctctttcccccgcctcccgtgagccccgtatgcttcctcctctctggtctgaggaacctccctccccccacccctccccgtggtcttcaggaactttgtctcctgcctgtgcaggttgaggaaggtagttgcaggccaggccagaaggccagcctcatcatcttttctgcagtagaaattggtgataagggctgcatccctcccttggttcaaagaggcttccacccccagccttttttttcttgggagttggtggcatttgaaggtgtttgcggacaaaactgggaggaacagggcctccaggcagtgaaagcactgcttggacatttgttacttttttcggagttagggagggattgaagactgaacctcccttggaagaataccagaggctagctagttgatcctccccaacagccttgtgggaggattttgagatacttattctttatttgagccagtcttgcaaggttaacttctcactgggcctagtgtggtgcccaggtttttgccttgcttcacttctgtctctacatttaaatagacgggttaggcatataaaccttggcttttcataagctctacctgcctatccccaggagttagggaggatctatttgtgatggcctagggtttaagagctgtggaggactgaaaactggataaaaagggggtccttttccttgcccctgtctctcactcagatgcgcttctttttcgccactgtttggcagttttctgttaagcccccctccccctgccccagttctccaggtgcgttactatttctgggatcatggggtcagttttaggacacttgaacacttcttttccccccttcccttcacagtaactggggcaggggcctacggggaggggcttgtactgaactatctagtgatcacgttaacacctaactctccttctttcttccaggggccgggctagagcgacatcatggtattccccttactaaaaaaagtgtgtattaggaggagagagaggaaaaaaagaggaaagaaggaaaaaaaaaagaattaaaaaaaaaaaaaagaaaaacagaagatgaccttgatggaaaaaaaatattttttaaaaaaaagatatactgtggaaggggggagaatcccataactaactgctgaggagggacctgctttggggagtaggggaaggcccagggagtggggcagggggctgcttattcactctggggattcgccatggacacgtctcaactgcgcaagctgctgcccatgtttccctgccccacttcacccccttgggggctgctcaagggtaggtgggcgtgggtggtaggaggtttttttttttacccagggctctggaaggacaccaaactgttctgcttgttaccttccctccgtcttctcctcgcctttcacagtcccctcctgcctgctcctgtccagccaggtctaccacccaccccacccctcttctccggctccctgcccctccagattgcctggtgatctattttgtttccttttgtgtttctttttctgttttgagtgtctttctttgcaggtttctgtagccggaagatctccgttccgctcccagcggctccagtgtaaattccccttccccctggggaaatgcactaccttgttttggggggtttaggggtgtttttgtttttcagttgttttgtttttttgttttttttttttttcctttgccttttttcccttttatttggagggaatgggaggaagtgggaacagggaggtgggaggtggattttgtttatttttttagctcatttccaggggtgggaatttttttttaatatgtgtcatgaataaagttgtttttgaaaataaaaa

SEQ ID NO: 22900 - DNA, 4519 bp, Homo sapiens
  source 1..4519: mol_type = unassigned DNA
agcagttctagaacgttgctgtggtagcgctcgggcgccatgttaggacgaaggggaaggaggagaagcgcttaaagcggcgggagcggtgcgggagaggggttggacccagggctgaggcaggcccccccctccctcccgcctcagtggatcatgcccagggcggcagcggcggcggttgcgggggggaagtgactgggcggtgccggcgccggagacgatgccgtttccagttacaacacagggatcacaacaaacacaaccgccacagaagcactatggcattacttctcctatcagcttagcagcccccaaggagactgactgcgtacttacacagaaactaattgagacattgaaaccctttggggtttttgaagaggaagaggaactgcagcgcaggattttaattttgggaaaactaaataacctggtaaaagagtggatacgagaaatcagtgaaagcaagaatcttccacaatctgtaattgaaaatgttggaggaaaaatttttacatttggatcttacagattaggagtgcatacaaaaggtgctgatattgatgcgttgtgtgttgcaccaagacatgttgatcgaagtgactttttcacctcattctatgataagttgaaattacaggaagaagtaaaagatttaagagctgttgaagaggcattcgtaccagttattaaactctgttttgatgggatagagattgatattttgtttgcaagattagcactgcagacaattcctgaagatttggatctacgagatgacagtctgctaaaaaatttagatataagatgtataagaagtcttaacggttgcagggtaaccgatgaaattttacatctagtaccaaacattgacaacttcaggttaactctgagagctatcaaactatgggccaaacgccacaacatctattccaatatattaggtttcctcggtggtgtttcctgggctatgctagtagcaagaacttgccagctttatccaaatgcaatagcatcaactcttgtacataaatttttcttggtattttctaaatgggaatggccaaatccagtgctattgaaacagcctgaagaatgcaatcttaatttgcctgtatgggacccaagggtaaaccccagtgataggtaccatcttatgcctataattacaccagcatacccacaacagaactccacgtacaatgtgtccgtttcaacacggatggtcatggttgaggagtttaaacaaggtcttgctatcacagatgaaattttgctgagtaaggcagagtggtccaaactttttgaagctccaaacttctttcaaaagtacaagcattatattgtacttctagcaagtgcaccaacagaaaaacaacgcctggaatgggtgggcttggtggaatcaaaaatccgaatcctggttggaagcttggagaagaatgaatttattacactggctcatgtgaatccccagtcatttccagcacccaaagaaaatcccgacaaggaagaatttcgcacgatgtgggtgattgggttagtgtttaaaaaaacagaaaactctgaaaacctcagtgttgatctcacctatgatattcagtctttcacagatacagtttataggcaagcaataaacagcaagatgtttgaggtggatatgaaaattgctgcaatgcatgtaaaaagaaagcaactccatcaactactacctaatcatgtgcttcagaaaaagaaaaagcattcaacagaaggtgtcaaattgacagctctcaatgacagcagcctcgacttgtctatggacagtgataacagcatgtctgtgccttcacctactagtgctacgaagaccagtccattgaacagttctggcagctctcagggcagaaacagtcctgctccagctgtaacagcagcatctgtgaccaacatacaggctactgaagtttctgtgccacaagtaaattccagtgaaagctcagggggtacatcgagtgaaagcattcctcaaactgccacacaaccagccatttctccaccaccaaagcctacggtctccagagttgtttcttcaacacgtctggtaaacccaccacctagatcttcaggaaatgcagcaacttcaggaaatgcagcaacaaaaatacctactcctatagtaggagtcaagaggacatcctcacctcataaagaagagagtcccaagaaaaccaaaacagaagaggatgaaacaagtgaagatgctaactgtcttgctttgagtggacatgataaaacagaagcaaaggaacaacttgatacagagacaagtacaactcaatcagaaactattcagacagcggcttctctgttggcctctcagaaaacatccagtacagacctttctgatatccctgctctccctgcaaatcctattcctgttatcaagaattcaataaaactgagattgaatcggtaaaaacaacctcaggggtccataaacaatatctgccaactcaacctgttgtcttcaaatgctaaaaaaggagaatggagggtacaagactagacatgactgaaatggatttgggttttttggtgacctcccttactgggctaatcagcacttgatcggaagtccaggttagtatgtgaagccaggagtactattattattgtgttagcaacagttgcattaactatttcaaaaattactgcctttaaaaaaaacaacctcaagctatatttgtattcataattgacatctggattgggtttatgtttgatgcattgtttggaaaatttgcaatacaaactggcataagaattacttattctgatgatgcacttttatgtatttttcattagaaagtagaactaattttagattttcagcttgatggattttcagtttttcctgaagaattttctttaccattagtcttcaaattggatactgttgtgcagtggtgtactgttatacttcagagaaagggtaagagtacatctagttcagttcctatgaggtagctgtaacccttaaaaatgaaacgtcaactctagggtacatttgacattgaaagaatagttaggaaataacttggttttgatagggtcatgattaagaaatgatatattggttttatttatggaattgttttatagtgcatacaaatcagcgatcagccagcaaatatttttctttgagcttgtgaaagctctgtgttcttttgccttcaatctgttgtcttcaaaacaaacaaacaaaaaaagcttcttgcgcctttccctcccctgttttcttcctttttctttttgcttgtatgcacaaggtaggacttacttcgtaagaaacaaaatgccagtattttcttaagccatgatgtgaaaccaatgaccctgtgaccacatggcacagaacactaaattttggtcccatggctgaaacttgagggtgactaaaagtaatgcctgtgaaacatgatatctatctgggatggccatttgatctctaaaaggaattttgtacactccacagaactcctatctatagtaaaattgattttcagttttaaatgtgggcaaaaaggcattttctccaagattttaaaactaattcttatttttaaatggtttaccaaaatttgtcagtacattttacgtgtagaagcattttaaaaatcatttctagcaagcacttgacatctagtcagctctctactcctttattttgttttatcaaaagattaagagctcctttctttgaataaaataatttctcataattaagcagtagaagatctatcttcacaaagtatgagggatgccagatgttgataaacttactctttctgaatctggacaaagtcgacttaacagatttttctgatgagcatgttttatgaatcctccattgtgctccattctatcacatgtgcatttttcatgttaaactgcaattacttaatctcttcccctatccttctaaattaattttctgaagttggagtgtagtcttttcccccttaggctatgcattaatcgaagctttcttttcaccatgactttataatgtctagtaaacaatatttctacttcccacatctttgctttacacagtcaccttgcccttccttccaccaccgaagaaaaaagatggtcatactaacaggtgaaatgtacaaggtgtctgtgtgttttgtgtagcttcagagttagattgaaattaccaggcacagatttagtcttgtcattttgtttacacattggggaaaacaattcagtttattaaacgtttcatgtaactgcacccaagttttgccaagctggaaacttggaccttttctgtgtagtgactttttaattatagttttcataacctggagatcagactgttgctttcgcatgatgtatgtagtgtctcatgactggagtttgctttgttttatagtatctgtactccttgtatttttcaagagctattttgtaaacagatgatgtatttctccattgaaaacacaataaaaaaaaaacagcacaa

SEQ ID NO: 22901 - DNA, 2601 bp, Homo sapiens
  source 1..2601: mol_type = unassigned DNA
atgttaggacgaaggggaagtgactgggcggtgccggcgccggagacgatgccgtttccagttacaacacagggatcacaacaaacacaaccgccacagaagcactatggcattacttctcctatcagcttagcagcccccaaggagactgactgcgtacttacacagaaactaattgagacattgaaaccctttggggtttttgaagaggaagaggaactgcagcgcaggattttaattttgggaaaactaaataacctggtaaaagagtggatacgagaaatcagtgaaagcaagaatcttccacaatctgtaattgaaaatgttggaggaaaaatttttacatttggatcttacagattaggagtgcatacaaaaggtgctgatattgatgcgttgtgtgttgcaccaagacatgttgatcgaagtgactttttcacctcattctatgataagttgaaattacaggaagaagtaaaagatttaagagctgttgaagaggcattcgtaccagttattaaactctgttttgatgggatagagattgatattttgtttgcaagattagcactgcagacaattcctgaagatttggatctacgagatgacagtctgctaaaaaatttagatataagatgtataagaagtcttaacggttgcagggtaaccgatgaaattttacatctagtaccaaacattgacaacttcaggttaactctgagagctatcaaactatgggccaaacgccacaacatctattccaatatattaggtttcctcggtggtgtttcctgggctatgctagtagcaagaacttgccagctttatccaaatgcaatagcatcaactcttgtacataaatttttcttggtattttctaaatgggaatggccaaatccagtgctattgaaacagcctgaagaatgcaatcttaatttgcctgtatgggacccaagggtaaaccccagtgataggtaccatcttatgcctataattacaccagcatacccacaacagaactccacgtacaatgtgtccgtttcaacacggatggtcatggttgaggagtttaaacaaggtcttgctatcacagatgaaattttgctgagtaaggcagagtggtccaaactttttgaagctccaaacttctttcaaaagtacaagcattatattgtacttctagcaagtgcaccaacagaaaaacaacgcctggaatgggtgggcttggtggaatcaaaaatccgaatcctggttggaagcttggagaagaatgaatttattacactggctcatgtgaatccccagtcatttccagcacccaaagaaaatcccgacaaggaagaatttcgcacgatgtgggtgattgggttagtgtttaaaaaaacagaaaactctgaaaacctcagtgttgatctcacctatgatattcagtctttcacagatacagtttataggcaagcaataaacagcaagatgtttgaggtggatatgaaaattgctgcaatgcatgtaaaaagaaagcaactccatcaactactacctaatcatgtgcttcagaaaaagaaaaagcattcaacagaaggtgtcaaattgacagctctcaatgacagcagcctcgacttgtctatggacagtgataacagcatgtctgtgccttcacctactagtgctacgaagaccagtccattgaacagttctggcagctctcagggcagaaacagtcctgctccagctgtaacagcagcatctgtgaccaacatacaggctactgaagtttctgtgccacaagtaaattccagtgaaagctcagggggtacatcgagtgaaagcattcctcaaactgccacacaaccagccatttctccaccaccaaagcctacggtctccagagttgtttcttcaacacgtctggtaaacccaccacctagatcttcaggaaatgcagcaacttcaggaaatgcagcaacaaaaatacctactcctatagtaggagtcaagaggacatcctcacctcataaagaagagagtcccaagaaaaccaaaacagaagaggaacaacttgatacagagacaagtacaactcaatcagaaactattcagacagcggcttctctgttggcctctcagaaaacatccagtacagacctttctgatatccctgctctccctgcaaatcctattcctgttatcaagaattcaataaaactgagattgaatcggtaaaaacaacctcaggggtccataaacaatatctgccaactcaacctgttgtcttcaaatgctaaaaaaggagaatggagggtacaagactagacatgactgaaatggatttgggttttttggtgacctcccttactgggctaatcagcacttgatcggaagtccaggttagtatgtgaagccaggagtactattattattgtgttagcaacagttgcattaactatttcaaaaattactgcctttaaaaaaaacaacctcaagctatatttgtattcataattgacatctggattgggtttatgtttgatgcattgtttggaaaatttgcaatacaaactggcataagaattacttattctgatgatgcacttttatgta

SEQ ID NO: 22902 - DNA, 3264 bp, Homo sapiens
  source 1..3264: mol_type = unassigned DNA
gctcgggcgccatgttaggacgaaggggaaggaggagaagcgcttaaagcggcgggagcggtgcgggagaggggttggacccagggctgaggcaggcccccccctccctcccgcctcagtggatcatgcccagggcggcagcggcggcggttgcgggggggaagtgactgggcggtgccggcgccggagacgatgccgtttccagttacaacacagggatcacaacaaacacaaccgccacagaagcactatggcattacttctcctatcagcttagcagcccccaaggagactgactgcgtacttacacagaaactaattgagacattgaaaccctttggggtttttgaagaggaagaggaactgcagcgcaggattttaattttgggaaaactaaataacctggtaaaagagtggatacgagaaatcagtgaaagcaagaatcttccacaatctgtaattgaaaatgttggaggaaaaatttttacatttggatcttacagattaggagtgcatacaaaaggtgctgatattgatgcgttgtgtgttgcaccaagacatgttgatcgaagtgactttttcacctcattctatgataagttgaaattacaggaagaagtaaaagatttaagagctgttgaagaggcattcgtaccagttattaaactctgttttgatgggatagagattgatattttgtttgcaagattagcactgcagacaattcctgaagatttggatctacgagatgacagtctgctaaaaaatttagatataagatgtataagaagtcttaacggttgcagggtaaccgatgaaattttacatctagtaccaaacattgacaacttcaggttaactctgagagctatcaaactatgggccaaacgccacaacatctattccaatatattaggtttcctcggtggtgtttcctgggctatgctagtagcaagaacttgccagctttatccaaatgcaatagcatcaactcttgtacataaatttttcttggtattttctaaatggtatgtgtttagattatattaaaataaaattgattgtagacactgaagtttagtcttatttctatgacatttctcagcttggtttcagattcaaattttagttcatgatgtagtcatgtaggcagccttggagatcacattgtgtataaaatggcaaactgaaactattttttttccctagtttggccaggatagtaaggcagattctatttgtacttccttgcataaacttaccctctgaataaactctgaattttagcagctaagatccaatttattgataggttgggaaatcagttactatacttttggataaaacttgtacacactacctctttcactcttttaattctctatctataggccattagtttcttgtgattgttttttttttctttttgctttcagcatttatttggcctaatattaaagatacgaattttcataagaagcttttaaagaataaattaacattaagtgcttcgggacaaaaaaggaatttgagattagtcattaacccagatttttttaagtttcttcgtttcatttccacatatgtcaactatgatttaagaaaaagtagaataaaagattactgccattttatattaattgccttggcccaaaaggtgagggttcttggtttttaatcaaattaagataaatcgtccattcctgttcttatgaactcctgctcctccctctgcaaaagagatgttcttttctagtaattttataaaaattagttatttgagacaatttagagctgtgttcaactggaggaaaaataaaaaaaatttagaaccatgccacacttttcagtacacattctggctgttttgggatttagtagcacttataatcaggtgtgataagattaaagaatgtcagaatttcttttttttttttttttttttttgtttgagacggagtctcactctgtcacccaggctggagtgcagtggcacgatcttggctcactgcaagctctgcctcctggattcatgctattctcctgccttagtctcctgagtagctgggactacaagcgcctgccaccacgcctggctaatttttgtatttttagtagagacgaggtttcactgtgttagccaggatggtctcgatctcctgacctcataatccgcccgcctcggcctcccatagtgctgggattacaggcgtgagccaccgcgtccggctgtcagaatttcttttaatgctacacatatataagcaaataatgtttttaagaagctaaccttgatgttaagagtggcaggtgttctccagtttttacctctttcatatgggaccaaagtagctagtttatggaacacatatgaaaatgtggttatgccaccaagttttactactacacttgtcttaccacttttaagtcatgaattctataattattcatacccctttgcctgtgatcagaagtaacttttaaaattatcacttgactttggatggaactagtataaaggcaggaattttgtctttcagtggagatttattctgttcaaggttgaagtggacacatcattatcttgggatggtacttctttatttaaatagtcctttaaagttctttgagtggcagagaacgtttttggtttcagtctgagaaggctaccaaatggtttaagttcatttcatagttaggagaaaaagattttgagtagtctaatgtcgtcagaaaggattaaaacgttgtatgtaccaagaaggcagaatgaagaaggatcacgttcacaaatgctgtatgtttaacaaaatacgtttagatggtaatatccaatagtcttatcaagtgctacaatctttttaaacagggaatggccaaatccagtgctattgaaacagcctgaagaatgcaatcttaatttgcctgtatgggacccaagggttagtgtattattttttcccctaccaattcacactgtgcaataacaagtaaaaatcatctgcataaactccagggagacttccagccttttacttatgaatggtcatgtccgtattacactttcttttagataacctcaactataattgtcctcaactataattgatgtgagaagcataattatgtaccctgtaaaccacatttaattgtacatagtttttaatacagattttactaacattttaatttattctatatagaactaccttgtaagtcaaagttgtgtgggcatttgtgctttaaaaaaaataaaaggatact

SEQ ID NO: 22903 - DNA, 4262 bp, Homo sapiens
  source 1..4262: mol_type = unassigned DNA
atgttggggctgaggggaaggaggagaagctcctgaagcggcgggcgcgcagcgggagtgggagtggggtcggaccagggcagctagaagccctgcccttccgcctcagcggatcatgacccgggcggcggccgcgaaggtcgcggtggtgggggacgtgccctggcggggcgggcgctgaaagatgatgccgtttccggtgacaacccagggaccaccgcagccggcgccgccgccgaatcgctacggcgtctcctcgcctatcagtctagcggtccccaaggagacggactgcctcctcacccagaggctaatagaaaccctcaggcccttcggggtcttcgaagaggaagaggaactgcagcgcaggattttagttttggaaaaattaaataatctggtaaaggaatggatacgcgaaatcagtgaaagcaagagtcttccccagtctgtaattgaaaacgttggaggaaagatttttacgtttggctcttacagattaggagtacatacgaaaggcgcagatattgacgccttgtgcgttgcaccaagtcatgtggatcgaagcgactttttcacctcattctatgctaaactgaaactacaggaggaagtgaaagatttaagggctgtcgaggaggcatttgtgccagttatcaaactgtgttttgatgggatagagattgatattttatttgcaagattagcactacagactattccagaagatttggacttaagagatgacagtctacttaaaaatttagacattagatgcataagaagccttaatggttgccgggtaaccgatgaaattttacatctagtgccaaacattgacaacttcaggctgactctgagagccatcaaactgtgggccaagtgccacaatatctattccaatatattaggtttcctcggaggtgtttcctgggccatgctagtagcaagaacttgtcagctttatccaaatgcagtagcgtcaactcttgtacggaaattcttcttggtattttcagaatgggaatggccaaacccagtgttactgaaggagcctgaagaacggaatcttaatttgcctgtatgggacccaagagtaaatcccagtgataggtaccatcttatgcctatcatcacaccagcatacccacagcagaactccacatacaacgtgtctatttcaaccaggatggtcatgattgaggagtttaaacaggggcttgctatcacacacgagattttgctaagtaaggcagagtggtccaaactctttgaagctccaagcttctttcaaaagtacaagcattatattgtacttctggcaagtgcatcaacagaaaaacaacatttagaatgggtgggcttggtggaatcaaagatccgaatcctggttgggagcttggagaagaatgaatttattacactggcacatgtgaatccacagtcatttccagcacccaaagaaaatcctgatatggaagaatttcgtacaatgtgggtgattgggttagggctaaaaaagccagataattctgaaattctcagcattgatctcacctatgatatccagtctttcacagatactgtttataggcaagcagtgaatagtaagatgtttgagatgggtatgaaaattactgcaatgcatttaagaagaaaggaacttcaccagctgctgcctcatcatgtgcttcaggacaagaaagcacactcaacagaaggtagaagattgacagatttgaacgacagcagctttgacttgtctgcaggctgtgaaaacagcatgtctgtgccttcatctactagcactatgaagacaggcccattgattagcagttctcagggtagaaacagtcctgccttggctgtaatgacagcatctgtggctaacatacaggctactgaattttccttgcaacaggtgaataccaatgaaagttcaggggttgcattaaacgaaagtattcctcacgctgtctctcagcctgccatttctccatcaccaaaggccatggtcgccagagttgtttcttcaacatgtctcataagccatccagaccttcaggaaactcagcaacaaacatatctaatcctatagttggagtctagaggatattcttgcctcataaagaagaaaggaccaagaaaaccaaaacggaagaggagaaactcaatacaaagacaagtacaactccattagaaaaattcagacagcatcttctctattggcctctcagggaacatcagtatagatctttccggtatccctgttctccctgcaaatccaattcctgttatcaagaattcagtaaaacaggttgaatggttaaaaacaacctcaagggtccatgaacaatatctgccaactgaacctgttgtcttcaaatactaaggaaggagaatgaggggtacgggactagatatgacttgaaatagattgaggctcatttggtaacttcctttactgagccagtcttgatcagaagtccacattagtatgtgacagctagaggtactgttattaatgtatcagcaacagttacattaactatttcaaaggactactgcccttaaaatgaaaaaacctttcagctatgtttgtacccgtgactgacatctggactggatttatgcttgatgcattgttgggaaaatatgcaatacaaactggtatcagaattccttatactgatgaggcactttatattttttattagaaagtagaactaattttagatttttcaaattggtgaattttatttttccctgaagaggtttcttcactattaatcttaaaattggataccattgtgcagcggtgtactgtacttcagagaaagcataaaagtacatctagctcagtccctatgaggtagctgtaaccctttaaaatgaaatgtcaactttaaggtatgtttttgacatcaaccattagtaggtctttggttttgatggcacactatggagaaaggacacactggttttaatctgtagaactgttttagagtaattagcaatcaaacattttctttgagctatcaaagctccatattctcttgtcctcaatcattagtcctaaaacaaaaaagctttttgcctccctctcttctctttgcctgtatgcacacagtatgcttatgtgtcatttcacaagaaaaaaggaataatattctctaaaccatgatgtgaaactgacaatcctgtggccacatggcacaaaacaccaaatattggttatgatgaaacaccacattttagcaaaactttactaaatgtaatgtctatgagatatgtttctgatcttggatgaccatttgatcactgcatatgagaagttttgttcattccacagaatacctccttataggaaagttaatttccaattgcacacataagcaaaaaggcattttcttcaagaattttaaacacttttatttttaaacgatttatcaaaattcatctctaaattttacatgtagaaacataaaaaagtaatttctagcaagcacttgacatcttactggctttctgctcttttagtctacaaaagatcagcaatactttaagttaaaaaaaatctcataattaagcagtagagcatctatgattaggaaatgtgaggggcaacagatgtgaatgaatgaaagttgagtctttcttaatctagacagcaaacttaacaggctttccaattagccttgctttaacccctcccgtccctcctctaactctgcacttttcatgttaaactgcaattacttaaactcttttcctgtcctgcattaattttccaaagttggaatatagtcatgtccttttatgctgtagagacttttctttcaccattactttctgatatctagtacacagtatttctttttctcacatctttgccgtttcaccacaataataaatcgggtgaagtgtgcacaatatctgtattttgaatggctatggcgttaggttgaaatggccaggcacaaatttagtctggtcattttgtttacacattgggaaaaaaattagtttattaaacattacctgtaactgtgtctgttttaccaagctggaaccttgggactttttatttctaatttttattacctgaatgtcagaccattttttcatgtgatgtacctagtgagtggagtttgctttgttttatggtatctgtactcctggtatattcaagcactgttttgaaaacagatgacttatttctccattaaaaatgcaataaaaataaatggcaaacaagcaaa

SEQ ID NO: 22904 - DNA, 2990 bp, Homo sapiens
  source 1..2990: mol_type = unassigned DNA
gctgtttccggaagtcgcggccggcgtcaccgctgcggctgcctcagctactgccgcagtcgccgcggaattcgattttaagagtaatcttcacaaagtgtaccaggccatagaggaggccgacttcttcgccatcgatggggagttttcaggaatcagtgatggaccttcagtctctgcattaacaaatggttttgacactccagaagagaggtatcagaagcttaaaaagcattccatggactttttgctatttcagtttggcctttgcacttttaagtatgactacacagattcaaagtatataacgaagtcatttaacttctatgttttcccgaaacccttcaatagatcctcaccagatgtcaaatttgtttgtcagagctccagcattgactttctagcaagccagggatttgattttaataaagtttttcgaaatggaattccatatttaaatcaggaagaagaaagacagttaagagagcagtatgatgaaaaacgttcacaggcgaatggtgcaggagctctgtcctatgtatctcctaacacttcaaaatgtcctgtcacgattcctgaggatcaaaagaagtttattgaccaagtggtagagaaaatagaggatttattacaaagtgaagaaaacaagaacttggatttagagccatgtaccgggttccaaagaaaactaatttatcagactttgagctggaagtatccgaaaggcattcatgttgagactttagaaactgaaaagaaggagcgatatatagttatcagcaaagtagatgaagaagaacgcaaaagaagagagcagcagaaacatgccaaagaacaggaggagctgaatgatgctgtgggattttctagagtcattcacgccattgctaattcgggaaaacttgttattggacacaatatgctcttggacgtcatgcacacagttcatcagttctactgccctctgcctgcggacttaagtgagtttaaagagatgacaacatgtgttttccccagactcttggatactaaattgatggccagcacacaaccttttaaggatatcattaacaacacatcccttgcggaattggaaaagcggttaaaagagacacctttcaaccctcctaaagttgaaagtgccgaaggttttccaagttatgacacagcctctgaacaactccacgaggcaggctacgatgcctacatcacagggctgtgcttcatctccatggccaattacctaggttcttttctcagccctccaaaaattcatgtgtctgccagatcaaaactcattgaacctttttttaacaagttatttcttatgagggtcatggatatcccctatctaaacttggaaggaccagacttgcagcctaaacgtgatcatgttctccatgtgacattccccaaagaatggaaaaccagcgacctttaccagcttttcagtgcctttggtaacattcagatatcctggattgatgacacatcagcatttgtttcccttagccagcccgagcaagtaaagattgctgtcaataccagcaaatatgcagaaagctatcggatccaaacctatgctgaatatatggggagaaaacaggaagagaagcagatcaaaagaaagtggactgaagatagctggaaggaggctgacagcaaacggttaaacccccagtgcataccctacaccctgcagaatcactattaccgcaacaatagttttacagctcccagcacagtaggaaagagaaatttgagtcctagtcaagaggaagctggcctggaggacggagtgtcaggggagatttccgacactgagcttgagcagaccgattcctgtgcagagcccctctcagagggaaggaaaaaggccaagaaattaaaaagaatgaagaaggagctttctccagcaggaagcatctcgaagaacagccctgccacactctttgaagttcctgacacatggtaaccaagacctgagggcagcaaaccgctggtgctgtcgctgtgagcaagagccggctggcacatttggaagccgcactgtatttaacttaatcaaatgtggtatgggaggggttggaaaccaagttgtctcctgggggggagaaaacaggttttatttttgtggctgtggttttttcccctttttaatctaactgcctgttgacattgacactcatcacggttgtaggctgtcatgaatgtgtacgtgcttaaccagtgaattccgtgttgctcttgtgaggcctttcctgtcatgacccagtgtgcttaagaacctgcctgatggggagtgtcggctgtgaaatctgcaaaaagagctgacattccagctgctgtgatcatgaatttgggggtgtactgtcctgcctgtgcatcttctcgcactgagattttgaggcagttgcagccctcggttagtctcccagtggaaaaatcggttgtgcctccctgcttcccaccatagctgcctgaaaacatgacgctctcaagcttgtccttccttcaggaagatgtccactcatgcccacccatgagagggcttgccgtatgccctggcctttgggcatatttatgtagagttcctttctcctaagacgtgagtttctcatgggggatgtacgagtaaaaaggttaacttctgttcttatgcgtggcgctgtgttcactttccagagtctctgttcgtttgtttggatggcggtctcggggtacggcagcgtgtgtgcgtacgtgtctgtgtgtgtgtgtgtgtgtgtgtgtgtgtgtgtgtgtgtgtgtgtgtgaaatcgtgcaaatctacaacatgtcccagcccattctccgttgaaacagatcacagcaacgacaaacgctcatggcgctgctttgctccacccgcttcagatagatcattgttagatatttcacatttttgtatggtggaaataaaaatgaaaaatgtatttccaaaagatgaaaattaaaaacattttcatagg

SEQ ID NO: 22905 - DNA, 2360 bp, Homo sapiens
  source 1..2360: mol_type = unassigned DNA
tttccggaagtcgcggccggcgtcaccgctgcggctgcctcagctactgccgcagtcgccgcggaattcggcgagtagaaccgctgaggcgggcgcgggcccgggtggggccaaggttccggccactctgcagaatggagataatcaggagcaattttaagagtaatcttcacaaagtgtaccaggccatagaggaggccgacttcttcgccatcgatggggagttttcaggaatcagtgatggaccttcagtctctgcattaacaaatggttttgacactccagaagagagatcctcaccagatgtcaaatttgtttgtcagagctccagcattgactttctagcaagccagggatttgattttaataaagtttttcgaaatggaattccatatttaaatcaggaagaagaaagacagttaagagagcagtatgatgaaaaacgttcacaggcgaatggtgcaggagctctgtcctatgtatctcctaacacttcaaaatgtcctgtcacgattcctgaggatcaaaagaagtttattgaccaagtggtagagaaaatagaggatttattacaaagtgaagaaaacaagaacttggatttagagccatgtaccgggttccaaagaaaactaatttatcagactttgagctggaagtatccgaaaggcattcatgttgagactttagaaactgaaaagaaggagcgatatatagttatcagcaaagtagatgaagaagaacgcaaaagaagagagcagcagaaacatgccaaagaacaggaggagctgaatgatgctgtgggattttctagagtcattcacgccattgctaattcgggaaaacttgttattggacacaatatgctcttggacgtcatgcacacagttcatcagttctactgccctctgcctgcggacttaagtgagtttaaagagatgacaacatgtgttttccccagactcttggatactaaattgatggccagcacacaaccttttaaggatatcattaacaacacatcccttgcggaattggaaaagcggttaaaagagacacctttcaaccctcctaaagttgaaagtgccgaaggttttccaagttatgacacagcctctgaacaactccacgaggcaggctacgatgcctacatcacagggctgtgcttcatctccatggccaattacctaggttcttttctcagccctccaaaaattcatgtgtctgccagatcaaaactcattgaacctttttttaacaagttatttcttatgagggtcatggatatcccctatctaaacttggaaggaccagacttgcagcctaaacgtgatcatgttctccatgtgacattccccaaagaatggaaaaccagcgacctttaccagcttttcagtgcctttggtaacattcagatatcctggattgatgacacatcagcatttgtttcccttagccagcccgagcaagtaaagattgctgtcaataccagcaaatatgcagaaagctatcggatccaaacctatgctgaatatatggggagaaaacaggaagagaagcagatcaaaagaaagtggactgaagatagctggaaggaggctgacagcaaacggttaaacccccagtgcataccctacaccctgcagaatcactattaccgcaacaatagttttacagctcccagcacagtaggaaagagaaatttgagtcctagtcaagaggaagctggcctggaggacggagtgtcaggggagatttccgacactgagcttgagcagaccgattcctgtgcagagcccctctcagagggaaggaaaaaggccaagaaattaaaaagaatgaagaaggagctttctccagcaggaagcatctcgaagaacagccctgccacactctttgaagttcctgacacatggtaaccaagacctgagggcagcaaaccgctggtgctgtcgctgtgagcaagagccggctggcacatttggaagccgcactgtatttaacttaatcaaatgtggtatgggaggggttggaaaccaagttgtctcctgggggggagaaaacaggttttatttttgtggctgtggttttttcccctttttaatctaactgcctgttgacattgacactcatcacggttgtaggctgtcatgaatgtgtacgtgcttaaccagtgaattccgtgttgctcttgtgaggcctttcctgtcatgacccagtgtgcttaagaacctgcctgatggggagtgtcggctgtgaaatctgcaaaaagagctgacattccagctgctgtgatcatgaatttgggggtgtactgtcctgcctgtgcatcttctcgcactgagattttgaggcagttgcag

SEQ ID NO: 22906 - DNA, 3077 bp, Homo sapiens
  source 1..3077: mol_type = unassigned DNA
gcgcgctgtttccggaagtcgcggccggcgtcaccgctgcggctgcctcagctactgccgcagtcgccgcggaattcggcgagtagaaccgctgaggcgggcgcgggcccgggtggggccaaggttccggccactctgcagaatggagataatcaggagcaattttaagagtaatcttcacaaagtgtaccaggccatagaggaggccgacttcttcgccatcgatggggagttttcaggaatcagtgatggaccttcagtctctgcattaacaaatggttttgacactccagaagagaggtatcagaagcttaaaaagcattccatggactttttgctatttcagtttggcctttgcacttttaagtatgactacacagattcaaagtatataacgaagtcatttaacttctatgttttcccgaaacccttcaatagatcctcaccagatgtcaaatttgtttgtcagagctccagcattgactttctagcaagccagggatttgattttaataaagtttttcgaaatggaattccatatttaaatcaggaagaagaaagacagttaagagagcagtatgatgaaaaacgttcacaggcgaatggtgcaggagctctgtcctatgtatctcctaacacttcaaaatgtcctgtcacgattcctgaggatcaaaagaagtttattgaccaagtggtagagaaaatagaggatttattacaaagtgaagaaaacaagaacttggatttagagccatgtaccgggttccaaagaaaactaatttatcagactttgagctggaagtatccgaaaggcattcatgttgagactttagaaactgaaaagaaggagcgatatatagttatcagcaaagtagatgaagaagaacgcaaaagaagagagcagcagaaacatgccaaagaacaggaggagctgaatgatgctgtgggattttctagagtcattcacgccattgctaattcgggaaaacttgttattggacacaatatgctcttggacgtcatgcacacagttcatcagttctactgccctctgcctgcggacttaagtgagtttaaagagatgacaacatgtgttttccccagactcttggatactaaattgatggccagcacacaaccttttaaggatatcattaacaacacatcccttgcggaattggaaaagcggttaaaagagacacctttcaaccctcctaaagttgaaagtgccgaaggttttccaagttatgacacagcctctgaacaactccacgaggcaggctacgatgcctacatcacagggctgtgcttcatctccatggccaattacctaggttcttttctcagccctccaaaaattcatgtgtctgccagatcaaaactcattgaacctttttttaacaagttatttcttatgagggtcatggatatcccctatctaaacttggaaggaccagacttgcagcctaaacgtgatcatgttctccatgtgacattccccaaagaatggaaaaccagcgacctttaccagcttttcagtgcctttggtaacattcagatatcctggattgatgacacatcagcatttgtttcccttagccagcccgagcaagtaaagattgctgtcaataccagcaaatatgcagaaagctatcggatccaaacctatgctgaatatatggggagaaaacaggaagagaagcagatcaaaagaaagtggactgaagatagctggaaggaggctgacagcaaacggttaaacccccagtgcataccctacaccctgcagaatcactattaccgcaacaatagttttacagctcccagcacagtaggaaagagaaatttgagtcctagtcaagaggaagctggcctggaggacggagtgtcaggggagatttccgacactgagcttgagcagaccgattcctgtgcagagcccctctcagagggaaggaaaaaggccaagaaattaaaaagaatgaagaaggagctttctccagcaggaagcatctcgaagaacagccctgccacactctttgaagttcctgacacatggtaaccaagacctgagggcagcaaaccgctggtgctgtcgctgtgagcaagagccggctggcacatttggaagccgcactgtatttaacttaatcaaatgtggtatgggaggggttggaaaccaagttgtctcctgggggggagaaaacaggttttatttttgtggctgtggttttttcccctttttaatctaactgcctgttgacattgacactcatcacggttgtaggctgtcatgaatgtgtacgtgcttaaccagtgaattccgtgttgctcttgtgaggcctttcctgtcatgacccagtgtgcttaagaacctgcctgatggggagtgtcggctgtgaaatctgcaaaaagagctgacattccagctgctgtgatcatgaatttgggggtgtactgtcctgcctgtgcatcttctcgcactgagattttgaggcagttgcagccctcggttagtctcccagtggaaaaatcggttgtgcctccctgcttcccaccatagctgcctgaaaacatgacgctctcaagcttgtccttccttcaggaagatgtccactcatgcccacccatgagagggcttgccgtatgccctggcctttgggcatatttatgtagagttcctttctcctaagacgtgagtttctcatgggggatgtacgagtaaaaaggttaacttctgttcttatgcgtggcgctgtgttcactttccagagtctctgttcgtttgtttggatggcggtctcggggtacggcagcgtgtgtgcgtacgtgtctgtgtgtgtgtgtgtgtgtgtgtgtgtgtgtgtgtgtgtgtgtgtgtgaaatcgtgcaaatctacaacatgtcccagcccattctccgttgaaacagatcacagcaacgacaaacgctcatggcgctgctttgctccacccgcttcagatagatcattgttagatatttcacatttttgtatggtggaaataaaaatgaaaaatgtatttccaaaagatgaaaattaaaaacattttcatagg

SEQ ID NO: 22907 - DNA, 808 bp, Homo sapiens
  source 1..808: mol_type = unassigned DNA
agctactgccgcagtcgccgcggaattcggcgagtagaaccgctgaggcgggcgcgggcccgggtggggccaaggttccggccactctgcagaatggagataatcaggagcaattttaagagtaatcttcacaaagtgtaccaggccatagaggaggccgacttcttcgccatcgatggggagttttcaggaatcagtgatggaccttcagtctctgcattaacaaatggttttgacactccagaagagaggtatcagaagcttaaaaagcattccatggactttttgctatttcagtttggcctttgcacttttaagtatgactacacagattcaaaatcctcaccagatgtcaaatttgtttgtcagagctccagcattgactttctagcaagccagggatttgattttaataaagtttttcgaaatggaattccatatttaaatcaggaagaagaaagacagttaagagagcagtatgatgaaaaacgttcacaggcgaatggtgcaggagctctgtcctatgtatctcctaacacttcaaaatgtcctgtcacgattcctgaggatcaaaagaagtttattgaccaagtggtagagaaaatagaggatttattacaaagtgaagaaaacaagaacttggatttagagccatgtaccgggttccaaagaaaactaatttatcagactttgagctggaaaaggagcgatatatagttatcagcaaagtagatgaagaagaacgcaaaagaagagagcagcagaaacatgccaaagaacaggaggagctgaatgatgctgtgggatt

SEQ ID NO: 22908 - DNA, 1557 bp, Homo sapiens
  source 1..1557: mol_type = unassigned DNA
gtcaccgctgcggctgcctcagctactgccgcagtcgccgcggaattcggcgagtagaaccgctgaggcgggcgcgggcccgggtggggccaaggttccggccactctgcagaatggagataatcaggagcaattttaagagtaatcttcacaaagtgtaccaggccatagaggaggccgacttcttcgccatcgatggggagttttcaggaatcagtgatggaccttcagtctctgcattaacaaatggttttgacactccagaagagaggtatcagaagcttaaaaagaaggagcgatatatagttatcagcaaagtagatgaagaagaacgcaaaagaagagagcagcagaaacatgccaaagaacaggaggagctgaatgatgctgtgggattttctagagtcattcacgccattgctaattcgggaaaacttgttattggacacaatatgctcttggacgtcatgcacacagttcatcagttctactgccctctgcctgcggacttaagtgagtttaaagagatgacaacatgtgttttccccagactcttggatactaaattgatggccagcacacaaccttttaaggatatcattaacaacacatcccttgcggaattggaaaagcggttaaaagagacacctttcaaccctcctaaagttgaaagtgccgaaggttttccaagttatgacacagcctctgaacaactccacgaggcaggctacgatgcctacatcacagggctgtgcttcatctccatggccaattacctaggttcttttctcagccctccaaaaattcatgtgtctgccagatcaaaactcattgaacctttttttaacaagttatttcttatgagggtcatggatatcccctatctaaacttggaaggaccagacttgcagcctaaacgtgatcatgttctccatgtgacattccccaaagaatggaaaaccagcgacctttaccagcttttcagtgcctttggtaacattcagatatcctggattgatgacacatcagcatttgtttcccttagccagcccgagcaagtaaagattgctgtcaataccagcaaatatgcagaaagctatcggatccaaacctatgctgaatatatggggagaaaacaggaagagaagcagatcaaaagaaagtggactgaagatagctggaaggaggctgacagcaaacggttaaacccccagtgcataccctacaccctgcagaatcactattaccgcaacaatagttttacagctcccagcacagtaggaaagagaaatttgagtcctagtcaagaggaagctggcctggaggacggagtgtcaggggagatttccgacactgagcttgagcagaccgattcctgtgcagagcccctctcagagggaaggaaaaaggccaagaaattaaaaagaatgaagaaggagctttctccagcaggaagcatctcgaagaacagccctgccacactctttgaagttcctgacacatggtaaccaagacctgagggcagcaaaccgctggtgctgtcgctgtgagcaagag

SEQ ID NO: 22909 - DNA, 1748 bp, Homo sapiens
  source 1..1748: mol_type = unassigned DNA
gaaagcgggcttcccgccccgcccagaccgccgaggctgccgccggagtcgccaccgccgcgccctcgcccacccgcccgcccgccgctcccggccccgctcgccccctccgccgccgccgcccgcccctgcgactacgctgcggcctcccgcccgctcccgctcgctcccgcggccctcgctcgcctcgcgccggcagttttgggcctacacctcccctccccccgccagccgccaaagacttgaccacgtaacgagcccaactcccccgaacgccgcccgccgctcgccatggatgccggtgtgactgaaagtggactaaatgtgactctcaccattcggcttcttatgcacggaaaggaagtaggaagcatcattgggaagaaaggggagtcggttaagaggatccgcgaggagagtggcgcgcggatcaacatctcggaggggaattgtccggagagaatcatcactctgaccggccccaccaatgccatctttaaggctttcgctatgatcatcgacaagctggaggaagatatcaacagctccatgaccaacagtaccgcggccagcaggcccccggtcaccctgaggctggtggtgccggccacccagtgcggctccctgattgggaaaggcgggtgtaagatcaaagagatccgcgagagtacgggggcgcaggtccaggtggcgggggatatgctgcccaactccaccgagcgggccatcaccatcgctggcgtgccgcagtctgtcaccgagtgtgtcaagcagatttgcctggtcatgctggagacgctctcccagtctccgcaagggagagtcatgaccattccgtaccagcccatgccggccagctccccagtcatctgcgcgggcggccaagatcggtgcagcgacgctgcgggctacccccatgccacccatgacctggagggaccacctctagatgcctactcgattcaaggacaacacaccatttctccgctcgatctggccaagctgaaccaggtggcaagacaacagtctcactttgccatgatgcacggcgggaccggattcgccggaattgactccagctctccagaggtgaaaggctattgggcaagtttggatgcatctactcaaaccacccatgaactcaccattccaaataacttaattggctgcataatcgggcgccaaggcgccaacattaatgagatccgccagatgtccggggcccagatcaaaattgccaacccagtggaaggctcctctggtaggcaggttactatcactggctctgctgccagtattagtctggcccagtatctaatcaatgccaggctttcctctgagaagggcatggggtgcagctagaacagtgtaggttccctcaataacccctttctgctgttctcccatgatccaactgtgtaatttctggtcagtgattccaggttttaaataatttgtaagtgttcagtttctacacaactttatcatccgctaagaatttaaaaatcacattctctgttcagctgttaatgctgggatccatatttagttttataagcttttccctgtttttagttttgttttgggttttttggctcatgaattttatttctgtttgtcgataagaaatgtaagagtggaatgttaataaatttcagtttagttctgtaatgtcaagaatttaagaattaaaaaacggattggttaaaaaatgcttcatatttgaaaaagctgggaattgctgtctt

SEQ ID NO: 22910 - DNA, 3026 bp, Homo sapiens
  source 1..3026: mol_type = unassigned DNA
cccagaccagcagaggcagcagccggagcagccgcagcctgcgccctctcccgcccgcccgccctccgcccgcccgcccgccctccgccgccctccacccgccccggggtctctttcccccttcctcctcctcctcctccacccccccttcctcctccgcccgcccgcggggcccccctcgccttcccgcccgcccctattgttccgcccccggcctcccgcccttccccttcccgcccgctccccttttcccctcagtcgcctcgcgcctgcagtttttggctttcacccccaaccagtgaccaaagacttgaccactcaaagtccagctccccagaacactgctcgacatggacaccggtgtgattgaaggtggattaaatgtcactctcaccatccggctacttatgcatggaaaggaagttggcagtatcatcggaaagaaaggagaatcagttaagaagatgcgcgaggagagtggtgcacgtatcaacatctcagaagggaattgtcctgagagaattatcactttggctggacccactaatgccatcttcaaagcctttgctatgatcattgacaaactggaagaggacataagcagctctatgaccaatagcacagctgccagtagacccccggtcaccctgaggctggtggtccctgctagtcagtgtggctctctcattggaaaaggtggatgcaagatcaaggaaatacgagagagtacaggggctcaggtccaggtggcaggggatatgctacccaactcaactgagcgggccatcactattgctggcattccacaatccatcattgagtgtgtcaaacagatctgcgtggtcatgttggagtcccccccgaagggcgtgaccatcccgtaccggcccaagccgtccagctctccggtcatctttgcaggtggtcaggcctataccattcaaggacagtatgccattccacagccagatttgaccaagctgcaccagttggcaatgcaacagtctcattttcccatgacgcatggcaacaccggattcagtgcaggtttggatgcatctgctcagactacttctcatgaactcaccattccaaacgatttgattggctgcataatcgggcgtcaaggcgccaaaatcaatgagatccgtcagatgtctggggcgcagatcaaaattgcgaacccagtggaaggatctactgataggcaggttaccatcactggatctgctgccagcattagcctggctcaatatctaatcaatgtcaggctttcctcggagacgggtggcatggggagcagctagaacaatgcagattcatccataatccctttctgctgttcaccaccacccatgatccatctgtgtagtttctgaacagtcagcgattccaggttttaaatagtttgtaaattttcagtttctacacactttatcatccactcgtgattttttaattaaagcgttttaattcctttctctgttcagctgttgatgctgagatccatatttagttttataagcttctccctggttttttttttttggctcatgaatttttctgtttgtcatggaaatgtaagagtggaatattaatacatttcagtttagttctgtaatgtcaggaatttttcaaaaaaattaaaagatggactggagctttttctttgtgaatagaaactggatgccacagtgattcatgtgggttttattcctcttgtcttgctgttatttttgtaccttttatccctcaaaggacccttcttgggttttgaatggaagcctttattccggttaagatgttttcttctattttaccacttccatctttttttgtggccctcgatcctatttttccctgactccatgcttggttggcccttataaaacttgtgcccaaaagattgaggattagactttccgaggacttacctgtcctaggggagtaggcaagcacttccactagggagggggtgggggaaaggaatgacacatgacatacatggcatacacattaagcagttgatcatatgtctgactgggttccagtttcttgggaatgttggtccccttgttcaggcttgcatattttaaactaaaaatttcagtctattgtttttagtaacttcatttatagtcctccataacaagttagaaggatgtatctgctaccatttattcctataattttagaaagttggggcttgacattatactcatttagtgagagtagatgcaaaaaagtggaggggcaggagaacttctccagacacctcagataaagtccggagcccaaggctttatcttaaccatgtatggtaccccattcattcatcaagaaaaccctcaacagctgggcctgcatggagtgttatatttcaaggtttttcacaggggttacagtaggacagtccccaccccaatcaggcaccaggataaaagcagggacttaaacagcaccccggttcttcagcctgagccatcacatgctatcagtctcctaacctccccctgggccttaagacagggcttgggcagagaagataaatggtgggacaaaaaaatgagttacattgccacctgagaaacctcagaggggaggacccagccttagcctccctcctcccaagtgcaaaatgtgtaaacagagtaaacggaacagaaaagtgcagtctaagtggttttctctcctgcccctcccaccgcccctccccccaccccctattatttggggataaagaatataaagacaaccctggcttttctattgccttgttgcttgctgaatataaggaatggggtggggcaggaaggggcttgcccttagccacagctctacggctgtgcctcattcatttccacagctgccagtgtccctagagtttatcaggtgaattggtcaggggatcagtctccctcgagcctgacttacggctgggacagccccatctttctgttgattatgtggcgcatatatatatatatatgtatatatatataatttatataaatatttctctatgt

SEQ ID NO: 22911 - DNA, 1614 bp, Homo sapiens
  source 1..1614: mol_type = unassigned DNA
cagaggcagcagccggagcagccgcagcctgcgccctctcccgcccgcccgccctccgcccgcccgcccgccctccgccgccctccacccgccccggggtctctttcccccttcctcctcctcctcctccacccccccttcctcctccgcccgcccgcggggcccccctcgccttcccgcccgcccctattgttccgcccccggcctcccgcccttccccttcccgcccgctccccttttcccctcagtcgcctcgcgcctgcagtttttggctttcacccccaaccagtgaccaaagacttgaccactcaaagtccagctccccagaacactgctcgacatggacaccggtgtgattgaaggtggattaaatgtcactctcaccatccggctacttatgcatggaaaggaagttggcagtatcatcggaaagaaaggagaatcagttaagaagatgcgcgaggagagtggtgcacgtatcaacatctcagaagggaattgtcctgagagaattatcactttggctggacccactaatgccatcttcaaagcctttgctatgatcattgacaaactggaagaggacataagcagctctatgaccaatagcacagctgccagtagacccccggtcaccctgaggctggtggtccctgctagtcagtgtggctctctcattggaaaaggtggatgcaagatcaaggaaatacgagagagtacaggggctcaggtccaggtggcaggggatatgctacccaactcaactgagcgggccatcactattgctggcattccacaatccatcattgagtgtgtcaaacagatctgcgtggtcatgttggagactctctcccagtcccccccgaagggcgtgaccatcccgtaccggcccaagccgtccagctctccggtcatctttgcaggtggtcaggacaggtacagcacaggcagcgacagtgcgagctttccccacaccaccccgtccatgtgcctcaaccctgacctggagggaccacctctagaggcctataccattcaaggacagtatgccattccacagccagatttgaccaagctgcaccagttggcaatgcaacagtctcattttcccatgacgcatggcaacaccggattcagtggcattgaatccagctctccagaggtgaaaggctattggggtttggatgcatctgctcagactacttctcatgaactcaccattccaaacgatttgattggctgcataatcgggcgtcaaggcgccaaaatcaatgagatccgtcagatgtctggggcgcagatcaaaattgcgaacccagtggaaggatctactgataggcaggttaccatcactggatctgctgccagcattagcctggctcaatatctaatcaatgtcaggctttcctcggagacgggtggcatggggagcagctagaacaatgcagattcatccataatccctttctgctgttcaccaccacccatgatccatctgtgtagtttctgaacagtcagcgattccaggttttaaatagtttgtaaattttcagtttctacacactttatcatccactcgtgattttttaattaaagcgttttaattcctttctc

SEQ ID NO: 22912 - DNA, 3077 bp, Homo sapiens
  source 1..3077: mol_type = unassigned DNA
cccagaccagcagaggcagcagccggagcagccgcagcctgcgccctctcccgcccgcccgccctccgcccgcccgcccgccctccgccgccctccacccgccccggggtctctttcccccttcctcctcctcctcctccacccccccttcctcctccgcccgcccgcggggcccccctcgccttcccgcccgcccctattgttccgcccccggcctcccgcccttccccttcccgcccgctccccttttcccctcagtcgcctcgcgcctgcagtttttggctttcacccccaaccagtgaccaaagacttgaccactcaaagtccagctccccagaacactgctcgacatggacaccggtgtgattgaaggtggattaaatgtcactctcaccatccggctacttatgcatggaaaggaagttggcagtatcatcggaaagaaaggagaatcagttaagaagatgcgcgaggagagtggtgcacgtatcaacatctcagaagggaattgtcctgagagaattatcactttggctggacccactaatgccatcttcaaagcctttgctatgatcattgacaaactggaagaggacataagcagctctatgaccaatagcacagctgccagtagacccccggtcaccctgaggctggtggtccctgctagtcagtgtggctctctcattggaaaaggtggatgcaagatcaaggaaatacgagagagtacaggggctcaggtccaggtggcaggggatatgctacccaactcaactgagcgggccatcactattgctggcattccacaatccatcattgagtgtgtcaaacagatctgcgtggtcatgttggagactctctcccagtcccccccgaagggcgtgaccatcccgtaccggcccaagccgtccagctctccggtcatctttgcaggtggtcaggcctataccattcaaggacagtatgccattccacagccagatttgaccaagctgcaccagttggcaatgcaacagtctcattttcccatgacgcatggcaacaccggattcagtggcattgaatccagctctccagaggtgaaaggctattgggcaggtttggatgcatctgctcagactacttctcatgaactcaccattccaaacgatttgattggctgcataatcgggcgtcaaggcgccaaaatcaatgagatccgtcagatgtctggggcgcagatcaaaattgcgaacccagtggaaggatctactgataggcaggttaccatcactggatctgctgccagcattagcctggctcaatatctaatcaatgtcaggctttcctcggagacgggtggcatggggagcagctagaacaatgcagattcatccataatccctttctgctgttcaccaccacccatgatccatctgtgtagtttctgaacagtcagcgattccaggttttaaatagtttgtaaattttcagtttctacacactttatcatccactcgtgattttttaattaaagcgttttaattcctttctctgttcagctgttgatgctgagatccatatttagttttataagcttctccctggttttttttttttggctcatgaatttttctgtttgtcatggaaatgtaagagtggaatattaatacatttcagtttagttctgtaatgtcaggaatttttcaaaaaaattaaaagatggactggagctttttctttgtgaatagaaactggatgccacagtgattcatgtgggttttattcctcttgtcttgctgttatttttgtaccttttatccctcaaaggacccttcttgggttttgaatggaagcctttattccggttaagatgttttcttctattttaccacttccatctttttttgtggccctcgatcctatttttccctgactccatgcttggttggcccttataaaacttgtgcccaaaagattgaggattagactttccgaggacttacctgtcctaggggagtaggcaagcacttccactagggagggggtgggggaaaggaatgacacatgacatacatggcatacacattaagcagttgatcatatgtctgactgggttccagtttcttgggaatgttggtccccttgttcaggcttgcatattttaaactaaaaatttcagtctattgtttttagtaacttcatttatagtcctccataacaagttagaaggatgtatctgctaccatttattcctataattttagaaagttggggcttgacattatactcatttagtgagagtagatgcaaaaaagtggaggggcaggagaacttctccagacacctcagataaagtccggagcccaaggctttatcttaaccatgtatggtaccccattcattcatcaagaaaaccctcaacagctgggcctgcatggagtgttatatttcaaggtttttcacaggggttacagtaggacagtccccaccccaatcaggcaccaggataaaagcagggacttaaacagcaccccggttcttcagcctgagccatcacatgctatcagtctcctaacctccccctgggccttaagacagggcttgggcagagaagataaatggtgggacaaaaaaatgagttacattgccacctgagaaacctcagaggggaggacccagccttagcctccctcctcccaagtgcaaaatgtgtaaacagagtaaacggaacagaaaagtgcagtctaagtggttttctctcctgcccctcccaccgcccctccccccaccccctattatttggggataaagaatataaagacaaccctggcttttctattgccttgttgcttgctgaatataaggaatggggtggggcaggaaggggcttgcccttagccacagctctacggctgtgcctcattcatttccacagctgccagtgtccctagagtttatcaggtgaattggtcaggggatcagtctccctcgagcctgacttacggctgggacagccccatctttctgttgattatgtggcgcatatatatatatatatgtatatatatataatttatataaatatttctctatgt

SEQ ID NO: 22913 - DNA, 1571 bp, Homo sapiens
  source 1..1571: mol_type = unassigned DNA
aagagccgagactgcgaaggagaacgcagcaagcccaggcggcggtggaaaggctggaggacacacctaaacatgtggaatcccaatgccgggcagccagggccaaatccatatccccccaatattgggtgccctggaggttccaatcctgcccacccaccacctattaatccaccctttcccccaggcccctgtcctcctcccccaggagctccccatggcaatccagctttccccccaggtgggccccctcatcctgtgccacagccagggtatccaggatgccaaccgttgggtccctaccctcctccatacccaccgcctgcccctggaatccctcctgtgaatcccttggctcctggcatggttggaccagcagtgatagtagacaagaagatgcagaagaaaatgaagaaagctcataaaaagatgcacaagcaccaaaagcaccacaagtaccacaagcatggcaagtttttggctttcacccccaaccagtgaccaaagacttgaccactcaaagtccagctccccagaacactgctcgacatggacaccggtgtgattgaaggtggattaaatgtcactctcaccatccggctacttatgcatggaaaggaagttggcagtatcatcggaaagaaaggagaatcagttaagaagatgcgcgaggagagtggtgcacgtatcaacatctcagaagggaattgtcctgagagaattatcactttggctggacccactaatgccatcttcaaagcctttgctatgatcattgacaaactggaagaggacataagcagctctatgaccaatagcacagctgccagtagacccccggtcaccctgaggctggtggtccctgctagtcagtgtggctctctcattggaaaaggtggatgcaagatcaaggaaatacgagagagtacaggggctcaggtccaggtggcaggggatatgctacccaactcaactgagcgggccatcactattgctggcattccacaatccatcattgagtgtgtcaaacagatctgcgtggtcatgttggagtcccccccgaagggcgtgaccatcccgtaccggcccaagccgtccagctctccggtcatctttgcaggtggtcaggacaggtacagcacaggcagcgacagtgcgagctttccccacaccaccccgtccatgtgcctcaaccctgacctggagggaccacctctagaggcctataccattcaaggacagtatgccattccacagccagatttgaccaagctgcaccagttggcaatgcaacagtctcattttcccatgacgcatggcaacaccggattcagtggtatggatacctcagtgtttatttctgtaaggtgtagtgcaagagagaggccagtcccaaggtctcagcttgacatctgtttaaaacaaacttcgttatccagcatcctgctggtttaaacttgcctgtctactatggctaagcccaaggaggtaatgtgtttgttaacgtggttttcatttggggtcagttattctaaaagaaaaaaaaagccctggaaggtttgggggtgagg

SEQ ID NO: 22914 - DNA, 1457 bp, Homo sapiens
  source 1..1457: mol_type = unassigned DNA
cttccccttcccgcccgctccccttttcccctcagtcgcctcgcgcctgcagtttttggctttcacccccaaccagtgaccaaagacttgaccactcaaagtccagctccccagaacactgctcgacatggacaccggtgtgattgaaggtggattaaatgtcactctcaccatccggctacttatgcatggaaaggaagttggcagtatcatcggaaagaaaggagaatcagttaagaagatgcgcgaggagagtggtgcacgtatcaacatctcagaagggaattgtcctgagagaattatcactttggctggacccactaatgccatcttcaaagcctttgctatgatcattgacaaactggaagaggacataagcagctctatgaccaatagcacagctgccagtagacccccggtcaccctgaggctggtggtccctgctagtcagtgtggctctctcattggaaaaggtggatgcaagatcaaggaaatacgagagagtacaggggctcaggtccaggtggcaggggatatgctacccaactcaactgagcgggccatcactattgctggcattccacaatccatcattgagtgtgtcaaacagatctgcgtggtcatgttggagtcccccccgaagggcgtgaccatcccgtaccggcccaagccgtccagctctccggtcatctttgcaggtggtcaggacaggtacagcacaggcagcgacagtgcgagctttccccacaccaccccgtccatgtgcctcaaccctgacctggagggaccacctctagaggcctataccattcaaggacagtatgccattccacagccagatttgaccaagctgcaccagttggcaatgcaacagtctcattttcccatgacgcatggcaacaccggattcagtggcattgaatccagctctccagaggtgaaaggctattgggcaggtttggatgcatctgctcagactacttctcatgaactcaccattccaaacgatttgattggctgcataatcgggcgtcaaggcgccaaaatcaatgagatccgtcagatgtctggggcgcagatcaaaattgcgaacccagtggaaggatctactgataggcaggttaccatcactggatctgctgccagcattagcctggctcaatatctaatcaatgtcaggctttcctcggagacgggtggcatggggagcagctagaacaatgcagattcatccataatccctttctgctgttcaccaccacccatgatccatctgtgtagtttctgaacagtcagcgattccaggttttaaatagtttgtaaattttcagtttctacacactttatcatccactcgtgattttttaattaaagcgttttaattcctttctctgttcagctgttgatgctgagatccatatttagttttataagcttctccctggtttttttttttt

SEQ ID NO: 22915 - DNA, 1730 bp, Homo sapiens
  source 1..1730: mol_type = unassigned DNA
cccagaccagcagaggcagcagccggagcagccgcagcctgcgccctctcccgcccgcccgccctccgcccgcccgcccgccctccgccgccctccacccgccccggggtctctttcccccttcctcctcctcctcctccacccccccttcctcctccgcccgcccgcggggcccccctcgccttcccgcccgcccctattgttccgcccccggcctcccgcccttccccttcccgcccgctccccttttcccctcagtcgcctcgcgcctgcagtttttggctttcacccccaaccagtgaccaaagacttgaccactcaaagtccagctccccagaacactgctcgacatggacaccggtgtgattgaaggtggattaaatgtcactctcaccatccggctacttatgcatggaaaggaagttggcagtatcatcggaaagaaaggagaatcagttaagaagatgcgcgaggagagtggtgcacgtatcaacatctcagaagggaattgtcctgagagaattatcactttggctggacccactaatgccatcttcaaagcctttgctatgatcattgacaaactggaagaggacataagcagctctatgaccaatagcacagctgccagtagacccccggtcaccctgaggctggtggtccctgctagtcagtgtggctctctcattggaaaaggtggatgcaagatcaaggaaatacgagagagtacaggggctcaggtccaggtggcaggggatatgctacccaactcaactgagcgggccatcactattgctggcattccacaatccatcattgagtgtgtcaaacagatctgcgtggtcatgttggagtcccccccgaagggcgtgaccatcccgtaccggcccaagccgtccagctctccggtcatctttgcaggtggtcaggcctataccattcaaggacagtatgccattccacagccagatttgaccaagctgcaccagttggcaatgcaacagtctcattttcccatgacgcatggcaacaccggattcagtggcattgaatccagctctccagaggtgaaaggctattgggcaggtttggatgcatctgctcagactacttctcatgaactcaccattccaaacgatttgattggctgcataatcgggcgtcaaggcgccaaaatcaatgagatccgtcagatgtctggggcgcagatcaaaattgcgaacccagtggaaggatctactgataggcaggttaccatcactggatctgctgccagcattagcctggctcaatatctaatcaatgtcaggctttcctcggagacgggtggcatggggagcagctagaacaatgcagattcatccataatccctttctgctgttcaccaccacccatgatccatctgtgtagtttctgaacagtcagcgattccaggttttaaatagtttgtaaattttcagtttctacacactttatcatccactcgtgattttttaattaaagcgttttaattcctttctctgttcagctgttgatgctgagatccatatttagttttataagcttctccctggttttttttttttggctcatgaatttttctgtttgtcatggaaatgtaagagtggaatattaatacatttcagtttagttctgtaatgtcaggaatttttcaaaaaaattaaaagatggactggagctttttctttgtgaatagaaactggatgcc

SEQ ID NO: 22916 - DNA, 1814 bp, Homo sapiens
  source 1..1814: mol_type = unassigned DNA
gcagccgcagcctgcgccctctcccgcccgcccgccctccgcccgcccgcccgccctccgccgccctccacccgccccggggtctctttcccccttcctcctcctcctcctccacccccccttcctcctccgcccgcccgcggggcccccctcgccttcccgcccgcccctattgttccgcccccggcctcccgcccttccccttcccgcccgctccccttttcccctcagtcgcctcgcgcctgcagtttttggctttcacccccaaccagtgaccaaagacttgaccactcaaagtccagctccccagaacactgctcgacatggacaccggtgtgattgaaggtggattaaatgtcactctcaccatccggctacttatgcatggaaaggaagttggcagtatcatcggaaagaaaggagaatcagttaagaagatgcgcgaggagagtggtgcacgtatcaacatctcagaagggaattgtcctgagagaattatcactttggctggacccactaatgccatcttcaaagcctttgctatgatcattgacaaactggaagaggacataagcagctctatgaccaatagcacagctgccagtagacccccggtcaccctgaggctggtggtccctgctagtcagtgtggctctctcattggaaaaggtggatgcaagatcaaggaaatacgagagagtacaggggctcaggtccaggtggcaggggatatgctacccaactcaactgagcgggccatcactattgctggcattccacaatccatcattgagtgtgtcaaacagatctgcgtggtcatgttggagactctctcccagtcccccccgaagggcgtgaccatcccgtaccggcccaagccgtccagctctccggtcatctttgcaggtggtcaggacaggtacagcacaggcagcgacagtgcgagctttccccacaccaccccgtccatgtgcctcaaccctgacctggagggaccacctctagaggcctataccattcaaggacagtatgccattccacagccagatttgaccaagctgcaccagttggcaatgcaacagtctcattttcccatgacgcatggcaacaccggattcagtggcattgaatccagctctccagaggtgaaaggctattgggcaggtttggatgcatctgctcagactacttctcatgaactcaccattccaaacgatttgattggctgcataatcgggcgtcaaggcgccaaaatcaatgagatccgtcagatgtctggggcgcagatcaaaattgcgaacccagtggaaggatctactgataggcaggttaccatcactggatctgctgccagcattagcctggctcaatatctaatcaatgtcaggctttcctcggagacgggtggcatggggagcagctagaacaatgcagattcatccataatccctttctgctgttcaccaccacccatgatccatctgtgtagtttctgaacagtcagcgattccaggttttaaatagtttgtaaattttcagtttctacacactttatcatccactcgtgattttttaattaaagcgttttaattcctttctctgttcagctgttgatgctgagatccatatttagttttataagcttctccctggttttttttttttggctcatgaatttttctgtttgtcatggaaatgtaagagtggaatattaatacatttcagtttagttctgtaatgtcaggaatttttcaaaaaaattaaaagatggactggagctttttctttgtgaatagaaactggatgccacagtg

SEQ ID NO: 22917 - DNA, 1342 bp, Homo sapiens
  source 1..1342: mol_type = unassigned DNA
cgcctgcagtttttggctttcacccccaaccagtgaccaaagacttgaccactcaaagtccagctccccagaacactgctcgacatggacaccggtgtgattgaaggtggattaaatgtcactctcaccatccggctacttatgcatggaaaggaagttggcagtatcatcggaaagaaaggagaatcagttaagaagatgcgcgaggagagtggtgcacgtatcaacatctcagaagggaattgtcctgagagaattatcactttggctggacccactaatgccatcttcaaagcctttgctatgatcattgacaaactggaagaggacataagcagctctatgaccaatagcacagctgccagtagacccccggtcaccctgaggctggtggtccctgctagtcagtgtggctctctcattggaaaaggtggatgcaagatcaaggaaatacgagagagtacaggggctcaggtccaggtggcaggggatatgctacccaactcaactgagcgggccatcactattgctggcattccacaatccatcattgagtgtgtcaaacagatctgcgtggtcatgttggagtcccccccgaagggcgtgaccatcccgtaccggcccaagccgtccagctctccggtcatctttgcaggtggtcaggacaggtacagcacaggcagcgacagtgcgagctttccccacaccaccccgtccatgtgcctcaaccctgacctggagggaccacctctagaggcctataccattcaaggacagtatgccattccacagccagatttgaccaagctgcaccagttggcaatgcaacagtctcattttcccatgacgcatggcaacaccggattcagtggcattgaatccagctctccagaggtgaaaggctattggggtttggatgcatctgctcagactacttctcatgaactcaccattccaaacgatttgattggctgcataatcgggcgtcaaggcgccaaaatcaatgagatccgtcagatgtctggggcgcagatcaaaattgcgaacccagtggaaggatctactgataggcaggttaccatcactggatctgctgccagcattagcctggctcaatatctaatcaatgtcaggctttcctcggagacgggtggcatggggagcagctagaacaatgcagattcatccataatccctttctgctgttcaccaccacccatgatccatctgtgtagtttctgaacagtcagcgattccaggttttaaatagtttgtaaattttcagtttctacacactttatcatccactcgtgattttttaattaaagcgttttaattcctt

SEQ ID NO: 22918 - DNA, 1772 bp, Homo sapiens
  source 1..1772: mol_type = unassigned DNA
ctctctccaggtgacgccttctgggccccatctgtccttcctcacagcaccctcagcaccttaagccaccaccctcagccacaatttggcagaaggatggagtccaaggtctcagaaggtggcctgaatgtgaccctcaccatccgcctgctgatgcatggaaaggtaagaggagccgccattgtctctaaaggagaaactgtgaagaagatgcgtgaggagagtggtgcaaggatcaacatctcagagggaaactgcccagagaggattgtgaccatcacaggccccacagacgccatcttcaaggcctttgccatgatcgcatacaagtttgaggaggatatcatcaactccatgagcaacagccctgccaccagcaagcccccagtgacgctgaggctggtggtgcctgccagccagtgtgggtccctgatcggcaaaggaggctccaagatcaaggagatcagggagtccacaggtgcccaggtgcaggtggctggggacatgctgcccaactccacggagcgagcggtgaccatctcggggaccccagatgccatcatccagtgcgtcaagcagatctgtgtggtcatgctggagtccccaccgaaaggtgccaccattccctaccgcccaaagcccgcctccacccctgtcatttttgcaggtggtcaggcctacacaatccagggacagtatgccatccctcacccggatcagttgaccaagctccaccagttggccatgcagcaaaccccctttcctcccctcggacagaccaaccccgctttccccggtctggacgccagcccaccggccagcactcatgagctcaccattcccaatgatctaataggctgcataattggacgccaagggaccaaaatcaatgaaattcgacagatgtctggagctcagatcaaaatcgccaacgccacggaagggtcctcagagcgtcagatcaccatcacggggaccccggccaacatcagccttgcccagtatctcatcaacgccaggctgacgtccgaggtcaccgggatgggcacgctgtaatcctacccagcacccttcccccgcgtcacccacctgccagagcctaaggcccccggctctcgcactctgtacagcccaccttccctgcctcacagataccaatagagaggttttcttaattaacaaaaggacgtatgccatggagaaacacacccgcgcacacagctgctctctacagaggctgcaggctccgccgagtcccccctcagtgttattttatttatgacttacgctcccgtctgcccatgcaccggcatgcagtggtaattattttagaaatattgttccttggtgtcagcgtagctgtctgtcttaggagctgggtcggcgttccgacagcacttcctgtccgcccttctcctctgccatccagaaccgtccagaactgttgcctgagacccctcctctctcacacagccctgccatgctgactcggtttcccctcagagccattgttgtctgggctcgagtttctgccccaggttgtgtgctggaatcggggggtggctctcctgccacccatggggagcgccaggagaggagggtcatggaggatgttggggctctgaccccaggagtggggtggagggcggagcctgctgggggccctgccttcacagagatgccgcgtgctgggaaggctcttggggtcccctgagcgtcttccagggtggctggagagcacagacgcgccagggagccccctctgtgctcct

SEQ ID NO: 22919 - DNA, 1717 bp, Homo sapiens
  source 1..1717: mol_type = unassigned DNA
cctcagccacaatttggcagaaggatggagtccaaggtctcagaaggtggcctgaatgtgaccctcaccatccgcctgctgatgcatggaaaggaagttggaagcatcatcgggaagaaaggagaaactgtgaagaagatgcgtgaggagagtggtgcaaggatcaacatctcagagggaaactgcccagagaggattgtgaccatcacaggccccacagacgccatcttcaaggcctttgccatgatcgcatacaagtttgaggaggatatcatcaactccatgagcaacagccctgccaccagcaagcccccagtgacgctgaggctggtggtgcctgccagccagtgtgggtccctgatcggcaaaggaggctccaagatcaaggagatcagggagtccacaggtgcccaggtgcaggtggctggggacatgctgcccaactccacggagcgagcggtgaccatctcggggaccccagatgccatcatccagtgcgtcaagcagatctgtgtggtcatgctggaggcctacacaatccagggacagtatgccatccctcacccggatcagttgaccaagctccaccagttggccatgcagcaaaccccctttcctcccctcggacagaccaaccccgctttccccggagaaaagctgcctttacactcctccgaagaagctcaaaatctgatgggccagtcatcaggtctggacgccagcccaccggccagcactcatgagctcaccattcccaatgatctaataggctgcataattggacgccaagggaccaaaatcaatgaaattcgacagatgtctggagctcagatcaaaatcgccaacgccacggaagggtcctcagagcgtcagatcaccatcacggggaccccggccaacatcagccttgcccagtatctcatcaacgccaggctgacgtccgaggtcaccgggatgggcacgctgtaatcctacccagcacccttcccccgcgtcacccacctgccagagcctaaggcccccggctctcgcactctgtacagcccaccttccctgcctcacagataccaatagagaggttttcttaattaacaaaaggacgtatgccatggagaaacacacccgcgcacacagctgctctctacagaggctgcaggctccgccgagtcccccctcagtgttattttatttatgacttacgctcccgtctgcccatgcaccggcatgcagtggtaattattttagaaatattgttccttggtgtcagcgtagctgtctgtcttaggagctgggtcggcgttccgacagcacttcctgtccgcccttctcctctgccatccagaaccgtccagaactgttgcctgagacccctcctctctcacacagccctgccatgctgactcggtttcccctcagagccattgttgtctgggctcgagtttctgccccaggttgtgtgctggaatcggggggtggctctcctgccacccatggggagcgccaggagaggagggtcatggaggatgttggggctctgaccccaggagtggggtggagggcggagcctgctgggggccctgccttcacagagatgccgcgtgctgggaaggctcttggggtcccctgagcgtcttccagggtggctggagagcacagacgcgccagggagccccctctgtgctcctcagagttcaataaatgtcgtggcccctcctca

SEQ ID NO: 22920 - DNA, 1911 bp, Homo sapiens
  source 1..1911: mol_type = unassigned DNA
gtcggtaggctccacgacaaaagtcaacccttctgtaaatcacctgctgtggttatgatgctctgagttcaatacgtctgaacctttgctgtctatggatctgctctaaaccttatagcctgcttatgggggaaggtgacgccttctgggccccatctgtccttcctcacagcaccctcagcaccttaagccaccaccctcagccacaatttggcagaaggatggagtccaaggtctcagaaggtggcctgaatgtgaccctcaccatccgcctgctgatgcatggaaaggaagttggaagcatcatcgggaagaaaggagaaactgtgaagaagatgcgtgaggagagtggtgcaaggatcaacatctcagagggaaactgcccagagaggattgtgaccatcacaggccccacagacgccatcttcaaggcctttgccatgatcgcatacaagtttgaggaggatatcatcaactccatgagcaacagccctgccaccagcaagcccccagtgacgctgaggctggtggtgcctgccagccagtgtgggtccctgatcggcaaaggaggctccaagatcaaggagatcagggagtccacaggtgcccaggtgcaggtggctggggacatgctgcccaactccacggagcgagcggtgaccatctcggggaccccagatgccatcatccagtgcgtcaagcagatctgtgtggtcatgctggaggcctacacaatccagggacagtatgccatccctcacccggatttgaccaagctccaccagttggccatgcagcaaaccccctttcctcccctcggacagaccaaccccgctttccccggagaaaagctgcctttacactcctccgaagaagctcaaaatctgatgggccagtcatcaggtctggacgccagcccaccggccagcactcatgagctcaccattcccaatgatctaataggctgcataattggacgccaagggaccaaaatcaatgaaattcgacagatgtctggagctcagatcaaaatcgccaacgccacggaagggtcctcagagcgtcagatcaccatcacggggaccccggccaacatcagccttgcccagtatctcatcaacgccaggctgacgtccgaggtcaccgggatgggcacgctgtaatcctacccagcacccttcccccgcgtcacccacctgccagagcctaaggcccccggctctcgcactctgtacagcccaccttccctgcctcacagataccaatagagaggttttcttaattaacaaaaggacgtatgccatggagaaacacacccgcgcacacagctgctctctacagaggctgcaggctccgccgagtcccccctcagtgttattttatttatgacttacgctcccgtctgcccatgcaccggcatgcagtggtaattattttagaaatattgttccttggtgtcagcgtagctgtctgtcttaggagctgggtcggcgttccgacagcacttcctgtccgcccttctcctctgccatccagaaccgtccagaactgttgcctgagacccctcctctctcacacagccctgccatgctgactcggtttcccctcagagccattgttgtctgggctcgagtttctgccccaggttgtgtgctggaatcggggggtggctctcctgccacccatggggagcgccaggagaggagggtcatggaggatgttggggctctgaccccaggagtggggtggagggcggagcctgctgggggccctgccttcacagagatgccgcgtgctgggaaggctcttggggtcccctgagcgtcttccagggtggctggagagcacagacgcgccagggagccccctctgtgctcctcagagttcaataaatgtcgtggcccctcctca

SEQ ID NO: 22921 - DNA, 1986 bp, Homo sapiens
  source 1..1986: mol_type = unassigned DNA
gtcggtaggctccacgacaaaagtcaacccttctgtaaatcacctgctgtggttatgatgctctgagttcaatacgtctgaacctttgctgtctatggatctgctctaaaccttatagcctgcttatgggggaaggtgacgccttctgggccccatctgtccttcctcacagcaccctcagcaccttaagccaccaccctcagccacaatttggcagaaggatggagtccaaggtctcagaaggtggcctgaatgtgaccctcaccatccgcctgctgatgcatggaaaggaagttggaagcatcatcgggaagaaaggagaaactgtgaagaagatgcgtgaggagagtggtgcaaggatcaacatctcagagggaaactgcccagagaggattgtgaccatcacaggccccacagacgccatcttcaaggcctttgccatgatcgcatacaagtttgaggaggatatcatcaactccatgagcaacagccctgccaccagcaagcccccagtgacgctgaggctggtggtgcctgccagccagtgtgggtccctgatcggcaaaggaggctccaagatcaaggagatcagggagtccacaggtgcccaggtgcaggtggctggggacatgctgcccaactccacggagcgagcggtgaccatctcggggaccccagatgccatcatccagtgcgtcaagcagatctgtgtggtcatgctggagtccccaccgaaaggtgccaccattccctaccgcccaaagcccgcctccacccctgtcatttttgcaggtggtcaggcctacacaatccagggacagtatgccatccctcacccggatttgaccaagctccaccagttggccatgcagcaaaccccctttcctcccctcggacagaccaaccccgctttccccggagaaaagctgcctttacactcctccgaagaagctcaaaatctgatgggccagtcatcaggtctggacgccagcccaccggccagcactcatgagctcaccattcccaatgatctaataggctgcataattggacgccaagggaccaaaatcaatgaaattcgacagatgtctggagctcagatcaaaatcgccaacgccacggaagggtcctcagagcgtcagatcaccatcacggggaccccggccaacatcagccttgcccagtatctcatcaacgccaggctgacgtccgaggtcaccgggatgggcacgctgtaatcctacccagcacccttcccccgcgtcacccacctgccagagcctaaggcccccggctctcgcactctgtacagcccaccttccctgcctcacagataccaatagagaggttttcttaattaacaaaaggacgtatgccatggagaaacacacccgcgcacacagctgctctctacagaggctgcaggctccgccgagtcccccctcagtgttattttatttatgacttacgctcccgtctgcccatgcaccggcatgcagtggtaattattttagaaatattgttccttggtgtcagcgtagctgtctgtcttaggagctgggtcggcgttccgacagcacttcctgtccgcccttctcctctgccatccagaaccgtccagaactgttgcctgagacccctcctctctcacacagccctgccatgctgactcggtttcccctcagagccattgttgtctgggctcgagtttctgccccaggttgtgtgctggaatcggggggtggctctcctgccacccatggggagcgccaggagaggagggtcatggaggatgttggggctctgaccccaggagtggggtggagggcggagcctgctgggggccctgccttcacagagatgccgcgtgctgggaaggctcttggggtcccctgagcgtcttccagggtggctggagagcacagacgcgccagggagccccctctgtgctcctcagagttcaataaatgtcgtggcccctcctca

SEQ ID NO: 22922 - DNA, 2168 bp, Homo sapiens
  source 1..2168: mol_type = unassigned DNA
gtacacgccatggtgtgggagcagcctgaccatcgggactcaggagcttacagaattttctggggtttcgatactctagaggtttcccctggttacttggcgaatattctatgaaaatgaagagaatgaagtgaagtcagagtcatttactcagaatgcaccctactgtaaatggagaggatgctacttggagtgtgtggtctgtataaatggagaggatgcatatgaagttacaaagggtcggtaggctccacgacaaaagtcaacccttctgtaaatcacctgctgtggttatgatgctctgagttcaatacgtctgaacctttgctgtctatggatctgctctaaaccttatagcctgcttatgggggaaggtgacgccttctgggccccatctgtccttcctcacagcaccctcagcaccttaagccaccaccctcagccacaatttggcagaaggatggagtccaaggtctcagaaggtggcctgaatgtgaccctcaccatccgcctgctgatgcatggaaaggaagttggaagcatcatcgggaagaaaggagaaactgtgaagaagatgcgtgaggagagtggtgcaaggatcaacatctcagagggaaactgcccagagaggattgtgaccatcacaggccccacagacgccatcttcaaggcctttgccatgatcgcatacaagtttgaggaggatatcatcaactccatgagcaacagccctgccaccagcaagcccccagtgacgctgaggctggtggtgcctgccagccagtgtgggtccctgatcggcaaaggaggctccaagatcaaggagatcagggagtccacaggtgcccaggtgcaggtggctggggacatgctgcccaactccacggagcgagcggtgaccatctcggggaccccagatgccatcatccagtgcgtcaagcagatctgtgtggtcatgctggagtccccaccgaaaggtgccaccattccctaccgcccaaagcccgcctccacccctgtcatttttgcaggtggtcaggcctacacaatccagggacagtatgccatccctcacccggatcagttgaccaagctccaccagttggccatgcagcaaaccccctttcctcccctcggacagaccaaccccgctttccccggtctggacgccagcccaccggccagcactcatgagctcaccattcccaatgatctaataggctgcataattggacgccaagggaccaaaatcaatgaaattcgacagatgtctggagctcagatcaaaatcgccaacgccacggaagggtcctcagagcgtcagatcaccatcacggggaccccggccaacatcagccttgcccagtatctcatcaacgccaggctgacgtccgaggtcaccgggatgggcacgctgtaatcctacccagcacccttcccccgcgtcacccacctgccagagcctaaggcccccggctctcgcactctgtacagcccaccttccctgcctcacagataccaatagagaggttttcttaattaacaaaaggacgtatgccatggagaaacacacccgcgcacacagctgctctctacagaggctgcaggctccgccgagtcccccctcagtgttattttatttatgacttacgctcccgtctgcccatgcaccggcatgcagtggtaattattttagaaatattgttccttggtgtcagcgtagctgtctgtcttaggagctgggtcggcgttccgacagcacttcctgtccgcccttctcctctgccatccagaaccgtccagaactgttgcctgagacccctcctctctcacacagccctgccatgctgactcggtttcccctcagagccattgttgtctgggctcgagtttctgccccaggttgtgtgctggaatcggggggtggctctcctgccacccatggggagcgccaggagaggagggtcatggaggatgttggggctctgaccccaggagtggggtggagggcggagcctgctgggggccctgccttcacagagatgccgcgtgctgggaaggctcttggggtcccctgagcgtcttccagggtggctggagagcacagacgcgccagggagccccctctgtgctcctcagagttcaataaatgtcgtggcccctcctca

SEQ ID NO: 22923 - DNA, 2202 bp, Homo sapiens
  source 1..2202: mol_type = unassigned DNA
tcgggctggagcgcctgaagccgcgaccgccgcctcagccgcctcagccgcggtcgccgccgcttcggctgacttaggctccgccgccgcctcctcacccgcctcgccccgaccccgcccgggcctcccggcctctccccgccggcccgcgggctcgccgtccggcgcagggcaggactgtctacaagagagaagctccccacgtggttccgtgtcggtaggctccacgacaaaagtcaacccttctgtaaatcacctgctgtggttatgatgctctgagttcaatacgtctgaacctttgctgtctatggatctgctctaaaccttatagcctgcttatgggggaaggtgacgccttctgggccccatctgtccttcctcacagcaccctcagcaccttaagccaccaccctcagccacaatttggcagaaggatggagtccaaggtctcagaaggtggcctgaatgtgaccctcaccatccgcctgctgatgcatggaaaggaagttggaagcatcatcgggaagaaaggagaaactgtgaagaagatgcgtgaggagagtggtgcaaggatcaacatctcagagggaaactgcccagagaggattgtgaccatcacaggccccacagacgccatcttcaaggcctttgccatgatcgcatacaagtttgaggaggatatcatcaactccatgagcaacagccctgccaccagcaagcccccagtgacgctgaggctggtggtgcctgccagccagtgtgggtccctgatcggcaaaggaggctccaagatcaaggagatcagggagtccacaggtgcccaggtgcaggtggctggggacatgctgcccaactccacggagcgagcggtgaccatctcggggaccccagatgccatcatccagtgcgtcaagcagatctgtgtggtcatgctggagtccccaccgaaaggtgccaccattccctaccgcccaaagcccgcctccacccctgtcatttttgcaggtggtcaggcctacacaatccagggacagtatgccatccctcacccggatcagttgaccaagctccaccagttggccatgcagcaaaccccctttcctcccctcggacagaccaaccccgctttccccggagaaaagctgcctttacactcctccgaagaagctcaaaatctgatgggccagtcatcaggtctggacgccagcccaccggccagcactcatgagctcaccattcccaatgatctaataggctgcataattggacgccaagggaccaaaatcaatgaaattcgacagatgtctggagctcagatcaaaatcgccaacgccacggaagggtcctcagagcgtcagatcaccatcacggggaccccggccaacatcagccttgcccagtatctcatcaacgccaggctgacgtccgaggtcaccgggatgggcacgctgtaatcctacccagcacccttcccccgcgtcacccacctgccagagcctaaggcccccggctctcgcactctgtacagcccaccttccctgcctcacagataccaatagagaggttttcttaattaacaaaaggacgtatgccatggagaaacacacccgcgcacacagctgctctctacagaggctgcaggctccgccgagtcccccctcagtgttattttatttatgacttacgctcccgtctgcccatgcaccggcatgcagtggtaattattttagaaatattgttccttggtgtcagcgtagctgtctgtcttaggagctgggtcggcgttccgacagcacttcctgtccgcccttctcctctgccatccagaaccgtccagaactgttgcctgagacccctcctctctcacacagccctgccatgctgactcggtttcccctcagagccattgttgtctgggctcgagtttctgccccaggttgtgtgctggaatcggggggtggctctcctgccacccatggggagcgccaggagaggagggtcatggaggatgttggggctctgaccccaggagtggggtggagggcggagcctgctgggggccctgccttcacagagatgccgcgtgctgggaaggctcttggggtcccctgagcgtcttccagggtggctggagagcacagacgcgccagggagccccctctgtgctcctcagagttcaataaatgtcgtggcccctcctca

SEQ ID NO: 22924 - DNA, 1988 bp, Homo sapiens
  source 1..1988: mol_type = unassigned DNA
gtcggtaggctccacgacaaaagtcaacccttctgtaaatcacctgctgtggttatgatgctctgagttcaatacgtctgaacctttgctgtctatggatctgctctaaaccttatagcctgcttatgggggaaggtgacgccttctgggccccatctgtccttcctcacagcaccctcagcaccttaagccaccaccctcagccacaatttggcagaaggatggagtccaaggtctcagaaggtggcctgaatgtgaccctcaccatccgcctgctgatgcatggaaaggaagttggaagcatcatcgggaagaaaggagaaactgtgaagaagatgcgtgaggagagtggtgcaaggatcaacatctcagagggaaactgcccagagaggattgtgaccatcacaggccccacagacgccatcttcaaggcctttgccatgatcgcatacaagtttgaggaggatatcatcaactccatgagcaacagccctgccaccagcaagcccccagtgacgctgaggctggtggtgcctgccagccagtgtgggtccctgatcggcaaaggaggctccaagatcaaggagatcagggagtccacaggtgcccaggtgcaggtggctggggacatgctgcccaactccacggagcgagcggtgaccatctcggggaccccagatgccatcatccagtgcgtcaagcagatctgtgtggtcatgctggagtccccaccgaaaggtgccaccattccctaccgcccaaagcccgcctccacccctgtcatttttgcaggtggtcaggcctacacaatccagggacagtatgccatccctcacccggatcagttgaccaagctccaccagttggccatgcagcaaaccccctttcctcccctcggacagaccaaccccgctttccccggagaaaagctgcctttacactcctccgaagaagctcaaaatctgatgggccagtcatcaggtctggacgccagcccaccggccagcactcatgagctcaccattcccaatgatctaataggctgcataattggacgccaagggaccaaaatcaatgaaattcgacagatgtctggagctcagatcaaaatcgccaacgccacggaagggtcctcagagcgtcagatcaccatcacggggaccccggccaacatcagccttgcccagtatctcatcaacgccaggctgacgtccgaggtcaccgggatgggcacgctgtaatcctacccagcacccttcccccgcgtcacccacctgccagagcctaaggcccccggctctcgcactctgtacagcccaccttccctgcctcacagataccaatagagaggttttcttaattaacaaaaggacgtatgccatggagaaacacacccgcgcacacagctgctctctacagaggctgcaggctccgccgagtcccccctcagtgttattttatttatgacttacgctcccgtctgcccatgcaccggcatgcagtggtaattattttagaaatattgttccttggtgtcagcgtagctgtctgtcttaggagctgggtcggcgttccgacagcacttcctgtccgcccttctcctctgccatccagaaccgtccagaactgttgcctgagacccctcctctctcacacagccctgccatgctgactcggtttcccctcagagccattgttgtctgggctcgagtttctgccccaggttgtgtgctggaatcggggggtggctctcctgccacccatggggagcgccaggagaggagggtcatggaggatgttggggctctgaccccaggagtggggtggagggcggagcctgctgggggccctgccttcacagagatgccgcgtgctgggaaggctcttggggtcccctgagcgtcttccagggtggctggagagcacagacgcgccagggagccccctctgtgctcctcagagttcaataaatgtcgtggcccctcctc

SEQ ID NO: 22925 - DNA, 243 bp, Homo sapiens
  source 1..243: mol_type = unassigned DNA
ctctacttcagcccttcatttcctggtagccactgagctgccccatggacactgggcagatggccagtgttagctgggaaggacagcagcagccgcagaggtggcagcaaggccagggcactttgcagacggcatggacgggtgacgccttctgggccccatctgtccttcctcacagcaccctcagcaccttaagccaccaccctcagccacaatttggcagaaggatggagtccaaggtct

SEQ ID NO: 22926 - DNA, 5145 bp, Homo sapiens
  source 1..5145: mol_type = unassigned DNA
ccatgggttccaagagaagaagagctacctccccttccagcagtgtcagcggggactttgatgatgggcaccattctgtgtcaacaccaggcccaagcaggaaaaggaggagactttccaatcttccaactgtagatcctattgccgtgtgccatgaactctataataccatccgagactataaggatgaacagggcagacttctctgtgagctcttcattagggcaccaaagcgaagaaatcaaccagactattatgaagtggtttctcagcccattgacttgatgaaaatccaacagaaactaaaaatggaagagtatgatgatgttaatttgctgactgctgacttccagcttctttttaacaatgcaaagtcctattataagccagattctcctgaatataaagccgcttgcaaactctgggatttgtaccttcgaacaagaaatgagtttgttcagaaaggagaagcagatgacgaagatgatgatgaagatgggcaagacaatcagggcacagtgactgaaggatcttctccagcttacttgaaggagatcctggagcagcttcttgaagccatagttgtagctacaaatccatcaggacgtctcattagcgaactttttcagaaactgccttctaaagtgcaatatccagattattatgcaataattaaggagcctatagatctcaagaccattgcccagaggatacagaatggaagctacaaaagtattcatgcaatggccaaagatatagatctcctcgcaaaaaatgccaaaacttataatgagcctggctctcaagtattcaaggatgcaaattcaattaaaaaaatattttatatgaaaaaggctgaaattgaacatcatgaaatggctaagtcaagtcttcgaatgaggactccatccaacttggctgcagccagactgacaggtccttcacacagtaaaggcagccttggtgaagagagaaatcccactagcaagtattaccgtaataaaagagcagtacaaggaggtcgtttatcagcaattacaatggcacttcaatatggctcagaaagtgaagaagatgctgctttagctgctgcacgctatgaagagggagagtcagaagcagaaagcatcacttcctttatggatgtttcaaatcctttttatcagctttatgacacagttaggagttgtcggaataaccaagggcagctaatagctgaacctttttaccatttgccttcaaagaaaaaataccctgattattaccagcaaattaaaatgcccatatcactacaacagatccgaacaaaactgaagaatcaagaatatgaaactttagatcatttggagtgtgatctgaatttaatgtttgaaaatgccaaacgctataatgtgcccaattcagccatctacaagcgagttctaaaattgcagcaagttatgcaggcaaagaagaaagagcttgccaggagagacgatatcgaggacggagacagcatgatctcttcagccacctctgatactggtagtgccaaaagaaaaagtaaaaagaacataagaaagcagcgaatgaaaatcttattcaatgttgttcttgaagctcgagagccaggttcaggcagaagactttgtgacctatttatggttaaaccatccaaaaaggactatcctgattattataaaatcatcttggagccaatggacttgaaaataattgagcataacatccgcaatgacaaatatgctggtgaagagggaatgatagaagacatgaagctgatgttccggaatgccaggcactataatgaggagggctcccaggtttataatgatgcacatatcctggagaagttactcaaggagaaaaggaaagagctgggcccactgcctgatgatgatgacatggcttctcccaaactcaagctgagtaggaagagtggcatttctcctaaaaaatcaaaatacatgactccaatgcagcagaaactaaatgaggtctatgaagctgtaaagaactatactgataagaggggtcgccgcctcagtgccatatttctgaggcttccctctagatctgagttgcctgactactatctgactattaaaaagcccatggacatggaaaaaattcgaagtcacatgatggccaacaagtaccaagatattgactctatggttgaggactttgtcatgatgtttaataatgcctgtacatacaatgagccggagtctttgatctacaaagatgctcttgttctacacaaagtcctgcttgaaacacgcagagacctggagggagatgaggactctcatgtcccaaatgtgactttgctgattcaagagcttatccacaatctttttgtgtcagtcatgagtcatcaggatgatgagggaagatgctacagcgattctttagcagaaattcctgctgtggatcccaactttcctaacaaaccaccccttacatttgacataattaggaagaatgttgaaaataatcgctaccgtcggcttgatttatttcaagagcatatgtttgaagtattggaacgagcaagaaggatgaatcggacagattcagaaatatatgaagatgcagtagaacttcagcagttttttattaaaattcgtgatgaactctgcaaaaatggagagattcttctttcaccggcactcagctataccacaaaacatttgcataatgatgtggagaaagagagaaaggaaaaattgccaaaagaaatagaggaagataaactaaaacgagaagaagaaaaaagagaagctgaaaagagtgaagattcctctggtgctgcaggcctctcaggcttacatcgcacatacagccaggactgtagctttaaaaacagcatgtaccatgttggagattacgtctatgtggaacctgcagaggccaacctacaaccacatatcgtctgtattgaaagactgtgggaggattcagctggtgaaaaatggttgtatggctgttggttttaccgaccaaatgaaacattccacctggctacacgaaaatttctagaaaaagaagtttttaagagtgactattacaacaaagttccagttagtaaaattctaggcaagtgtgtggtcatgtttgtcaaggaatactttaagttatgcccagaaaacttccgagatgaggatgtttttgtctgtgaatcacggtattctgccaaaaccaaatcttttaagaaaattaaactgtggaccatgcccatcagctcagtcaggtttgtccctcgggatgtgcctctgcctgtggttcgcgtggcctctgtatttgcaaatgcagataaaggtgatgatgagaagaatacagacaactcagaggacagtcgagctgaagacaattttaacttggaaaaggaaaaagaagatgtccctgtggaaatgtccaatggtgaaccaggttgccactactttgagcagctccattacaatgacatgtggctgaaggttggcgactgtgtcttcatcaagtcccatggcctggtgcgtcctcgtgtgggcagaattgaaaaagtatgggttcgagatggagctgcatatttttatggccccatcttcattcacccagaagaaacagagcatgagcccacaaaaatgttctacaaaaaagaagtatttctgagtaatctggaagaaacctgccccatgacatgtattctcggaaagtgtgctgtgttgtcattcaaggacttcctctcctgcaggccaactgaaataccagaaaatgacattctgctttgtgagagccgctacaatgagagcgacaagcagatgaagaaattcaaaggattgaagaggttttcactctctgctaaagtggtagatgatgaaatttactacttcagaaaaccaattgttcctcagaaggagccatcacctttgctggaaaagaagatccagttgctagaagctaaatttgccgagttagaaggtggagatgatgatattgaagagatgggagaagaagatagtgaggtcattgaacctccttctctacctcagcttcagacccccctggccagtgagctggacctcatgccctacacacccccacagtctaccccaaagtctgccaaaggcagtgcaaagaaggaaggctccaaacggaaaatcaacatgagtggctacatcctgttcagcagtgagatgagggctgtgattaaggcccaacacccagactactctttcggggagctcagccgcctggtggggacagaatggagaaatcttgagacagccaagaaagcagaatatgaagagcgggcagctaaagttgctgagcagcaggagagagagcgagcagcacagcaacagcagccgagtgcttctccccgagcaggcacccctgtgggggctctcatgggggtggtgccaccaccaacaccaatggggatgctcaatcagcagttgacacctgttgcaggcatgatgggtggctatccgccaggccttccacctttgcagggcccagttgatggccttgttagcatgggcagcatgcagccacttcaccctggggggcctccaccccaccatcttccgccaggtgtgcctggcctcccgggcatcccaccaccgggtgtgatgaaccaaggagtggcccctatggtagggactccagcaccaggtggaagtccatatggacaacaggtgggagttttggggcctccagggcagcaggcaccacctccatatcccggcccacatccagctggaccccctgtcatacagcagccaacaacacccatgtttgtagctcccccaccaaagacccagcggcttcttcactcagaggcctacctgaaatacattgaaggactcagtgcggagtccaacagcattagcaagtgggatcagacactggcagctcgaagacgcgacgtccatttgtcgaaagaacaggagagccgcctaccctctcactggctgaaaagcaaaggggcccacaccaccatggcagatgccctctggcgccttcgagatttgatgctccgggacaccctcaacattcgccaagcatacaacctagaaaatgtttaatcacatcattacgtttcttttatatagaagcataaagagttgtggatcagtagccattttagttactgggggt

SEQ ID NO: 22927 - DNA, 4825 bp, Homo sapiens
  source 1..4825: mol_type = unassigned DNA
tccatgggttccaagagaagaagagctacctccccttccagcagtgtcagcggggactttgatgatgggcaccattctgtgtcaacaccaggcccaagcaggaaaaggaggagactttccaatcttccaactgtagatcctattgccgtgtgccatgaactctataataccatccgagactataaggatgaacagggcagacttctctgtgagctcttcattagggcaccaaagcgaagaaatcaaccagactattatgaagtggtttctcagcccattgacttgatgaaaatccaacagaaactaaaaatggaagagtatgatgatgttaatttgctgactgctgacttccagcttctttttaacaatgcaaagtcctattataagccagattctcctgaatataaagccgcttgcaaactctgggatttgtaccttcgaacaagaaatgagtttgttcagaaaggagaagcagatgacgaagatgatgatgaagatgggcaagacaatcagggcacagtgactgaaggatcttctccagcttacttgaaggagatcctggagcagcttcttgaagccatagttgtagctacaaatccatcaggacgtctcattagcgaactttttcagaaactgccttctaaagtgcaatatccagattattatgcaataattaaggagcctatagatctcaagaccattgcccagaggatacagaatggaagctacaaaagtattcatgcaatggccaaagatatagatctcctcgcaaaaaatgccaaaacttataatgagcctggctctcaagtattcaaggatgcaaattcaattaaaaaaatattttatatgaaaaaggctgaaattgaacatcatgaaatggctaagtcaagtcttcgaatgaggactccatccaacttggctgcagccagactgacaggtccttcacacagtaaaggcagccttggtgaagagagaaatcccactagcaagtattaccgtaataaaagagcagtacaaggaggtcgtttatcagcaattacaatggcacttcaatatggctcagaaagtgaagaagatgctgctttagctgctgcacgctatgaagagggagagtcagaagcagaaagcatcacttcctttatggatgtttcaaatcctttttatcagctttatgacacagttaggagttgtcggaataaccaagggcagctaatagctgaacctttttaccatttgccttcaaagaaaaaataccctgattattaccagcaaattaaaatgcccatatcactacaacagatccgaacaaaactgaagaatcaagaatatgaaactttagatcatttggagtgtgatctgaatttaatgtttgaaaatgccaaacgctataatgtgcccaattcagccatctacaagcgagttctaaaattgcagcaagttatgcaggcaaagaagaaagagcttgccaggagagacgatatcgaggacggagacagcatgatctcttcagccacctctgatactggtagtgccaaaagaaaaagtaaaaagaacataagaaagcagcgaatgaaaatcttattcaatgttgttcttgaagctcgagagccaggttcaggcagaagactttgtgacctatttatggttaaaccatccaaaaaggactatcctgattattataaaatcatcttggagccaatggacttgaaaataattgagcataacatccgcaatgacaaatatgctggtgaagagggaatgatagaagacatgaagctgatgttccggaatgccaggcactataatgaggagggctcccaggtttataatgatgcacatatcctggagaagttactcaaggagaaaaggaaagagctgggcccactgcctgatgatgatgacatggcttctcccaaactcaagctgagtaggaagagtggcatttctcctaaaaaatcaaaatacatgactccaatgcagcagaaactaaatgaggtctatgaagctgtaaagaactatactgataagaggggtcgccgcctcagtgccatatttctgaggcttccctctagatctgagttgcctgactactatctgactattaaaaagcccatggacatggaaaaaattcgaagtcacatgatggccaacaagtaccaagatattgactctatggttgaggactttgtcatgatgtttaataatgcctgtacatacaatgagccggagtctttgatctacaaagatgctcttgttctacacaaagtcctgcttgaaacacgcagagacctggagggagatgaggactctcatgtcccaaatgtgactttgctgattcaagagcttatccacaatctttttgtgtcagtcatgagtcatcaggatgatgagggaagatgctacagcgattctttagcagaaattcctgctgtggatcccaactttcctaacaaaccaccccttacatttgacataattaggaagaatgttgaaaataatcgctaccgtcggcttgatttatttcaagagcatatgtttgaagtattggaacgagcaagaaggatgaatcggacagattcagaaatatatgaagatgcagtagaacttcagcagttttttattaaaattcgtgatgaactctgcaaaaatggagagattcttctttcaccggcactcagctataccacaaaacatttgcataatgatgtggagaaagagagaaaggaaaaattgccaaaagaaatagaggaagataaactaaaacgagaagaagaaaaaagagaagctgaaaagagtgaagattcctctggtgctgcaggcctctcaggcttacatcgcacatacagccaggactgtagctttaaaaacagcatgtaccatgttggagattacgtctatgtggaacctgcagaggccaacctacaaccacatatcgtctgtattgaaagactgtgggaggattcagctggtgaaaaatggttgtatggctgttggttttaccgaccaaatgaaacattccacctggctacacgaaaatttctagaaaaagaagtttttaagagtgactattacaacaaagttccagttagtaaaattctaggcaagtgtgtggtcatgtttgtcaaggaatactttaagttatgcccagaaaacttccgagatgaggatgtttttgtctgtgaatcacggtattctgccaaaaccaaatcttttaagaaaattaaactgtggaccatgcccatcagctcagtcaggtttgtccctcgggatgtgcctctgcctgtggttcgcgtggcctctgtatttgcaaatgcagataaaggtgatgatgagaagaatacagacaactcagaggacagtcgagctgaagacaattttaacttggaaaaggaaaaagaagatgtccctgtggaaatgtccaatggtgaaccaggttgccactactttgagcagctccattacaatgacatgtggctgaaggttggcgactgtgtcttcatcaagtcccatggcctggtgcgtcctcgtgtgggcagaattgaaaaagtatgggttcgagatggagctgcatatttttatggccccatcttcattcacccagaagaaacagagcatgagcccacaaaaatgttctacaaaaaagaagtatttctgagtaatctggaagaaacctgccccatgacatgtattctcggaaagtgtgctgtgttgtcattcaaggacttcctctcctgcaggccaactgaaataccagaaaatgacattctgctttgtgagagccgctacaatgagagcgacaagcagatgaagaaattcaaaggattgaagaggttttcactctctgctaaagtggtagatgatgaaatttactacttcagaaaaccaattgttcctcagaaggagccatcacctttgctggaaaagaagatccagttgctagaagctaaatttgccgagttagaaggtggagatgatgatattgaagagatgggagaagaagatagtgaggtcattgaacctccttctctacctcagcttcagacccccctggccagtgagctggacctcatgccctacacacccccacagtctaccccaaagtctgccaaaggcagtgcaaagaaggaaggctccaaacggaaaatcaacatgagtggctacatcctgttcagcagtgagatgagggctgtgattaaggcccaacacccagactactctttcggggagctcagccgcctggtggggacagaatggagaaatcttgagacagccaagaaagcagaatatgaaggtgtgatgaaccaaggagtggcccctatggtagggactccagcaccaggtggaagtccatatggacaacaggtgggagttttggggcctccagggcagcaggcaccacctccatatcccggcccacatccagctggaccccctgtcatacagcagccaacaacacccatgtttgtagctcccccaccaaagacccagcggcttcttcactcagaggcctacctgaaatacattgaaggactcagtgcggagtccaacagcattagcaagtgggatcagacactggcagctcgaagacgcgacgtccatttgtcgaaagaacaggagagccgcctaccctctcactggctgaaaagcaaaggggcccacaccaccatggcagatgccctctggcgccttcgagatttgatgctccgggacaccctcaacattcgccaagcatacaacctagaaaatgtttaatcacatcattacgtttcttttatatagaagcataaagagttgtggatcagtagccattttagttactgggggt

SEQ ID NO: 22928 - DNA, 7523 bp, Homo sapiens
  source 1..7523: mol_type = unassigned DNA
tccatgggttccaagagaagaagagctacctccccttccagcagtgtcagcggggactttgatgatgggcaccattctgtgtcaacaccaggcccaagcaggaaaaggaggagactttccaatcttccaactgtagatcctattgccgtgtgccatgaactctataataccatccgagactataaggatgaacagggcagacttctctgtgagctcttcattagggcaccaaagcgaagaaatcaaccagactattatgaagtggtttctcagcccattgacttgatgaaaatccaacagaaactaaaaatggaagagtatgatgatgttaatttgctgactgctgacttccagcttctttttaacaatgcaaagtcctattataagccagattctcctgaatataaagccgcttgcaaactctgggatttgtaccttcgaacaagaaatgagtttgttcagaaaggagaagcagatgacgaagatgatgatgaagatgggcaagacaatcagggcacagtgactgaaggatcttctccagcttacttgaaggagatcctggagcagcttcttgaagccatagttgtagctacaaatccatcaggacgtctcattagcgaactttttcagaaactgccttctaaagtgcaatatccagattattatgcaataattaaggagcctatagatctcaagaccattgcccagaggatacagaatggaagctacaaaagtattcatgcaatggccaaagatatagatctcctcgcaaaaaatgccaaaacttataatgagcctggctctcaagtattcaaggatgcaaattcaattaaaaaaatattttatatgaaaaaggctgaaattgaacatcatgaaatggctaagtcaagtcttcgaatgagtaataaaagagcagtacaaggaggtcgtttatcagcaattacaatggcacttcaatatggctcagaaagtgaagaagatgctgctttagctgctgcacgctatgaagagggagagtcagaagcagaaagcatcacttcctttatggatgtttcaaatcctttttatcagctttatgacacagttaggagttgtcggaataaccaagggcagctaatagctgaacctttttaccatttgccttcaaagaaaaaataccctgattattaccagcaaattaaaatgcccatatcactacaacagatccgaacaaaactgaagaatcaagaatatgaaactttagatcatttggagtgtgatctgaatttaatgtttgaaaatgccaaacgctataatgtgcccaattcagccatctacaagcgagttctaaaattgcagcaagttatgcaggcaaagaagaaagagcttgccaggagagacgatatcgaggacggagacagcatgatctcttcagccacctctgatactggtagtgccaaaagaaaaagtaaaaagaacataagaaagcagcgaatgaaaatcttattcaatgttgttcttgaagctcgagagccaggttcaggcagaagactttgtgacctatttatggttaaaccatccaaaaaggactatcctgattattataaaatcatcttggagccaatggacttgaaaataattgagcataacatccgcaatgacaaatatgctggtgaagagggaatgatagaagacatgaagctgatgttccggaatgccaggcactataatgaggagggctcccaggtttataatgatgcacatatcctggagaagttactcaaggagaaaaggaaagagctgggcccactgcctgatgatgatgacatggcttctcccaaactcaagctgagtaggaagagtggcatttctcctaaaaaatcaaaatacatgactccaatgcagcagaaactaaatgaggtctatgaagctgtaaagaactatactgataagaggggtcgccgcctcagtgccatatttctgaggcttccctctagatctgagttgcctgactactatctgactattaaaaagcccatggacatggaaaaaattcgaagtcacatgatggccaacaagtaccaagatattgactctatggttgaggactttgtcatgatgtttaataatgcctgtacatacaatgagccggagtctttgatctacaaagatgctcttgttctacacaaagtcctgcttgaaacacgcagagacctggagggagatgaggactctcatgtcccaaatgtgactttgctgattcaagagcttatccacaatctttttgtgtcagtcatgagtcatcaggatgatgagggaagatgctacagcgattctttagcagaaattcctgctgtggatcccaactttcctaacaaaccaccccttacatttgacataattaggaagaatgttgaaaataatcgctaccgtcggcttgatttatttcaagagcatatgtttgaagtattggaacgagcaagaaggatgaatcggacagattcagaaatatatgaagatgcagtagaacttcagcagttttttattaaaattcgtgatgaactctgcaaaaatggagagattcttctttcaccggcactcagctataccacaaaacatttgcataatgatgtggagaaagagagaaaggaaaaattgccaaaagaaatagaggaagataaactaaaacgagaagaagaaaaaagagaagctgaaaagagtgaagattcctctggtgctgcaggcctctcaggcttacatcgcacatacagccaggactgtagctttaaaaacagcatgtaccatgttggagattacgtctatgtggaacctgcagaggccaacctacaaccacatatcgtctgtattgaaagactgtgggaggattcagctggtgaaaaatggttgtatggctgttggttttaccgaccaaatgaaacattccacctggctacacgaaaatttctagaaaaagaagtttttaagagtgactattacaacaaagttccagttagtaaaattctaggcaagtgtgtggtcatgtttgtcaaggaatactttaagttatgcccagaaaacttccgagatgaggatgtttttgtctgtgaatcacggtattctgccaaaaccaaatcttttaagaaaattaaactgtggaccatgcccatcagctcagtcaggtttgtccctcgggatgtgcctctgcctgtggttcgcgtggcctctgtatttgcaaatgcagataaaggtgatgatgagaagaatacagacaactcagaggacagtcgagctgaagacaattttaacttggaaaaggaaaaagaagatgtccctgtggaaatgtccaatggtgaaccaggttgccactactttgagcagctccattacaatgacatgtggctgaaggttggcgactgtgtcttcatcaagtcccatggcctggtgcgtcctcgtgtgggcagaattgaaaaagtatgggttcgagatggagctgcatatttttatggccccatcttcattcacccagaagaaacagagcatgagcccacaaaaatgttctacaaaaaagaagtatttctgagtaatctggaagaaacctgccccatgacatgtattctcggaaagtgtgctgtgttgtcattcaaggacttcctctcctgcaggccaactgaaataccagaaaatgacattctgctttgtgagagccgctacaatgagagcgacaagcagatgaagaaattcaaaggattgaagaggttttcactctctgctaaagtggtagatgatgaaatttactacttcagaaaaccaattgttcctcagaaggagccatcacctttgctggaaaagaagatccagttgctagaagctaaatttgccgagttagaaggtggagatgatgatattgaagagatgggagaagaagatagtgaggtcattgaacctccttctctacctcagcttcagacccccctggccagtgagctggacctcatgccctacacacccccacagtctaccccaaagtctgccaaaggcagtgcaaagaaggaaggctccaaacggaaaatcaacatgagtggctacatcctgttcagcagtgagatgagggctgtgattaaggcccaacacccagactactctttcggggagctcagccgcctggtggggacagaatggagaaatcttgagacagccaagaaagcagaatatgaaggcatgatgggtggctatccgccaggccttccacctttgcagggcccagttgatggccttgttagcatgggcagcatgcagccacttcaccctggggggcctccaccccaccatcttccgccaggtgtgcctggcctcccgggcatcccaccaccgggtgtgatgaaccaaggagtggcccctatggtagggactccagcaccaggtggaagtccatatggacaacaggtgggagttttggggcctccagggcagcaggcaccacctccatatcccggcccacatccagctggaccccctgtcatacagcagccaacaacacccatgtttgtagctcccccaccaaagacccagcggcttcttcactcagaggcctacctgaaatacattgaaggactcagtgcggagtccaacagcattagcaagtgggatcagacactggcagctcgaagacgcgacgtccatttgtcgaaagaacaggagagccgcctaccctctcactggctgaaaagcaaaggggcccacaccaccatggcagatgccctctggcgccttcgagatttgatgctccgggacaccctcaacattcgccaagcatacaacctagaaaatgtttaatcacatcattacgtttcttttatatagaagcataaagagttgtggatcagtagccattttagttactgggggtggggggaaggaacaaaggaggataatttttattgcattttactgtacatcacaaggccatttttatatacggacacttttaataagctatttcaatttgtttgttatattaagttgactttatcaaatacacaaagatttttttgcatatgtttccttcgtttaaaaccagtttcataattggttgtatatgtagacttggagttttatctttttacttgttgccatggaactgaaaccattagaggtttttgtcttggcttggggtttttgttttcttggttttgggtttttttatatatatatataaaagaacaaaatgaaaaaaaacacacacacacaagagtttacagattagtttaaattgataatgaaatgtgaagtttgtcctagtttacatcttagagaggggagtatacttgtgtttgtttcatgtgcctgaatatcttaagccactttctgcaaaagctgtttcttacagatgaagtgctttctttgaaaggtggttatttaggttttagatgtttaatagacacagcacatttgctctattaactcagaggctcactacagaaatatgtaatcagtgctgtgcatctgtctgcagctaatgtacctcctggacaccaggaggggaaaaagcactttttcaattgtgctgagttagacatctgtgagttagactatggtgtcagtgatttttgcagaacacgtgcacaaccctgaggtatgtttaatctaggcaggtacgtttaaggatattttgatctatttataatgaattcacaatttatgcctataaatttcagatgatttaaaattttaaacctgttacattgaaaaacattgaagttcgtcttgaagaaagcattaaggtatgcatggaggtgatttatttttaaacataacacctaacctaacatgggtaagagagtatggaactagatatgagctgtataagaagcataattgtgaacaagtagattgattgccttcatatacaagtatgttttagtattccttatttccttattatcagatgtattttttcttttaagtttcaatgttgttataattctcaaccagaaatttaatactttctaaaatattttttaaatttagcttgtgcttttgaattacaggagaagggaatcataatttaataaaacgcttactagaaagaccattacagatcccaaacacttgggtttggtgaccctgtctttcttatatgaccctacaataaacatttgaaggcagcataggatggcagacagtaggaacattgtttcacttggcggcatgtttttgaaacctgctttatagtaactgggtgattgccattgtggtagagcttccactgctgtttataatctgagagagttaatctcagaggatgcttttttccttttaatctgctatgaatcagtacccagatgtttaattactgtacttattaaatcatgagggcaaaagagtgtagaatggaaaaaagtctcttgtatctagatactttaaatatgggaggccctttaacttaattgcctttagtcaaccactggatttgaatttgcatcaagtattttaaataatattgaatttaaaaaaatgtattgcagtagtgtgtcagtaccttattgttaaagtgagtcagataaatcttcaattcctggctatttgggcaattgaatcatcatggactgtataatgcaatcagattattttgtttctagacatccttgaattacaccaaagaacatgaaatttagttgtggttaaattatttatttatttcatgcattcattttatttcccttaaggtctggatgagacttctttggggagcctctaaaaaaatttttcactgggggccacgtgggtcattagaagccagagctctcctccaggctccttcccagtgcctagaggtgctataggaaacatagatccagccaggggcttccctaaagcagtgcagcaccggcccagggcatcactagacaggccctaattaagttttttttaaaaagcctgtgtatttattttagaatcatgtttttctgtatattaacttgggggatatcgttaatatttaggatataagatttgaggtcagccatcttcaaaaaagaaaaaaaaattgactcaagaaagtacaagtaaactatacacctttttttcataagttttaggaactgtagtaatgtggcttagaaagtataatggcctaaatgttttcaaaatgtaagttcctgtggagaagaattgtttatattgcaaacggggggactgaggggaacctgtaggtttaaaacagtatgtttgtcagccaactgatttaaaaggcctttaactgttttggttgttgttttttttttaagccactctccccttcctatgaggaagaattgagaggggcacctatttctgtaaaatccccaaattggtgttgatgattttgagcttgaatgttttcatacctgattaaaacttggtttattctaatttctgtatcatatcatctgaggtttacgtggtaactagtcttataacatgtatgtatcttttttttgttgttcatctaaagctttttaatccaaataaatacagagtttgcaaagtgatttggattaaccagg

SEQ ID NO: 22929 - DNA, 5071 bp, Homo sapiens
  source 1..5071: mol_type = unassigned DNA
aggagcaatagcagcagccgtggcggccacggggcggggcgcggcggtcggtgaccgcggccggggctgcaggcggcggagcggctggaagttggattccatgggttccaagagaagaagagctacctccccttccagcagtgtcagcggggactttgatgatgggcaccattctgtgtcaacaccaggcccaagcaggaaaaggaggagactttccaatcttccaactgtagatcctattgccgtgtgccatgaactctataataccatccgagactataaggatgaacagggcagacttctctgtgagctcttcattagggcaccaaagcgaagaaatcaaccagactattatgaagtggtttctcagcccattgacttgatgaaaatccaacagaaactaaaaatggaagagtatgatgatgttaatttgctgactgctgacttccagcttctttttaacaatgcaaagtcctattataagccagattctcctgaatataaagccgcttgcaaactctgggatttgtaccttcgaacaagaaatgagtttgttcagaaaggagaagcagatgacgaagatgatgatgaagatgggcaagacaatcagggcacagtgactgaaggatcttctccagcttacttgaaggagatcctggagcagcttcttgaagccatagttgtagctacaaatccatcaggacgtctcattagcgaactttttcagaaactgccttctaaagtgcaatatccagattattatgcaataattaaggagcctatagatctcaagaccattgcccagaggatacagaatggaagctacaaaagtattcatgcaatggccaaagatatagatctcctcgcaaaaaatgccaaaacttataatgagcctggctctcaagtattcaaggatgcaaattcaattaaaaaaatattttatatgaaaaaggctgaaattgaacatcatgaaatggctaagtcaagtcttcgaatgaggactccatccaacttggctgcagccagactgacaggtccttcacacagtaaaggcagccttggtgaagagagaaatcccactagcaagtattaccgtaataaaagagcagtacaaggaggtcgtttatcagcaattacaatggcacttcaatatggctcagaaagtgaagaagatgctgctttagctgctgcacgctatgaagagggagagtcagaagcagaaagcatcacttcctttatggatgtttcaaatcctttttatcagctttatgacacagttaggagttgtcggaataaccaagggcagctaatagctgaacctttttaccatttgccttcaaagaaaaaataccctgattattaccagcaaattaaaatgcccatatcactacaacagatccgaacaaaactgaagaatcaagaatatgaaactttagatcatttggagtgtgatctgaatttaatgtttgaaaatgccaaacgctataatgtgcccaattcagccatctacaagcgagttctaaaattgcagcaagttatgcaggcaaagaagaaagagcttgccaggagagacgatatcgaggacggagacagcatgatctcttcagccacctctgatactggtagtgccaaaagaaaaagtaaaaagaacataagaaagcagcgaatgaaaatcttattcaatgttgttcttgaagctcgagagccaggttcaggcagaagactttgtgacctatttatggttaaaccatccaaaaaggactatcctgattattataaaatcatcttggagccaatggacttgaaaataattgagcataacatccgcaatgacaaatatgctggtgaagagggaatgatagaagacatgaagctgatgttccggaatgccaggcactataatgaggagggctcccaggtttataatgatgcacatatcctggagaagttactcaaggagaaaaggaaagagctgggcccactgcctgatgatgatgacatggcttctcccaaactcaagctgagtaggaagagtggcatttctcctaaaaaatcaaaatacatgactccaatgcagcagaaactaaatgaggtctatgaagctgtaaagaactatactgataagaggggtcgccgcctcagtgccatatttctgaggcttccctctagatctgagttgcctgactactatctgactattaaaaagcccatggacatggaaaaaattcgaagtcacatgatggccaacaagtaccaagatattgactctatggttgaggactttgtcatgatgtttaataatgcctgtacatacaatgagccggagtctttgatctacaaagatgctcttgttctacacaaagtcctgcttgaaacacgcagagacctggagggagatgaggactctcatgtcccaaatgtgactttgctgattcaagagcttatccacaatctttttgtgtcagtcatgagtcatcaggatgatgagggaagatgctacagcgattctttagcagaaattcctgctgtggatcccaactttcctaacaaaccaccccttacatttgacataattaggaagaatgttgaaaataatcgctaccgtcggcttgatttatttcaagagcatatgtttgaagtattggaacgagcaagaaggatgaatcggacagattcagaaatatatgaagatgcagtagaacttcagcagttttttattaaaattcgtgatgaactctgcaaaaatggagagattcttctttcaccggcactcagctataccacaaaacatttgcataatgatgtggagaaagagagaaaggaaaaattgccaaaagaaatagaggaagataaactaaaacgagaagaagaaaaaagagaagctgaaaagagtgaagattcctctggtgctgcaggcctctcaggcttacatcgcacatacagccaggactgtagctttaaaaacagcatgtaccatgttggagattacgtctatgtggaacctgcagaggccaacctacaaccacatatcgtctgtattgaaagactgtgggaggattcagctgaaaaagaagtttttaagagtgactattacaacaaagttccagttagtaaaattctaggcaagtgtgtggtcatgtttgtcaaggaatactttaagttatgcccagaaaacttccgagatgaggatgtttttgtctgtgaatcacggtattctgccaaaaccaaatcttttaagaaaattaaactgtggaccatgcccatcagctcagtcaggtttgtccctcgggatgtgcctctgcctgtggttcgcgtggcctctgtatttgcaaatgcagataaaggtgatgatgagaagaatacagacaactcagaggacagtcgagctgaagacaattttaacttggaaaaggaaaaagaagatgtccctgtggaaatgtccaatggtgaaccaggttgccactactttgagcagctccattacaatgacatgtggctgaaggttggcgactgtgtcttcatcaagtcccatggcctggtgcgtcctcgtgtgggcagaattgaaaaagtatgggttcgagatggagctgcatatttttatggccccatcttcattcacccagaagaaacagagcatgagcccacaaaaatgttctacaaaaaagaagtatttctgagtaatctggaagaaacctgccccatgacatgtattctcggaaagtgtgctgtgttgtcattcaaggacttcctctcctgcaggccaactgaaataccagaaaatgacattctgctttgtgagagccgctacaatgagagcgacaagcagatgaagaaattcaaaggattgaagaggttttcactctctgctaaagtggtagatgatgaaatttactacttcagaaaaccaattgttcctcagaaggagccatcacctttgctggaaaagaagatccagttgctagaagctaaatttgccgagttagaaggtggagatgatgatattgaagagatgggagaagaagatagtgagtctaccccaaagtctgccaaaggcagtgcaaagaaggaaggctccaaacggaaaatcaacatgagtggctacatcctgttcagcagtgagatgagggctgtgattaaggcccaacacccagactactctttcggggagctcagccgcctggtggggacagaatggagaaatcttgagacagccaagaaagcagaatatgaaggcatgatgggtggctatccgccaggccttccacctttgcagggcccagttgatggccttgttagcatgggcagcatgcagccacttcaccctggggggcctccaccccaccatcttccgccaggtgtgcctggcctcccgggcatcccaccaccgggtgtgatgaaccaaggagtggcccctatggtagggactccagcaccaggtggaagtccatatggacaacaggtgggagttttggggcctccagggcagcaggcaccacctccatatcccggcccacatccagctggaccccctgtcatacagcagccaacaacacccatgtttgtagctcccccaccaaagacccagcggcttcttcactcagaggcctacctgaaatacattgaaggactcagtgcggagtccaacagcattagcaagtgggatcagacactggcagctcgaagacgcgacgtccatttgtcgaaagaacaggagagccgcctaccctctcactggctgaaaagcaaaggggcccacaccaccatggcagatgccctctggcgccttcgagatttgatgctccgggacaccctcaacattcgccaagcatacaacctagaaaatgtttaatcacatcattacgtttcttttatatagaagcataaagagttgtggatcagtagccattttagttactgggggtggggggaaggaacaaaggaggataatttttattgcattttactgtacatcacaaggccatttttatatacggacacttttaataagctatttcaatttgtttgttatattaagttgactttatcaaatacacaaagatttttttgcata

SEQ ID NO: 22930 - DNA, 4980 bp, Homo sapiens
  source 1..4980: mol_type = unassigned DNA
tccatgggttccaagagaagaagagctacctccccttccagcagtgtcagcggggactttgatgatgggcaccattctgtgtcaacaccaggcccaagcaggaaaaggaggagactttccaatcttccaactgtagatcctattgccgtgtgccatgaactctataataccatccgagactataaggatgaacagggcagacttctctgtgagctcttcattagggcaccaaagcgaagaaatcaaccagactattatgaagtggtttctcagcccattgacttgatgaaaatccaacagaaactaaaaatggaagagtatgatgatgttaatttgctgactgctgacttccagcttctttttaacaatgcaaagtcctattataagccagattctcctgaatataaagccgcttgcaaactctgggatttgtaccttcgaacaagaaatgagtttgttcagaaaggagaagcagatgacgaagatgatgatgaagatgggcaagacaatcagggcacagtgactgaaggatcttctccagcttacttgaaggagatcctggagcagcttcttgaagccatagttgtagctacaaatccatcaggacgtctcattagcgaactttttcagaaactgccttctaaagtgcaatatccagattattatgcaataattaaggagcctatagatctcaagaccattgcccagaggatacagaatggaagctacaaaagtattcatgcaatggccaaagatatagatctcctcgcaaaaaatgccaaaacttataatgagcctggctctcaagtattcaaggatgcaaattcaattaaaaaaatattttatatgaaaaaggctgaaattgaacatcatgaaatggctaagtcaagtcttcgaatgaggactccatccaacttggctgcagccagactgacaggtccttcacacagtaaaggcagccttggtgaagagagaaatcccactagcaagtattaccgtaataaaagagcagtacaaggaggtcgtttatcagcaattacaatggcacttcaatatggctcagaaagtgaagaagatgctgctttagctgctgcacgctatgaagagggagagtcagaagcagaaagcatcacttcctttatggatgtttcaaatcctttttatcagctttatgacacagttaggagttgtcggaataaccaagggcagctaatagctgaacctttttaccatttgccttcaaagaaaaaataccctgattattaccagcaaattaaaatgcccatatcactacaacagatccgaacaaaactgaagaatcaagaatatgaaactttagatcatttggagtgtgatctgaatttaatgtttgaaaatgccaaacgctataatgtgcccaattcagccatctacaagcgagttctaaaattgcagcaagttatgcaggcaaagaagaaagagcttgccaggagagacgatatcgaggacggagacagcatgatctcttcagccacctctgatactggtagtgccaaaagaaaaagtaaaaagaacataagaaagcagcgaatgaaaatcttattcaatgttgttcttgaagctcgagagccaggttcaggcagaagactttgtgacctatttatggttaaaccatccaaaaaggactatcctgattattataaaatcatcttggagccaatggacttgaaaataattgagcataacatccgcaatgacaaatatgctggtgaagagggaatgatagaagacatgaagctgatgttccggaatgccaggcactataatgaggagggctcccaggtttataatgatgcacatatcctggagaagttactcaaggagaaaaggaaagagctgggcccactgcctgatgatgatgacatggcttctcccaaactcaagctgagtaggaagagtggcatttctcctaaaaaatcaaaatacatgactccaatgcagcagaaactaaatgaggtctatgaagctgtaaagaactatactgataagaggggtcgccgcctcagtgccatatttctgaggcttccctctagatctgagttgcctgactactatctgactattaaaaagcccatggacatggaaaaaattcgaagtcacatgatggccaacaagtaccaagatattgactctatggttgaggactttgtcatgatgtttaataatgcctgtacatacaatgagccggagtctttgatctacaaagatgctcttgttctacacaaagtcctgcttgaaacacgcagagacctggagggagatgaggactctcatgtcccaaatgtgactttgctgattcaagagcttatccacaatctttttgtgtcagtcatgagtcatcaggatgatgagggaagatgctacagcgattctttagcagaaattcctgctgtggatcccaactttcctaacaaaccaccccttacatttgacataattaggaagaatgttgaaaataatcgctaccgtcggcttgatttatttcaagagcatatgtttgaagtattggaacgagcaagaaggatgaatcggacagattcagaaatatatgaagatgcagtagaacttcagcagttttttattaaaattcgtgatgaactctgcaaaaatggagagattcttctttcaccggcactcagctataccacaaaacatttgcataatgatgtggagaaagagagaaaggaaaaattgccaaaagaaatagaggaagataaactaaaacgagaagaagaaaaaagagaagctgaaaagagtgaagattcctctggtgctgcaggcctctcaggcttacatcgcacatacagccaggactgtagctttaaaaacagcatgtaccatgttggagattacgtctatgtggaacctgcagaggccaacctacaaccacatatcgtctgtattgaaagactgtgggaggattcagctggtgaaaaatggttgtatggctgttggttttaccgaccaaatgaaacattccacctggctacacgaaaatttctagaaaaagaagtttttaagagtgactattacaacaaagttccagttagtaaaattctaggcaagtgtgtggtcatgtttgtcaaggaatactttaagttatgcccagaaaacttccgagatgaggatgtttttgtctgtgaatcacggtattctgccaaaaccaaatcttttaagaaaattaaactgtggaccatgcccatcagctcagtcaggtttgtccctcgggatgtgcctctgcctgtggttcgcgtggcctctgtatttgcaaatgcagataaaggtgatgatgagaagaatacagacaactcagaggacagtcgagctgaagacaattttaacttggaaaaggaaaaagaagatgtccctgtggaaatgtccaatggtgaaccaggttgccactactttgagcagctccattacaatgacatgtggctgaaggttggcgactgtgtcttcatcaagtcccatggcctggtgcgtcctcgtgtgggcagaattgaaaaagtatgggttcgagatggagctgcatatttttatggccccatcttcattcacccagaagaaacagagcatgagcccacaaaaatgttctacaaaaaagaagtatttctgagtaatctggaagaaacctgccccatgacatgtattctcggaaagtgtgctgtgttgtcattcaaggacttcctctcctgcaggccaactgaaataccagaaaatgacattctgctttgtgagagccgctacaatgagagcgacaagcagatgaagaaattcaaaggattgaagaggttttcactctctgctaaagtggtagatgatgaaatttactacttcagaaaaccaattgttcctcagaaggagccatcacctttgctggaaaagaagatccagttgctagaagctaaatttgccgagttagaaggtggagatgatgatattgaagagatgggagaagaagatagtgaggtcattgaacctccttctctacctcagcttcagacccccctggccagtgagctggacctcatgccctacacacccccacagtctaccccaaagtctgccaaaggcagtgcaaagaaggaaggctccaaacggaaaatcaacatgagtggctacatcctgttcagcagtgagatgagggctgtgattaaggcccaacacccagactactctttcggggagctcagccgcctggtggggacagaatggagaaatcttgagacagccaagaaagcagaatatgaaggcatgatgggtggctatccgccaggccttccacctttgcagggcccagttgatggccttgttagcatgggcagcatgcagccacttcaccctggggggcctccaccccaccatcttccgccaggtgtgcctggcctcccgggcatcccaccaccgggtgtgatgaaccaaggagtggcccctatggtagggactccagcaccaggtggaagtccatatggacaacaggtgggagttttggggcctccagggcagcaggcaccacctccatatcccggcccacatccagctggaccccctgtcatacagcagccaacaacacccatgtttgtagctcccccaccaaagacccagcggcttcttcactcagaggcctacctgaaatacattgaaggactcagtgcggagtccaacagcattagcaagtgggatcagacactggcagctcgaagacgcgacgtccatttgtcgaaagaacaggagagccgcctaccctctcactggctgaaaagcaaaggggcccacaccaccatggcagatgccctctggcgccttcgagatttgatgctccgggacaccctcaacattcgccaagcatacaacctagaaaatgtttaatcacatcattacgtttcttttatatagaagcataaagagttgtggatcagtagccattttagttactggggg

SEQ ID NO: 22931 - DNA, 783 bp, Homo sapiens
  source 1..783: mol_type = unassigned DNA
gactggttttgcggcggcaccgggaggggtaagggaggtgagggcggcgggtgccgaagcgacggcagcggccgcggccggaggagcaatagcagcagccgtggcggccacggggcggggcgcggcggtcggtgaccgcggccggggctgcaggcggcggagcggctggcttgccaacacttggtgtcacatgtgagcctcccacatgtattcactctccattccagctctgtgattgaactctgctcttattgactagggggcagttgggcaggcatgcctcattcctggaattgacagtcattcctaataagaagttggattccatgggttccaagagaagaagagctacctccccttccagcagtgtcagcggggactttgatgatgggcaccattctgtgtcaacaccaggcccaagcaggaaaaggaggagactttccaatcttccaactgtagatcctattgccgtgtgccatgaactctataataccatccgagactataaggatgaacagggcagacttctctgtgagctcttcattagggcaccaaagcgaagaaatcaaccagactattatgaagtggtttctcagcccattgacttgatgaaaatccaacagaaactaaaaatggaagagtatgatgatgttaatttgctgactgctgacttccagcttctttttaacaatgcaaagtcctattataagccagattctcctgaatataaagccgcttgcaaactctgggatttgtaccttcgaacaagaaatgagtttgttc

SEQ ID NO: 22932 - DNA, 457 bp, Homo sapiens
  source 1..457: mol_type = unassigned DNA
ggcggtcggtgaccgcggccggggctgcaggcggcggagcggctgggtcgcccatatttgattttgagctccaaaatggaagattggaaaatatgttttgaagagcttgccaacacttggtgtcacatgtgagcctcccacatgtattcactctccattccagctctgtgattgaactctgctcttattgactagggggcagttgggcaggcatgcctcattcctggaattgacagtcattcctaatttttgaatatactaacactgaatcagcacttctaaagcccttccttctcccactggcttcacttggctttcagacataatgaggagactggcttttcgaggcgctggttgtgctctgaagaagttggattccatgggttccaagagaagaagagctacctccccttccagcagtgtcagcggggactttgatgatgggcaccattctgtg

SEQ ID NO: 22933 - DNA, 809 bp, Homo sapiens
  source 1..809: mol_type = unassigned DNA
gcggccgcggccggaggagcaatagcagcagccgtggcggccacggggcggggcgcggcggtcggtgaccgcggccggggctgcaggcggcggagcggctggaagaagttggattccatgggttccaagagaagaagagctacctccccttccagcagtgtcagcggggactttgatgatgggcaccattctgtgtcaacaccaggcccaagcaggaaaaggaggagactttccaatcttccaactgtagatcctattgccgtgtgccatgaactctataataccatccgagactataaggatgaacagggcagacttctctgtgagctcttcattagggcaccaaagcgaagaaatcaaccagactattatgaagtggtttctcagcccattgacttgatgaaaatccaacagaaactaaaaatggaagagtatgatgatgttaatttgctgactgctgacttccagcttctttttaacaatgcaaagtcctattataagccagattctcctgaatataaagccgcttgcaaactctgggatttgtaccttcgaacaagaaatgagtttgttcagaaaggagaagcagatgacgaagatgatgatgaagatgggcaagacaatcagggcacagtgactgaaggatcttctccagcttacttgaaggagatcctggagcagcttcttgaagccatagttgtagctacaaatccatcaggacgtctcattagcgaactttttcagaaactgccttctaaagtgcaatatccagattattatgcaataattaaggagcctatagatctcaa

SEQ ID NO: 22934 - DNA, 547 bp, Homo sapiens
  source 1..547: mol_type = unassigned DNA
tgggcccagtagccttgtcgcacctgccggcagggacaaaggcgcactacgggtcggaaactccccgcgctcctctttcccgctcgtcgcggggcagcttcaaagctgtcaacgtttccctcagtccccaataccagtgacagcttgccaacacttggtgtcacatgtgagcctcccacatgtattcactctccattccagctctgtgattgaactctgctcttattgactagggggcagttgggcaggcatgcctcattcctggaattgacagtcattcctaatttttgaatatactaacactgaatcagcacttctaaagcccttccttctcccactggcttcacttggctttcagacataatgaggagactggcttttcgaggcgctggttgtgctctgaagaagttggattccatgggttccaagagaagaagagctacctccccttccagcagtgtcagcggggactttgatgatgggcaccattctgtgtcaacaccaggcccaagcaggaaaaggaggagactttccaatcttccaactg

SEQ ID NO: 22935 - DNA, 517 bp, Homo sapiens
  source 1..517: mol_type = unassigned DNA
cggatgggcccagtagccttgtcgcacctgccggcagggacaaaggcgcactacgggtcggaaactccccgcgctcctctttcccgctcgtcgcggggcagcttcaaagctgtcaacgtttccctcagtccccaataccagtgacagaagaagttggattccatgggttccaagagaagaagagctacctccccttccagcagtgtcagcggggactttgatgatgggcaccattctgtgtcaacaccaggcccaagcaggaaaaggaggagactttccaatcttccaactgtagatcctattgccgtgtgccatgaactctataataccatccgagactataaggatgaacagggcagacttctctgtgagctcttcattagggcaccaaagcgaagaaatcaaccagactattatgaagtggtttctcagcccattgacttgatgaaaatccaacagaaactaaaaatggaagagtatgatgatgttaatttgctgactgctgacttccagcttc

SEQ ID NO: 22936 - DNA, 517 bp, Homo sapiens
  source 1..517: mol_type = unassigned DNA
gcggccgcggccggaggagcaatagcagcagccgtggcggccacggggcggggcgcggcggtcggtgaccgcggccggggctgcaggcggcggagcggctggcttgccaacacttggtgtcacatgtgagcctcccacatgtattcactctccattccagctctgtgattgaactctgctcttattgactagggggcagttgggcaggcatgcctcattcctggaattgacagtcattcctaataagttggattccatgggttccaagagaagaagagctacctccccttccagcagtgtcagcggggactttgatgatgggcaccattctgtgtcaacaccaggcccaagcaggaaaaggaggagactttccaatcttccaactgtagatcctattgccgtgtgccatgaactctataataccatccgagactataaggatgaacagggcagacttctctgtgagctcttcattagggcaccaaagcgaagaaatcaaccagactattatgaagtg

SEQ ID NO: 22937 - DNA, 476 bp, Homo sapiens
  source 1..476: mol_type = unassigned DNA
aggtgagggcggcgggtgccgaagcgacggcagcggccgcggccggaggagcaatagcagcagccgtggcggccacggggcggggcgcggcggtcggtgaccgcggccggggctgcaggcggcggagcggctgggtcgcccatatttgattttgagctccaaaatggaagattggaaaatatgttttgaagagcttgccaacacttggtgtcacatgtgagcctcccacatgtattcactctccattccagctctgtgattgaactctgctcttattgactagggggcagttgggcaggcatgcctcattcctggaattgacagtcattcctaataagttggattccatgggttccaagagaagaagagctacctccccttccagcagtgtcagcggggactttgatgatgggcaccattctgtgtcaacaccaggcccaagcaggaaaaggaggagactttccaatcttccaact

SEQ ID NO: 22938 - DNA, 1950 bp, Homo sapiens
  source 1..1950: mol_type = unassigned DNA
gtctctcccgaccatggagggggtcgcggtggtgacggcgggcagcgtaggcgctgccaaaaccgagggagctgcagccttgccgcctccgcctcctgtctccccgcccgccctcacccctgcacccgcagcgggtgaggagggaccggcgcctctgtctgagacgggggctcccggctgctccggctcccggccccctgagctggagccggagcgcagcctgggccgcttcagaggccgcttcgaggacgaggacgaggagttggaagaagaagaggagctggaggaggaagaagaggaggaggaggaggacatgagtcacttctcgttgaggctggagggaggccggcaggactcggaggacgaggaggagcgcctgattaatctctctgagctgaccccatacatcttgtgttccatttgcaaaggttacttaatagatgcaactaccatcacagaatgtcttcataccttttgtaaaagctgcatcgtaagacatttttactacagcaacagatgtccaaaatgcaatatagtagtacatcagacacaacctctttataacataagtgctaatgaaggcacgggacattttaagccattggaaaagaagtttgttcgagtttcaggagaagcaactattggacatgtagaaaaattcctcagaagaaaaatgggtcttgatccagcttgtcaggtagatataatctgtggtgatcacctgttggagcagtatcaaactctaagggaaatccgacgtgcaataggtgatgcagcaatgcaggatggtctgcttgtccttcattatggtcttgtggtttctcctctgaagataacttgaagattctaggcacattatgaggagggaaacaaaggaggcttctgcaggactgcatctcaccaaagatttccatgaaatgtaattgctaccactttgctgttcaagacataacttacctatttttagcaccaagaattatagcgtttataagtacaacttggaacgatggaatgcatctgttactagagactgtatataaaaagcagccaaagctcaggggaaatttttcaaaaattgaattttaaaatttcttatgattttaaataccttgacattgattttgcttcccatctttgaagtaattggttagttttctttgttcagccatttcaagttggtggttgggatatctgctctctgggatggcatcagttgggcagtcatctttttggaagagaagtgtgcttttgagtggaagattcaaagccagtctttgttaaactgcagggtgtactctcaaagaccaaaactattggccacttttgtatgttgccagcatattttgaacttgtacctttttttatactagcaacactacaaaggagaagttactcatttcaaaatggatgaattgttattatgtgtgaagagactctgagtttatgatctgtgccataaaatttcagtgtaataagacttcttcaatacatcttccaataaggggtgcttctttgtgacagtatttttatttctgacattcattttatttgggtacatagtgtggttgttgataccttgcaatagtattgcttctgaaagtaataaaaaattttaggagaatttgagaagtttacagaattacttattcattgttttcttagtaagtcagtttaatgtttatttttctcattatttcatcactgcaataaagaataagggtgtttgagctcacctccatgcaaagacttcagttttaaaacattatttgcctaaaattagcattgtgatgctttctgaaagaaatattttataaatcctgtttaacagcagaatttctgaatgtgtagagactactacaaaattggaaaaagattggcaattctttgtaaagaatttgtgaattgtgtataaatttattctaacatttaataaaaatgtattttaaccta

SEQ ID NO: 22939 - DNA, 2230 bp, Homo sapiens
  source 1..2230: mol_type = unassigned DNA
ggcgtccgaggccggccgaactcccgcgctctcccgccgcctcgcctcgcctggtgtctctcccgaccatggagggggtcgcggtggtgacggcgggcagcgtaggcgctgccaaaaccgagggagctgcagccttgccgcctccgcctcctgtctccccgcccgccctcacccctgcacccgcagcgggtgaggagggaccggcgcctctgtctgagacgggggctcccggctgctccggctcccggccccctgagctggagccggagcgcagcctgggccgcttcagaggccgcttcgaggacgaggacgaggagttggaagaagaagaggagctggaggaggaagaagaggaggaggaggaggacatgagtcacttctcgttgaggctggagggaggccggcaggactcggaggacgaggaggagcgcctgattaatctctctgagctgaccccatacatcttgtgttccatttgcaaaggttacttaatagatgcaactaccatcacagaatgtcttcataccttttgtaaaagctgcatcgtaagacatttttactacagcaacagatgtccaaaatgcaatatagtagtacatcagacacaacctctttataacataaggttggaccgacagttacaagacatagtgtacaaattagtgatcaatctagaggaaagagaaaaaaagcaaatgcatgatttctataaagaaagaggtctagaagtacctaaacctgctgttccacagccagtcccttcaagcaaaggaagatctaaaaaagtcctagaatcagtgtttcgtattccacctgaacttgatatgtctttattactggagttcattggtgctaatgaaggcacgggacattttaagccattggaaaagaagtttgttcgagtttcaggagaagcaactattggacatgtagaaaaattcctcagaagaaaaatgggtcttgatccagcttgtcaggtagatataatctgtggtgatcacctgttggagcagtatcaaactctaagggaaatccgacgtgcaataggtgatgcagcaatgcaggatggtctgcttgtccttcattatggtcttgtggtttctcctctgaagataacttgaagattctaggcacattatgaggagggaaacaaaggaggcttctgcaggactgcatctcaccaaagatttccatgaaatgtaattgctaccactttgctgttcaagacataacttacctatttttagcaccaagaattatagcgtttataagtacaacttggaacgatggaatgcatctgttactagagactgtatataaaaagcagccaaagctcaggggaaatttttcaaaaattgaattttaaaatttcttatgattttaaataccttgacattgattttgcttcccatctttgaagtaattggttagttttctttgttcagccatttcaagttggtggttgggatatctgctctctgggatggcatcagttgggcagtcatctttttggaagagaagtgtgcttttgagtggaagattcaaagccagtctttgttaaactgcagggtgtactctcaaagaccaaaactattggccacttttgtatgttgccagcatattttgaacttgtacctttttttatactagcaacactacaaaggagaagttactcatttcaaaatggatgaattgttattatgtgtgaagagactctgagtttatgatctgtgccataaaatttcagtgtaataagacttcttcaatacatcttccaataaggggtgcttctttgtgacagtatttttatttctgacattcattttatttgggtacatagtgtggttgttgataccttgcaatagtattgcttctgaaagtaataaaaaattttaggagaatttgagaagtttacagaattacttattcattgttttcttagtaagtcagtttaatgtttatttttctcattatttcatcactgcaataaagaataagggtgtttgagctcacctccatgcaaagacttcagttttaaaacattatttgcctaaaattagcattgtgatgctttctgaaagaaatattttataaatcctgtttaacagcagaatttctgaatgtgtagagactactacaaaattggaaaaagattggcaattctttgtaaagaatttgtgaattgtgtataaatttattctaacatttaataaaaatgtattttaaccta

SEQ ID NO: 22940 - DNA, 11589 bp, Homo sapiens
  source 1..11589: mol_type = unassigned DNA
acaaacgagttaggtgagttatagtctaacgtgagtgagttacctgcgtggtggctgcaggctgagctctaaccagataacatgtccacggattcttgacagagagaaataagatcacttagaaagaaaggatcatttctcccttgagtcacaaggagacagaaacagaaaaaaaagcacaaaagctatgctgctccaatcaaaactgaaaatgcttttaatgtctgagcaatcttaagagtattgatttaagtggacagaatgactgcctggctgatctctctgatgagtattgaagtactacttttggcagtacgtcacctgagtttacatattgaacctgaagaaggtagccttgcagggggaacgtggatcacagtcatttttgatggtttggagttgggtgttctttaccccaacaatggctctcaattggagatacacctggtgaacgtgaacatggtggtgcccgcactgcggagtgttccctgtgacgtctttcctgttttcttggatttgcctgtggtgacatgccggaccagatctgtgctgtctgaagcacatgagggtctgtacttcctggaagcatacttcgggggacagctggtaagcagtccaaatccaggaccacgagatagctgtactttcaagttttccaaggcgcagacacccatcgttcaccaagtttatccaccaagtggtgttccaggaaaactaatacatgtatatggctggattatcactggaagattggaaacttttgattttgatgctgagtacattgatagcccagtgatcttggaagctcaaggagacaaatgggttactccttgctctcttataaataggcagatgggaagctgttatcctattcaggaggaccatggtcttgggactctgcagtgccatgtggaaggcgactacatcggctcccagaatgttagcttctcagtatttaacaaaggaaagtcaatggtccacaagaaggcatggctgatcagtgctaaacaggatcttttcctataccagacacactcagaaatattatctgtgtttccagaaactgggagccttgggggaagaacaaacatcacaattacaggagacttttttgacaattctgcccaggttaccattgcaggcattccatgtgatattagacacgtgtctcccaggaagattgagtgcaccactcgggctccaggaaaagatgtgaggctcaccacccctcagccaggcaatcgagggcttctttttgaagttggagatgctgttgagggactggaactgactgaagccaccccagggtacaggtggcagattgtccctaatgccagttctccatttgggttttggtcacaggaaggacaacctttcagagcacggctcagtgggttctttgtggctccagagacaaataattacactttctggattcaggcagatagccaagcttccttgcatttcagttggtcagaggaaccaaggactaaggtgaaagtggcctccatcagcgtcggcactgctgactggtttgactcctgggagcagaatagggatgaagggacctggcagcagaagactcccaagttggagctgttgggtggagccatgtactacctggaagcagagcatcatgggatagccccaagcagggggatgaggattggtgtccagattcacaacacctggctgaatcctgatgtggtcaccacttacctacgggagaagcaccagatccgagtccgagcccagaggcttccagaagtacaggtgctgaatgtatcaggcagaggaaacttcttccttacttgggacaatgtctctagtcagccaatccctgcaaatgccacagcccatctgattcaaacaaccattgaggagttacttgcagtaaaatgcaaactggaacccctttggtctaacatccttctccggcttggatttgaacgaggcccagaagtttccaactctgatggggacctcaccagtgggacggagcccttctgtggcaggttcagcctccgtcagcctcgacaccttgtccttactcccccggctgcccagaagggctatcggctagatcagtatacacacctgtgtcttgcatacaaaggccacatgaacaagatcctgaagatgattgtgtccttcacaatcggctttcaaaacatggtaaagaataccacctgtgactggagtctcacgaggaccagccccgagagctggcagttcgattgcactgacctctgggagacttgtgtgcgttgcttcggggatctccagccccctccggcaaactccccagtgctggttcatcagatcaaccttctccctctggcccaggagacgggcctgttctatgtggatgaaattattattgcagacacaaacgtaacagtttctcaagctgattctggaacggctcgcccagggggcaatctggtggaatcagtctctgtggtgggatcccctccggtctacagtgtcacctcctggctggcggggtgtggcacggagctcccgctcatcactgcacgctctgtgcccactgaaggaacagaagagggatctggactggtcctggtgacgacacagagacgacagcggacaagtccacctctaggaggacactttcgcatccagcttcctaatacagtgatttctgatgtccctgtacaaatttctgctcatcaccttcaccagctcttacagaataatgccgatgacttcacatccaggtacctcaatgccagtgacttcactgtgaaggaggatctatacacttgctacgaacacgtgtggaccttgtcctggtccactcagattggggatttgcccaattttatcagggtctctgatgaaaaccttactggagtgaatcctgctgcagccacgcgtgtggtatatgatggtggagtttttcttggacccatatttggagacatgttggctactgccaaccagcatactcaggtggttgtgcgagtgaatgatgtaccagctcattgcccaggttcctgctctttccagtacctccaagggtcaactccctgtgtccattctgtgtggtactccattgatggtgacatcaacctaatgatttacattaccggaactggtttctctggtgactcccagttcttgcaggttacagtgaacaaaacgagttgcaaagttattttctcaaaccagaccaatgtagtctgtcagacagatttgctacctgttggaatgcatcggatcttgatgttggtgagaccctctggtcttgccatcagtgccactggagaagacctcttcctaaatgtgaaacctagactggatatggtggagccttccagagctgcggatattggagggctctgggccaccatccgaggctctagtttggaaggtgttagcctgatattatttggatcttactcgtgtgccatcaatgtcgctacaagcaattcaagcagaattcagtgcaaagttccacccagggggaaagatggacgcattgtgaatgtgactgtgatcagaggggactattctgcagttcttcccagagcatttacatatgtctcttccttaaatccagttattgtgactctgagcagaaacataagcaatatagcaggcggtgagaccctggtcattggagtggcgaggctgatgaactatacggatttggatgtggaagtccacgtccaggatgccttggctccggttcacacacagtcggcttggggcctggaggtggcactgcccccactgccagctggtctccacagaatttccgtctctatcaatggggtcagcattcactcacaaggggttgatctccacatccagtacctcacagaagttttcagcatcgagccttgctgtgggtccctgctgggagggaccatcctcagcatctcaggaataggcttcagcagggacccagctttggtttgggtacttgtgggcaatcggtcctgtgacattgtgaacttaacggaggcgagcatctggtgtgaaaccctgccagccccccagatacccgatgcgggcgctcccactgttccagctgccgtggaggtctgggctggcaacaggttcttcgcccgtggtccttcaccaagcttggtggggaaaggcttcaccttcatgtatgaagcggcagcaacaccagtagtcactgccatgcaaggagaaatcacaaatagcagcctgagcctgcatgtgggaggaagtaacctctccaactcagtcatccttctggggaacctgaactgtgatgttgagacacagtccttccagggcaacgtgagcctgtctggatgctccatccctcttcacagtctggaggctggcatctatcctctccaagtacgtcagaagcagatgggatttgctaatatgtctgtggtgctccagcaatttgcagtgatgcctcggataatggccatcttcccatcgcagggttcggcatgtggtgggaccatacttactgtgagggggttgcttcttaactctagaaggaggtcagttcgggttgacctctcgggtccttttacttgtgtgattttgagtttgggagaccacaccattctctgccaggttagcctggagggtgaccccttgcctggagcttccttctccctgaacgtcacagtcctggtcaatgggctaaccagcgagtgtcaggggaattgcactcttttcataagggaagaggcaagtcctgtcatggatgccttgtccacaaacaccagtgggtctctgaccactgtgctgattaggggtcagaggttagccaccacagctgatgagccgatggtatttgtggatgatcaacttccttgcaatgtaactttttttaatgcaagccacgttgtgtgccagacaagagacttggccccaggaccccactacctgtcagttttttatacaagaaatgggtatgcttgttctggtaatgtttccagacacttctacattatgccccaagtgtttcattattttcctaagaatttcagcttacatggtggaagcctcttgaccatagagggcacaggcctgagaggacagaacaccacgtcagtctatattgaccagcagacctgcctgacggtgaacatcggtgctgagctcatccggtgcattgttcccacagggaatggctctgttgccctggaaatagaggtagatggactttggtatcacataggagtcattggttataacaaggcctttaccccagaattgatctctatttctcagagcgatgacatcttaacctttgcagtggcccagatctcaggagctgcaaacattgacatttttataggaatgtcaccctgtgtgggtgtctctggtaaccacaccgttcttcagtgcgtggtcccttcccttccggccggggagtaccacgtcagaggctatgactgcatcagagggtgggcctcatctgccctggtgttcacctcaagagttattattacagcagtgacggagaacttcggctgcctgggtggaaggctggtgcatgtgtttggagcgggattttctccagggaatgtctcagctgctgtgtgtggtgctccctgccgagtcctggctaatgctacagtgtctgccttcagctgcttggttctgcccctggatgtgtccttggccttcctgtgtggcctgaagcgtgaggaggacagctgtgaggctgccagacacacctatgtgcagtgtgatttgacagttgccatggcgacagagcaactgcttgaatcgtggccttacctctacatttgcgaggaaagttcccaatgcctctttgtgccagatcattgggcagagtcaatgtttccatcattctcgggcctctttatcagccctaaattggaaagagatgaagttctcatctataatagctcctgtaacattaccatggaaactgaggcagagatggagtgtgagacgcccaatcagccaattaccgtcaagattactgagatacggaaacgctggggccagaacactcagggcaacttttctttacagttctgccggagatggtccaggactcacagctggtttcctgaaaggctgccacaagatggcgacaacgtcacagtggagaatggccaattgcttctgctggacactaacacaagcatcctcaacttactgcacattaaagggggcaagctgattttcatggccccaggacccatcgagctcagggcacacgccatccttgtttctgatggtggagagctccggattggatccgaagacaagcccttccaaggcagagctcagatcacactctacgggagttcctactcaactcccttctttccctatggagtcaagttcctggctgtgaggaatggaactctttctctgcacggttcactaccagaagtaattgtcacctgtcttagagcaactgcccatgccctagacacagtgctggctttagaagatgctgtggactggaaccctggggatgaagttgtcatcatcagtggaacaggtgttaaaggtgccaaaccgatggaagagattgtcactgtggaaactgtgcaggatacagacctctatcttaagtcacctttgagatattctcacaactttacagagaattgggtggctggagagcaccatattttaaaggccactgtggctctgctcagcaggagtattaccatacaaggaaatctcactaatgagagggagaagctgcttgtttcatgccaggaggccaatgctccagaaggtaatctgcagcactgtttgtattccatgagtgagaagatgctaggatccagggatatgggagccagagtgatcgttcagtccttcccagaagagcccagccaggtccagttgaagggagtgcagtttcaagtcttggggcaagccttccataagcatctgagctcactcactctggtgggagctatgagagagtctttcatacagggctgcacagtgaggaactccttcagtagaggcctcagcatgtgcgggaccttgggcctgaaggtggacagtaatgtattctacaatattttaggtcatgcgctgctagttgggacatgcacggagatgagatatatctcctgggaggcaattcatggaaggaaagatgactggtcaggacatggaaatataataagaaacaacgtgatcatccaggtttctggtgccgagggactctccaatcctgaaatgttgacaccatctggcatctatatctgcagtcccaccaatgttatagaggggaacagagtgtgtggtgctggctatggctactttttccatctcatgaccaaccaaacatcacaagctccgcttctttccttcactcagaacattgcacattcttgtaccaggtatggtctctttgtataccctaaatttcagccaccttgggataatgtcactggcaccactctgttccagagcttcacagtttgggaaagtgcaggtggtgcccagatttttagaagtagcaatcttcgcctgaaaaacttcaaagtttattcatgcagagattttggaattgacgtcttggaaagtgatgcaaatacttcagttactgacagcttattacttggtcattttgcccacaagggaagtctgtgtatgtcatctgggattaaaactcctaaaagatgggaactgatggtgtctaacacaacctttgttaattttgatctcatcaactgtgtggccattagaacctgttcagactgttcccaaggacaaggtggatttactgtgaagaccagccagttgaagtttacaaactcttcaaacttagtggcatttccatttcctcatgcagcaattttggaagacttggatgggtctctgtctgggaaaaacagaagtcacattcttgcttctatggaaaccctttcagcttcttgtttggtcaattcaagctttggtcgggttgtccatggcagtgcctgtggaggaggtgttctttttcatcgtatgtctattggtttagcgaatactcctgaagtttcttatgatttaaccatgactgacagcagaaataaaacaaccactgtcaattatgtacgtgatacattgtctaaccctcgtggctggatggctctgctcttggaccaagagacctactcattgcaatctgagaacctttggatcaacagatctctgcagtactcagcaacctttgacaactttgctcctggtaattacctactgctggtgcacacagatttgccgccttaccctgacatcctcctaagatgtgggagtcgagtgggtctgtcttttccatttcttccatcaccaggtcagaaccaaggctgtgactggttcttcaatagccagctgaggcaactcacctatctggtttcaggtgaaggccaagttcaagtcattctccgggtgaaggaaggtatgcccccaactatttcagcttctacctctgcccctgaatcagctttaaaatggtccctccctgaaacatggcaaggtgttgaagaaggctggggaggatacaacaataccattccaggccctggggatgacgttctcattttacccaacagaactgtccttgtggatacagatcttccattcttcaaagggctgtatgtgatggggaccttagacttccctgtggacagaagcaatgttctgagtgtggcatgcatggtcattgcaggcggggagctgaaagttggtactttagaaaatcccttagaaaaggaacaaaagcttctgattctccttagagcctcagagggagtcttttgtgaccgtatgaatggaattcatattgacccaggaacaattggggtttatgggaaagttcatctttacagtgcttatcctaagaactcctggacacatcttggagctgatattgcctcaggaaatgagagaattatagtagaagatgcagtggattggcgcccccatgacaaaatagtccttagctcctcttcttatgagcctcatgaagcagaggtcctcactgtgaaagaagtcaagggccaccatgtgaggatctatgaacggctcaaacaccggcatattggaagtgtacatgtcacggaggatggccgacacattcgtttggctgctgaggttggactgttgacccgaaatatacaaattcagcctgacgtatcatgtagggggagactgtttgtggggtccttcaggaagtccagccgagaagaattttcaggtgtccttcaacttcttaatgtggaaattcagaacttcgggtcaccattgtactcatctgttgaattcagtaatgtgtcagcaggatcctggatcatatcatctactctgcaccagagctgtggcgggggcattcatgcagctgccagtcatggagtacttttaaatgacaatattgtgtttggcacagctggccatggcatagatttagagggtcaggcctatactgtcactaataaccttgtggttctgatgacacagccagcgtggtccaccatttgggtggcgggaatcaaagtgaaccaggtaaaggacatcaacctccatggcaacgttgtggcaggatcagagagacttggctttcacatccgaggccacaagtgctcctcttgtgaactgctttggtctgacaatgtggcgcattcaagtcttcatggccttcatctctataaggaaagtggacttgacaactgtaccagaatctctggcttcttggctttcaagaactttgactatggtgccatgttacatgtagagaacagcgtggagatagagaacattactctggtagacaatactattggtcttttggcagtagtgtatgtattttctgctccacaaaattccgtcaaaaaagtgcagattgtgcttaggaattcagtcattgtggccaccagctcttcttttgactgcattcaggacaaagtgaagccgcactcagccaacttgacatcaacagatagagctccctccaatccaagaggaggtcgaattggtattctgtggcctgtattcacctcagaaccaaatcagtggcctcaggagccatggcacaaagtgaggaatgatcattcaatttcaggaatcatgaaacttcaagatgttaccttttctagttttgtgaagagttgctatagcgatgacctggatgtctgcattctaccaaatgcagagaacagtggaattatgcacccaataacagcagagaggaccaggatgctaaagataaaagataaaaacaagttctactttccttcattacaacccaggaaagatttaggaaaagtagtctgtcctgaattagactgtgcaagtccaagaaaatatctcttcaaggatctggatgggagagccctgggtctgcctccaccagtttctgtatttcctaaaacagaggcagaatggactgcatccttcttcaacgcagtaaccactgagcaggctttgaagatttcagaatagaggaggagcctgcaggaagctgaactttgaaagattaatgaggcagcaggaagcagggtgaagaatgggttggagcatggaccaaatggaaagacttgttaagacactgtttcaattgttcaaattgagaagaaattgattgaggactgggaggagattgatggcagccagaatggagaggatggtacagatcaaagaaatacaaaagagaggaaatagagtttgcttactcctgactttggggactgtggagagggtgtcaacagtgacaccattgtccgtagtcaggatatctttgggaatggaagttccagtagcagatatgggggagtaggaaagaagaggatggttgcttaagctttgcctttagtgagtttggggtacccactatatgagagaggagcaattcagatattaaattggtggtgttgaaatctttggaattagagctttggagataaattgcagctagatataaattatctggaataaagtgataggtgaaataatatggtagagaagccttattttatttctctcttctttaccaattatattgagatattattattattggcatattaatatattattattggtatattaataatataataatataggtatattatcaataatatactaatactaatataccaataatagtgggttattgttaataatattggtaaagaaagaacataaatgtaagtttattaccaagaatattggtgtggtaaagataacccatttatgctggaggttgcaattttttgaattgcaaaatcagaccttggccatgaccttaagcagtaggatataaataactcccatgtgcccagtgttccattattggaacagtgtgccattcttgtgcactgatggaggaaatagttacagatacagtgtgatttgaggaattggttcccccagagccttattgaccctcaaatacttcccttacccatgttatcatttcctttctatcctaaaattgctacctttgctgccagatcttttccttcataaagtcaatgtgacatttactcatttattaactcatttcttcaacagatacttattgggcatttactgtatgccaagtattgtaataaatgctgtatgtacaaaatgaca

SEQ ID NO: 22941 - DNA, 16282 bp, Homo sapiens
  source 1..16282: mol_type = unassigned DNA
acatttggctgggacacaaacgagttaggtgagttatagtctaacgtgagtgagttacctgcgtggtggctgcaggctgagctctaaccagataacatgtccacggattcttgacagagagaaataagatcacttagaaagaaaggatcatttctcccttgagtcacaaggagacagaaacagaaaaaaaagcacaaaagctatgctgctccaatcaaaactgaaaatgcttttaatgtctgagcaatcttaagagtattgatttaagtggacagaatgactgcctggctgatctctctgatgagtattgaagtactacttttggcagtacgtcacctgagtttacatattgaacctgaagaaggtagccttgcagggggaacgtggatcacagtcatttttgatggtttggagttgggtgttctttaccccaacaatggctctcaattggagatacacctggtgaacgtgaacatggtggtgcccgcactgcggagtgttccctgtgacgtctttcctgttttcttggatttgcctgtggtgacatgccggaccagatctgtgctgtctgaagcacatgagggtctgtacttcctggaagcatacttcgggggacagctggtaagcagtccaaatccaggaccacgagatagctgtactttcaagttttccaaggcgcagacacccatcgttcaccaagtttatccaccaagtggtgttccaggaaaactaatacatgtatatggctggattatcactggaagattggaaacttttgattttgatgctgagtacattgatagcccagtgatcttggaagctcaaggagacaaatgggttactccttgctctcttataaataggcagatgggaagctgttatcctattcaggaggaccatggtcttgggactctgcagtgccatgtggaaggcgactacatcggctcccagaatgttagcttctcagtatttaacaaaggaaagtcaatggtccacaagaaggcatggctgatcagtgctaaacaggatcttttcctataccagacacactcagaaatattatctgtgtttccagaaactgggagccttgggggaagaacaaacatcacaattacaggagacttttttgacaattctgcccaggttaccattgcaggcattccatgtgatattagacacgtgtctcccaggaagattgagtgcaccactcgggctccaggaaaagatgtgaggctcaccacccctcagccaggcaatcgagggcttctttttgaagttggagatgctgttgagggactggaactgactgaagccaccccagggtacaggtggcagattgtccctaatgccagttctccatttgggttttggtcacaggaaggacaacctttcagagcacggctcagtgggttctttgtggctccagagacaaataattacactttctggattcaggcagatagccaagcttccttgcatttcagttggtcagaggaaccaaggactaaggtgaaagtggcctccatcagcgtcggcactgctgactggtttgactcctgggagcagaatagggatgaagggacctggcagcagaagactcccaagttggagctgttgggtggagccatgtactacctggaagcagagcatcatgggatagccccaagcagggggatgaggattggtgtccagattcacaacacctggctgaatcctgatgtggtcaccacttacctacgggagaagcaccagatccgagtccgagcccagaggcttccagaagtacaggtgctgaatgtatcaggcagaggaaacttcttccttacttgggacaatgtctctagtcagccaatccctgcaaatgccacagcccatctgattcaaacaaccattgaggagttacttgcagtaaaatgcaaactggaacccctttggtctaacatccttctccggcttggatttgaacgaggcccagaagtttccaactctgatggggacctcaccagtgggacggagcccttctgtggcaggttcagcctccgtcagcctcgacaccttgtccttactcccccggctgcccagaagggctatcggctagatcagtatacacacctgtgtcttgcatacaaaggccacatgaacaagatcctgaagatgattgtgtccttcacaatcggctttcaaaacatggtaaagaataccacctgtgactggagtctcacgaggaccagccccgagagctggcagttcgattgcactgacctctgggagacttgtgtgcgttgcttcggggatctccagccccctccggcaaactccccagtgctggttcatcagatcaaccttctccctctggcccaggagacgggcctgttctatgtggatgaaattattattgcagacacaaacgtaacagtttctcaagctgattctggaacggctcgcccagggggcaatctggtggaatcagtctctgtggtgggatcccctccggtctacagtgtcacctcctggctggcggggtgtggcacggagctcccgctcatcactgcacgctctgtgcccactgaaggaacagaagagggatctggactggtcctggtgacgacacagagacgacagcggacaagtccacctctaggaggacactttcgcatccagcttcctaatacagtgatttctgatgtccctgtacaaatttctgctcatcaccttcaccagctcttacagaataatgccgatgacttcacatccaggtacctcaatgccagtgacttcactgtgaaggaggatctatacacttgctacgaacacgtgtggaccttgtcctggtccactcagattggggatttgcccaattttatcagggtctctgatgaaaaccttactggagtgaatcctgctgcagccacgcgtgtggtatatgatggtggagtttttcttggacccatatttggagacatgttggctactgccaaccagcatactcaggtggttgtgcgagtgaatgatgtaccagctcattgcccaggttcctgctctttccagtacctccaagggtcaactccctgtgtccattctgtgtggtactccattgatggtgacatcaacctaatgatttacattaccggaactggtttctctggtgactcccagttcttgcaggttacagtgaacaaaacgagttgcaaagttattttctcaaaccagaccaatgtagtctgtcagacagatttgctacctgttggaatgcatcggatcttgatgttggtgagaccctctggtcttgccatcagtgccactggagaagacctcttcctaaatgtgaaacctagactggatatggtggagccttccagagctgcggatattggagggctctgggccaccatccgaggctctagtttggaaggtgttagcctgatattatttggatcttactcgtgtgccatcaatgtcgctacaagcaattcaagcagaattcagtgcaaagttccacccagggggaaagatggacgcattgtgaatgtgactgtgatcagaggggactattctgcagttcttcccagagcatttacatatgtctcttccttaaatccagttattgtgactctgagcagaaacataagcaatatagcaggcggtgagaccctggtcattggagtggcgaggctgatgaactatacggatttggatgtggaagtccacgtccaggatgccttggctccggttcacacacagtcggcttggggcctggaggtggcactgcccccactgccagctggtctccacagaatttccgtctctatcaatggggtcagcattcactcacaaggggttgatctccacatccagtacctcacagaagttttcagcatcgagccttgctgtgggtccctgctgggagggaccatcctcagcatctcaggaataggcttcagcagggacccagctttggtttgggtacttgtgggcaatcggtcctgtgacattgtgaacttaacggaggcgagcatctggtgtgaaaccctgccagccccccagatacccgatgcgggcgctcccactgttccagctgccgtggaggtctgggctggcaacaggttcttcgcccgtggtccttcaccaagcttggtggggaaaggcttcaccttcatgtatgaagcggcagcaacaccagtagtcactgccatgcaaggagaaatcacaaatagcagcctgagcctgcatgtgggaggaagtaacctctccaactcagtcatccttctggggaacctgaactgtgatgttgagacacagtccttccagggcaacgtgagcctgtctggatgctccatccctcttcacagtctggaggctggcatctatcctctccaagtacgtcagaagcagatgggatttgctaatatgtctgtggtgctccagcaatttgcagtgatgcctcggataatggccatcttcccatcgcagggttcggcatgtggtgggaccatacttactgtgagggggttgcttcttaactctagaaggaggtcagttcgggttgacctctcgggtccttttacttgtgtgattttgagtttgggagaccacaccattctctgccaggttagcctggagggtgaccccttgcctggagcttccttctccctgaacgtcacagtcctggtcaatgggctaaccagcgagtgtcaggggaattgcactcttttcataagggaagaggcaagtcctgtcatggatgccttgtccacaaacaccagtgggtctctgaccactgtgctgattaggggtcagaggttagccaccacagctgatgagccgatggtatttgtggatgatcaacttccttgcaatgtaactttttttaatgcaagccacgttgtgtgccagacaagagacttggccccaggaccccactacctgtcagttttttatacaagaaatgggtatgcttgttctggtaatgtttccagacacttctacattatgccccaagtgtttcattattttcctaagaatttcagcttacatggtggaagcctcttgaccatagagggcacaggcctgagaggacagaacaccacgtcagtctatattgaccagcagacctgcctgacggtgaacatcggtgctgagctcatccggtgcattgttcccacagggaatggctctgttgccctggaaatagaggtagatggactttggtatcacataggagtcattggttataacaaggcctttaccccagaattgatctctatttctcagagcgatgacatcttaacctttgcagtggcccagatctcaggagctgcaaacattgacatttttataggaatgtcaccctgtgtgggtgtctctggtaaccacaccgttcttcagtgcgtggtcccttcccttccggccggggagtaccacgtcagaggctatgactgcatcagagggtgggcctcatctgccctggtgttcacctcaagagttattattacagcagtgacggagaacttcggctgcctgggtggaaggctggtgcatgtgtttggagcgggattttctccagggaatgtctcagctgctgtgtgtggtgctccctgccgagtcctggctaatgctacagtgtctgccttcagctgcttggttctgcccctggatgtgtccttggccttcctgtgtggcctgaagcgtgaggaggacagctgtgaggctgccagacacacctatgtgcagtgtgatttgacagttgccatggcgacagagcaactgcttgaatcgtggccttacctctacatttgcgaggaaagttcccaatgcctctttgtgccagatcattgggcagagtcaatgtttccatcattctcgggcctctttatcagccctaaattggaaagagatgaagttctcatctataatagctcctgtaacattaccatggaaactgaggcagagatggagtgtgagacgcccaatcagccaattaccgtcaagattactgagatacggaaacgctggggccagaacactcagggcaacttttctttacagttctgccggagatggtccaggactcacagctggtttcctgaaaggctgccacaagatggcgacaacgtcacagtggagaatggccaattgcttctgctggacactaacacaagcatcctcaacttactgcacattaaagggggcaagctgattttcatggccccaggacccatcgagctcagggcacacgccatccttgtttctgatggtggagagctccggattggatccgaagacaagcccttccaaggcagagctcagatcacactctacgggagttcctactcaactcccttctttccctatggagtcaagttcctggctgtgaggaatggaactctttctctgcacggttcactaccagaagtaattgtcacctgtcttagagcaactgcccatgccctagacacagtgctggctttagaagatgctgtggactggaaccctggggatgaagttgtcatcatcagtggaacaggtgttaaaggtgccaaaccgatggaagagattgtcactgtggaaactgtgcaggatacagacctctatcttaagtcacctttgagatattctcacaactttacagagaattgggtggctggagagcaccatattttaaaggccactgtggctctgctcagcaggagtattaccatacaaggaaatctcactaatgagagggagaagctgcttgtttcatgccaggaggccaatgctccagaaggtaatctgcagcactgtttgtattccatgagtgagaagatgctaggatccagggatatgggagccagagtgatcgttcagtccttcccagaagagcccagccaggtccagttgaagggagtgcagtttcaagtcttggggcaagccttccataagcatctgagctcactcactctggtgggagctatgagagagtctttcatacagggctgcacagtgaggaactccttcagtagaggcctcagcatgtgcgggaccttgggcctgaaggtggacagtaatgtattctacaatattttaggtcatgcgctgctagttgggacatgcacggagatgagatatatctcctgggaggcaattcatggaaggaaagatgactggtcaggacatggaaatataataagaaacaacgtgatcatccaggtttctggtgccgagggactctccaatcctgaaatgttgacaccatctggcatctatatctgcagtcccaccaatgttatagaggggaacagagtgtgtggtgctggctatggctactttttccatctcatgaccaaccaaacatcacaagctccgcttctttccttcactcagaacattgcacattcttgtaccaggtatggtctctttgtataccctaaatttcagccaccttgggataatgtcactggcaccactctgttccagagcttcacagtttgggaaagtgcaggtggtgcccagatttttagaagtagcaatcttcgcctgaaaaacttcaaagtttattcatgcagagattttggaattgacgtcttggaaagtgatgcaaatacttcagttactgacagcttattacttggtcattttgcccacaagggaagtctgtgtatgtcatctgggattaaaactcctaaaagatgggaactgatggtgtctaacacaacctttgttaattttgatctcatcaactgtgtggccattagaacctgttcagactgttcccaaggacaaggtggatttactgtgaagaccagccagttgaagtttacaaactcttcaaacttagtggcatttccatttcctcatgcagcaattttggaagacttggatgggtctctgtctgggaaaaacagaagtcacattcttgcttctatggaaaccctttcagcttcttgtttggtcaattcaagctttggtcgggttgtccatggcagtgcctgtggaggaggtgttctttttcatcgtatgtctattggtttagcgaatactcctgaagtttcttatgatttaaccatgactgacagcagaaataaaacaaccactgtcaattatgtacgtgatacattgtctaaccctcgtggctggatggctctgctcttggaccaagagacctactcattgcaatctgagaacctttggatcaacagatctctgcagtactcagcaacctttgacaactttgctcctggtaattacctactgctggtgcacacagatttgccgccttaccctgacatcctcctaagatgtgggagtcgagtgggtctgtcttttccatttcttccatcaccaggtcagaaccaaggctgtgactggttcttcaatagccagctgaggcaactcacctatctggtttcaggtgaaggccaagttcaagtcattctccgggtgaaggaaggtatgcccccaactatttcagcttctacctctgcccctgaatcagctttaaaatggtccctccctgaaacatggcaaggtgttgaagaaggctggggaggatacaacaataccattccaggccctggggatgacgttctcattttacccaacagaactgtccttgtggatacagatcttccattcttcaaagggctgtatgtgatggggaccttagacttccctgtggacagaagcaatgttctgagtgtggcatgcatggtcattgcaggcggggagctgaaagttggtactttagaaaatcccttagaaaaggaacaaaagcttctgattctccttagagcctcagagggagtcttttgtgaccgtatgaatggaattcatattgacccaggaacaattggggtttatgggaaagttcatctttacagtgcttatcctaagaactcctggacacatcttggagctgatattgcctcaggaaatgagagaattatagtagaagatgcagtggattggcgcccccatgacaaaatagtccttagctcctcttcttatgagcctcatgaagcagaggtcctcactgtgaaagaagtcaagggccaccatgtgaggatctatgaacggctcaaacaccggcatattggaagtgtacatgtcacggaggatggccgacacattcgtttggctgctgaggttggactgttgacccgaaatatacaaattcagcctgacgtatcatgtagggggagactgtttgtggggtccttcaggaagtccagccgagaagaattttcaggtgtccttcaacttcttaatgtggaaattcagaacttcgggtcaccattgtactcatctgttgaattcagtaatgtgtcagcaggatcctggatcatatcatctactctgcaccagagctgtggcgggggcattcatgcagctgccagtcatggagtacttttaaatgacaatattgtgtttggcacagctggccatggcatagatttagagggtcaggcctatactgtcactaataaccttgtggttctgatgacacagccagcgtggtccaccatttgggtggcgggaatcaaagtgaaccaggtaaaggacatcaacctccatggcaacgttgtggcaggatcagagagacttggctttcacatccgaggccacaagtgctcctcttgtgaactgctttggtctgacaatgtggcgcattcaagtcttcatggccttcatctctataaggaaagtggacttgacaactgtaccagaatctctggcttcttggctttcaagaactttgactatggtgccatgttacatgtagagaacagcgtggagatagagaacattactctggtagacaatactattggtcttttggcagtagtgtatgtattttctgctccacaaaattccgtcaaaaaagtgcagattgtgcttaggaattcagtcattgtggccaccagctcttcttttgactgcattcaggacaaagtgaagccgcactcagccaacttgacatcaacagatagagctccctccaatccaagaggaggtcgaattggtattctgtggcctgtattcacctcagaaccaaatcagtggcctcaggagccatggcacaaagtgaggaatgatcattcaatttcaggaatcatgaaacttcaagatgttaccttttctagttttgtgaagagttgctatagcgatgacctggatgtctgcattctaccaaatgcagagaacagtggaattatgcacccaataacagcagagaggaccaggatgctaaagataaaagataaaaacaagttctactttccttcattacaacccaggaaagatttaggaaaagtagtctgtcctgaattagactgtgcaagtccaagaaaatatctcttcaaggatctggatgggagagccctgggtctgcctccaccagtttctgtatttcctaaaacagaggcagaatggactgcatccttcttcaacgcaggtacatttagagaagaacagaaatgtacataccaatttctgatgcaaggattcatctgcaaacagactgaccaagtggtcctaattcttgatagcgctgatgccatttgggcaattcagaagttatatccagttgtatctgtgactagtggttttgttgatgtctttagcagtgtaaatgccaatattccctgctctacttctgggtcagtgtctactttctattctatcttacccatcaggcaaatcaccaaagtctgcttcatggatcaaactcctcaagttttgcgcttttttctattggggaacaaaagtacctccaagcttctcttggctgtattctaccatgagctccagagcccccacgtcttcttaggggaaagttttattccacccactctggttcagtcagcttccttattgctgaatgaatctattggtgccaactatttcaacatcatggataacctcttgtatgttgtcctacaaggagaggagcccattgaaatacgctcaggtgtttccattcacttggccctcactgtgatggtttcagtcttagaaaaaggctgggaaatagtaatactcgaaagactaactaacttcttacagattggccaaaaccaaatcaggtttattcacgagatgcctggccatgaagagaccttaaaggccattgctgacagtagagcaaaaagaaagcgcaattgccctactgtgacttgcactagtcattatagaagagttggtcaacgtaggcctctcatgatggaaatgaactcacatagggcttcacccccaatgactgtggaaactatctcaaaagtgattgtcattgaaattggtgattcgccaacagtaaggagcactggaatgatttcatccttatcaagtaacaaattacagaatttggctcatcgagtcatcactgctcaacagactggggtactagagaatgttctgaatatgactatcggggccttactagttactcagtcaaagggagtcattggctatggaaatacaagcagttttaaaactgggaacttgatatatattcggccctatgcactttccatcctagtccagccttcagatggagaagtgggaaatgagcttccagtgcagccacaattggtatttttggatgagcagaatcgaagagtagagtccctgggacctccttcagagccatggacaatttcagcttccctggaaggagcatcagactcagtgctaaaagggtgcacccaggcagaaactcaagatggttatgttagcttctacaacttggcagtcttgatctctgggtcaaactggcactttatttttactgtcacttctcctccaggagtcaattttacagctcgatccaagccatttgctgtcttgcctgtgactaggaaggagaagtcgaccatcatcctggctgcttccctgtcctctgtggcctcatggctggctctgagctgtctggtgtgctgttggcttaaaagaagcaaaagcagaaaaacaaaacctgaagagattcctgaatcccagactaataatcaaaatattcatatccacatctcatccaaacgccgagaatcacaagggcccaaaaaagaagacactgtggtgggagaagatatgagaatgaaggtcatgctgggcaaggtgaaccagtgcccccaccagttgatgaatggagtgtccagaaggaaagttagccgccacattgtccgagaggaagaggctgctgtgcctgctcctggtactactggcatcacatcccatgggcacatctgtgctccaggtgctcctgctcagcaggtgtacctgcaagagactgggaactggaaggagggccaagagcagttgctcagataccagctggcaggccaaaatcagctgctgctgctatgcccagacttcagacaagagaggcagcagttgccagggcaaagtcggctgagtaagcaaagtggcagcttggggctttcccaagagaagaaagcctcctgcggggccactgaggcattctgccttcattcagtacacccggaaactattcaggagcaactgtgatcagggaagttgggggcatttggcctgaaaggcagaatgttcccagtatttctggataataagctggggaagtgaggactgtcctgctgggacaactaagaagagagaatgtggactctgaatccctttttcaactttaaaatggaaaacagtcatataaatgcttacagactgaaaaatgtctcatacatattttgcagctatcatgatcctagttcaatgctaggcaaataatggcacttgttaattatttaccagtttttaacttaagcctgattttaacaacttgataatggtgtaatactgacttataccagcaggggttattattaagcattctctggattgaccacccacaatgctttgagcttcttttatagaagggatcatgaaaaggtctggtcagctacagtttaattccacactgttacagaaaagcatttctttatcctgtagtagcatttgaagggacagttcaacaccctgctccctgatctgtcagagcttaccttccaaccacaaggcaacttcctggctttttacaagtggattttatttcatggtttaaattcaatcattattgagaacctacagtagtgtgagcgtatcaaatttgcacttcatgaggatttacacatgaaaattgatattctcatgggctttgctgagagtttagttaaggacaaagatgtaaaaatgccaaatttgggaaaggaaattttgtatgaccactgttctatttttcagtgattctctctgttagtagctgggtcacatttacaactggaaaagaactacattgggagatcagagaaagccaagtggccaagtcctttatcaaaaagctgctttttggagaagatgatgcataaagctgtgatactaaggagaggagagattatgtcatatgcaactgctctaggctgtgcagggggtttaaatggagatcagaacaaaggctcacctggtattgatacatttggtaaggttgttaaaggcaatttcaccaaattcacacatttgtacggggcccatttcttttcaaactgaagaatactttaaacagcctgactgtgtccttggctctggatccagaaggccttatgctccaagcatgtaaagaaaagatcgcaggaatgtggagagcttccaaaaagagattgctctcagattttcctgaaaatcctgaaaaccaggattttccaatctctacaatgttaaggggttgttgtgtagttgcattggaagagagaaaggaaacacactctttcattgctgaattctaaataatgatgccctgaattagttctatgagaagtactggcagacagctgttatgtctgcagggcatcaaggggcaggtgtgtctcaccctactaagaattggcagaaatgttttaacctcttctttaggcatctggtgagtattgcagatcttcaggctgtccctaaaaggaggtaggtagccttctctgtggtcactgtgttggatttggaagaaaatataagtagatgttaaggtcagtgctctccaggagatttcaatccaggctatctgtgttcagggaatgatttgcaagaagttggtttatagacgtttactctggaggcacaagctggctgccatgctgagtaagtcctctttgtagatgatgtattttgcttgggcaccaacagaattaaaaacgaaaaacaaaaaaaaactcgaatgacttaggcagaacatgccttccctagtttaattagtccctgttataaccagttatttatctttttttgtagattctcggtcttgaagtcatttgcctttgcaatctctactttagtatactcattggatcctcaaagagccgtaagctttttggaaaaaaacatttcagaagtgaaggcttttgaggtttataaaatggtagcagtcttagtccttgccctgcctcagtttacctgcacatgctttctttcatttcctcggattctttcaccactttttaagttttttttccacaggtatttttcctgagctctataccatgcatttagctgcctagtgagaatatccagtaggttatcctatagttactatgaagttaacacagcccaaaaacctacttctccttgtgtttttttccaactcaatgaatgacatcactgcactcagaccagaaatctagaagtcagtcatgactcttcattctatttcgcccttcacaaagagttagctgccagctctgttatttctgccccttctttacccttcttccaatttttattatcttcttatttatcctctatgtgtcacaagaccagtctttctgggaggcatgttttatcctatccctctgcgtaggaataaccataattatcttactaattccatcccagaaaagcctgtgatccctgaggccagaattgactctttgggcctaaatagcagctataaacatcttcagtaacttgccaggctctagcatgtggcatggaattttggcatctagctaaaattcctcaacccatagttaagctactcctctttctcctaaaaaaaaaaaaaaatgagagaattagggaaacaccaaaagcaaagagagcagctctatgttcattcatgtctggagatgagccaatttgagcaccactgtaggccaactctaaatttattcagatcgttaacatgggtaacccagcaaatatttcccagcagtgacaatctacaccctttatctaaataaatattgagatgtgcttttttcctgtgttagttcaaagaatctcttcttgcctcccattgctgattttctgtattgatggactcatttctctcaagagattggacaagctaaaattctagagagttcaaaagtgtttgaaagtacattttaagtgttctcaccacaaaaaatgctagtgtgtgaggtgatacatatgttaattagttcaactgatccattccacaatgtatacatatttcaaactatcgagttgtacatgataaatatatacaatttttatttgtcaaataaagaacatctataaatatttatagatttcaaaattgagaaagaagtatatatggagccacggttgttttgaccatttctccatgctttttgtttggggagggggacattttttggggggcagggactgtgttcagggaaagtacctgaccaacagaacttcaagtctcttccagagtgcgagactcagcttatctgatcaaggtgaacttgcccttcaatagacttgcccttgttactgcccagtgaggccaccaaggaccaagaacagttgagctctctcagggccttcccctttcaacaatttagttgaatgactcccttccatctatcagtcttactccaaatatatgaaattactatacattgaaatgcctgcaaactatatgcaaaaatgagtatgaggaaatcaaatgtaaatcatatgcaaatattattcaaccaagcttctataaaattgtacgtgtcaataacagtaaagaattttaattaattctgtcatttaaaattcatgcattccatattttgctttcagaacttatagtctatgccaattttgaaaaaactataagcacaaggaattaaatactattgagtatagaactgttgatttcaacatacactatagcactttgactaattacagatatatttgatagaaaagtcacatttctacaaggtaattttcaaaaagaaataaaacatttctgtaaacttaaatgtggattaagtggcagaatacagagatttgaatgtttacaaat

SEQ ID NO: 22942 - DNA, 10464 bp, Homo sapiens
  source 1..10464: mol_type = unassigned DNA
acatttggctgggacacaaacgagttaggtgagttatagtctaacgtgagtgagttacctgcgtggtggctgcaggctgagctctaaccagataacatgtccacggattcttgacagagagaaataagatcacttagaaagaaaggatcatttctcccttgagtcacaaggagacagaaacagaaaaaaaagcacaaaagctatgctgctccaatcaaaactgaaaatgcttttaatgtctgagcaatcttaagagtattgatttaagtggacagaatgactgcctggctgatctctctgatgagtattgaagtactacttttggcagtacgtcacctgagtttacatattgaacctgaagaaggtagccttgcagggggaacgtggatcacagtcatttttgatggtttggagttgggtgttctttaccccaacaatggctctcaattggagatacacctggtgaacgtgaacatggtggtgcccgcactgcggagtgttccctgtgacgtctttcctgttttcttggatttgcctgtggtgacatgccggaccagatctgtgctgtctgaagcacatgagggtctgtacttcctggaagcatacttcgggggacagctggtaagcagtccaaatccaggaccacgagatagctgtactttcaagttttccaaggcgcagacacccatcgttcaccaagtttatccaccaagtggtgttccaggaaaactaatacatgtatatggctggattatcactggaagattggaaacttttgattttgatgctgagtacattgatagcccagtgatcttggaagctcaaggagacaaatgggttactccttgctctcttataaataggcagatgggaagctgttatcctattcaggaggaccatggtcttgggactctgcagtgccatgtggaaggcgactacatcggctcccagaatgttagcttctcagtatttaacaaaggaaagtcaatggtccacaagaaggcatggctgatcagtgctaaacaggatcttttcctataccagacacactcagaaatattatctgtgtttccagaaactgggagccttgggggaagaacaaacatcacaattacaggagacttttttgacaattctgcccaggttaccattgcaggcattccatgtgatattagacacgtgtctcccaggaagattgagtgcaccactcgggctccaggaaaagatgtgaggctcaccacccctcagccaggcaatcgagggcttctttttgaagttggagatgctgttgagggactggaactgactgaagccaccccagggtacaggtggcagattgtccctaatgccagttctccatttgggttttggtcacaggaaggacaacctttcagagcacggctcagtgggttctttgtggctccagagacaaataattacactttctggattcaggcagatagccaagcttccttgcatttcagttggtcagaggaaccaaggactaaggtgaaagtggcctccatcagcgtcggcactgctgactggtttgactcctgggagcagaatagggatgaagggacctggcagcagaagactcccaagttggagctgttgggtggagccatgtactacctggaagcagagcatcatgggatagccccaagcagggggatgaggattggtgtccagattcacaacacctggctgaatcctgatgtggtcaccacttacctacgggagaagcaccagatccgagtccgagcccagaggcttccagaagtacaggtgctgaatgtatcaggcagaggaaacttcttccttacttgggacaatgtctctagtcagccaatccctgcaaatgccacagcccatctgattcaaacaaccattgaggagttacttgcagtaaaatgcaaactggaacccctttggtctaacatccttctccggcttggatttgaacgaggcccagaagtttccaactctgatggggacctcaccagtgggacggagcccttctgtggcaggttcagcctccgtcagcctcgacaccttgtccttactcccccggctgcccagaagggctatcggctagatcagtatacacacctgtgtcttgcatacaaaggccacatgaacaagatcctgaagatgattgtgtccttcacaatcggctttcaaaacatggtaaagaataccacctgtgactggagtctcacgaggaccagccccgagagctggcagttcgattgcactgacctctgggagacttgtgtgcgttgcttcggggatctccagccccctccggcaaactccccagtgctggttcatcagatcaaccttctccctctggcccaggagacgggcctgttctatgtggatgaaattattattgcagacacaaacgtaacagtttctcaagctgattctggaacggctcgcccagggggcaatctggtggaatcagtctctgtggtgggatcccctccggtctacagtgtcacctcctggctggcggggtgtggcacggagctcccgctcatcactgcacgctctgtgcccactgaaggaacagaagagggatctggactggtcctggtgacgacacagagacgacagcggacaagtccacctctaggaggacactttcgcatccagcttcctaatacagtgatttctgatgtccctgtacaaatttctgctcatcaccttcaccagctcttacagaataatgccgatgacttcacatccaggtacctcaatgccagtgacttcactgtgaaggaggatctatacacttgctacgaacacgtgtggaccttgtcctggtccactcagattggggatttgcccaattttatcagggtctctgatgaaaaccttactggagtgaatcctgctgcagccacgcgtgtggtatatgatggtggagtttttcttggacccatatttggagacatgttggctactgccaaccagcatactcaggtggttgtgcgagtgaatgatgtaccagctcattgcccaggttcctgctctttccagtacctccaagggtcaactccctgtgtccattctgtgtggtactccattgatggtgacatcaacctaatgatttacattaccggaactggtttctctggtgactcccagttcttgcaggttacagtgaacaaaacgagttgcaaagttattttctcaaaccagaccaatgtagtctgtcagacagatttgctacctgttggaatgcatcggatcttgatgttggtgagaccctctggtcttgccatcagtgccactggagaagacctcttcctaaatgtgaaacctagactggatatggtggagccttccagagctgcggatattggagggctctgggccaccatccgaggctctagtttggaaggtgttagcctgatattatttggatcttactcgtgtgccatcaatgtcgctacaagcaattcaagcagaattcagtgcaaagttccacccagggggaaagatggacgcattgtgaatgtgactgtgatcagaggggactattctgcagttcttcccagagcatttacatatgtctcttccttaaatccagttattgtgactctgagcagaaacataagcaatatagcaggcggtgagaccctggtcattggagtggcgaggctgatgaactatacggatttggatgtggaagtccacgtccaggatgccttggctccggttcacacacagtcggcttggggcctggaggtggcactgcccccactgccagctggtctccacagaatttccgtctctatcaatggggtcagcattcactcacaaggggttgatctccacatccagtacctcacagaagttttcagcatcgagccttgctgtgggtccctgctgggagggaccatcctcagcatctcaggaataggcttcagcagggacccagctttggtttgggtacttgtgggcaatcggtcctgtgacattgtgaacttaacggaggcgagcatctggtgtgaaaccctgccagccccccagatacccgatgcgggcgctcccactgttccagctgccgtggaggtctgggctggcaacaggttcttcgcccgtggtccttcaccaagcttggtggggaaaggcttcaccttcatgtatgaagcggcagcaacaccagtagtcactgccatgcaaggagaaatcacaaatagcagcctgagcctgcatgtgggaggaagtaacctctccaactcagtcatccttctggggaacctgaactgtgatgttgagacacagtccttccagggcaacgtgagcctgtctggatgctccatccctcttcacagtctggaggctggcatctatcctctccaagtacgtcagaagcagatgggatttgctaatatgtctgtggtgctccagcaatttgcagtgatgcctcggataatggccatcttcccatcgcagggttcggcatgtggtgggaccatacttactgtgagggggttgcttcttaactctagaaggaggtcagttcgggttgacctctcgggtccttttacttgtgtgattttgagtttgggagaccacaccattctctgccaggttagcctggagggtgaccccttgcctggagcttccttctccctgaacgtcacagtcctggtcaatgggctaaccagcgagtgtcaggggaattgcactcttttcataagggaagaggcaagtcctgtcatggatgccttgtccacaaacaccagtgggtctctgaccactgtgctgattaggggtcagaggttagccaccacagctgatgagccgatggtatttgtggatgatcaacttccttgcaatgtaactttttttaatgcaagccacgttgtgtgccagacaagagacttggccccaggaccccactacctgtcagttttttatacaagaaatgggtatgcttgttctggtaatgtttccagacacttctacattatgccccaagtgtttcattattttcctaagaatttcagcttacatggtggaagcctcttgaccatagagggcacaggcctgagaggacagaacaccacgtcagtctatattgaccagcagacctgcctgacggtgaacatcggtgctgagctcatccggtgcattgttcccacagggaatggctctgttgccctggaaatagaggtagatggactttggtatcacataggagtcattggttataacaaggcctttaccccagaattgatctctatttctcagagcgatgacatcttaacctttgcagtggcccagatctcaggagctgcaaacattgacatttttataggaatgtcaccctgtgtgggtgtctctggtaaccacaccgttcttcagtgcgtggtcccttcccttccggccggggagtaccacgtcagaggctatgactgcatcagagggtgggcctcatctgccctggtgttcacctcaagagttattattacagcagtgacggagaacttcggctgcctgggtggaaggctggtgcatgtgtttggagcgggattttctccagggaatgtctcagctgctgtgtgtggtgctccctgccgagtcctggctaatgctacagtgtctgccttcagctgcttggttctgcccctggatgtgtccttggccttcctgtgtggcctgaagcgtgaggaggacagctgtgaggctgccagacacacctatgtgcagtgtgatttgacagttgccatggcgacagagcaactgcttgaatcgtggccttacctctacatttgcgaggaaagttcccaatgcctctttgtgccagatcattgggcagagtcaatgtttccatcattctcgggcctctttatcagccctaaattggaaagagatgaagttctcatctataatagctcctgtaacattaccatggaaactgaggcagagatggagtgtgagacgcccaatcagccaattaccgtcaagattactgagatacggaaacgctggggccagaacactcagggcaacttttctttacagttctgccggagatggtccaggactcacagctggtttcctgaaaggctgccacaagatggcgacaacgtcacagtggagaatggccaattgcttctgctggacactaacacaagcatcctcaacttactgcacattaaagggggcaagctgattttcatggccccaggacccatcgagctcagggcacacgccatccttgtttctgatggtggagagctccggattggatccgaagacaagcccttccaaggcagagctcagatcacactctacgggagttcctactcaactcccttctttccctatggagtcaagttcctggctgtgaggaatggaactctttctctgcacggttcactaccagaagtaattgtcacctgtcttagagcaactgcccatgccctagacacagtgctggctttagaagatgctgtggactggaaccctggggatgaagttgtcatcatcagtggaacaggtgttaaaggtgccaaaccgatggaagagattgtcactgtggaaactgtgcaggatacagacctctatcttaagtcacctttgagatattctcacaactttacagagaattgggtggctggagagcaccatattttaaaggccactgtggctctgctcagcaggagtattaccatacaaggaaatctcactaatgagagggagaagctgcttgtttcatgccaggaggccaatgctccagaaggtaatctgcagcactgtttgtattccatgagtgagaagatgctaggatccagggatatgggagccagagtgatcgttcagtccttcccagaagagcccagccaggtccagttgaagggagtgcagtttcaagtcttggggcaagccttccataagcatctgagctcactcactctggtgggagctatgagagagtctttcatacagggctgcacagtgaggaactccttcagtagaggcctcagcatgtgcgggaccttgggcctgaaggtggacagtaatgtattctacaatattttaggtcatgcgctgctagttgggacatgcacggagatgagatatatctcctgggaggcaattcatggaaggaaagatgactggtcaggacatggaaatataataagaaacaacgtgatcatccaggtttctggtgccgagggactctccaatcctgaaatgttgacaccatctggcatctatatctgcagtcccaccaatgttatagaggggaacagagtgtgtggtgctggctatggctactttttccatctcatgaccaaccaaacatcacaagctccgcttctttccttcactcagaacattgcacattcttgtaccaggtatggtctctttgtataccctaaatttcagccaccttgggataatgtcactggcaccactctgttccagagcttcacagtttgggaaagtgcaggtggtgcccagatttttagaagtagcaatcttcgcctgaaaaacttcaaagtttattcatgcagagattttggaattgacgtcttggaaagtgatgcaaatacttcagttactgacagcttattacttggtcattttgcccacaagggaagtctgtgtatgtcatctgggattaaaactcctaaaagatgggaactgatggtgtctaacacaacctttgttaattttgatctcatcaactgtgtggccattagaacctgttcagactgttcccaaggacaaggtggatttactgtgaagaccagccagttgaagtttacaaactcttcaaacttagtggcatttccatttcctcatgcagcaattttggaagacttggatgggtctctgtctgggaaaaacagaagtcacattcttgcttctatggaaaccctttcagcttcttgtttggtcaattcaagctttggtcgggttgtccatggcagtgcctgtggaggaggtgttctttttcatcgtatgtctattggtttagcgaatactcctgaagtttcttatgatttaaccatgactgacagcagaaataaaacaaccactgtcaattatgtacgtgatacattgtctaaccctcgtggctggatggctctgctcttggaccaagagacctactcattgcaatctgagaacctttggatcaacagatctctgcagtactcagcaacctttgacaactttgctcctggtaattacctactgctggtgcacacagatttgccgccttaccctgacatcctcctaagatgtgggagtcgagtgggtctgtcttttccatttcttccatcaccaggtcagaaccaaggctgtgactggttcttcaatagccagctgaggcaactcacctatctggtttcaggtgaaggccaagttcaagtcattctccgggtgaaggaaggtatgcccccaactatttcagcttctacctctgcccctgaatcagctttaaaatggtccctccctgaaacatggcaaggtgttgaagaaggctggggaggatacaacaataccattccaggccctggggatgacgttctcattttacccaacagaactgtccttgtggatacagatcttccattcttcaaagggctgtatgtgatggggaccttagacttccctgtggacagaagcaatgttctgagtgtggcatgcatggtcattgcaggcggggagctgaaagttggtactttagaaaatcccttagaaaaggaacaaaagcttctgattctccttagagcctcagagggagtcttttgtgaccgtatgaatggaattcatattgacccaggaacaattggggtttatgggaaagttcatctttacagtgcttatcctaagaactcctggacacatcttggagctgatattgcctcaggaaatgagagaattatagtagaagatgcagtggattggcgcccccatgacaaaatagtccttagctcctcttcttatgagcctcatgaagcagaggtcctcactgtgaaagaagtcaagggccaccatgtgaggatctatgaacggctcaaacaccggcatattggaagtgtacatgtcacggaggatggccgacacattcgtttggctgctgaggttggactgttgacccgaaatatacaaattcagcctgacgtatcatgtagggggagactgtttgtggggtccttcaggaagtccagccgagaagaattttcaggtgtccttcaacttcttaatgtggaaattcagaacttcgggtcaccattgtactcatctgttgaattcagtaatgtgtcagcaggatcctggatcatatcatctactctgcaccagagctgtggcgggggcattcatgcagctgccagtcatggagtacttttaaatgacaatattgtgtttggcacagctggccatggcatagatttagagggtcaggcctatactgtcactaataaccttgtggttctgatgacacagccagcgtggtccaccatttgggtggcgggaatcaaagtgaaccaggtaaaggacatcaacctccatggcaacgttgtggcaggatcagagagacttggctttcacatccgaggccacaagtgctcctcttgtgaactgctttggtctgacaatgtggcgcattcaagtcttcatggccttcatctctataaggaaagtggacttgacaactgtaccagaatctctggcttcttggctttcaagaactttgactatggtgccatgttacatgtagagaacagcgtggagatagagaacattactctggtagacaatactattggtcttttggcagtagtgtatgtattttctgctccacaaaattccgtcaaaaaagtgcagattgtgcttaggaattcagtcattgtggccaccagctcttcttttgactgcattcaggacaaagtgaagccgcactcagccaacttgacatcaacagatagagctccctccaatccaagaggaggtcgaattggtattctgtggcctgtattcacctcagaaccaaatcagtggcctcaggagccatggcacaaagtgaggaatgatcattcaatttcaggaatcatgaaacttcaagatgttaccttttctagttttgtgaagagttgctatagcgatgacctggatgtctgcattctaccaaatgcagagaacagtggaattatgcacccaataacagcagagaggaccaggatgctaaagataaaagataaaaacaagttctactttccttcattacaacccaggaaagatttaggaaaagtagtctgtcctgaattagactgtgcaagtccaagaaaatatctcttcaaggatctggatgggagagccctgggtctgcctccaccagtttctgtatttcctaaaacagaggcagaatggactgcatccttcttcaacgcaggcacaaaagaacaaagcattgaaattaatgtc

SEQ ID NO: 22943 - DNA, 13076 bp, Homo sapiens
  source 1..13076: mol_type = unassigned DNA
gggacgaagcgggcccgccagcgagtcgcagtcccaggagccgagctccagcactagagccagctgcgagcggagggcaccaactccgcagaactggcttttcaatgggacacctgtggctcctgggtatttggggcctctgtgggctgctcctgtgtgccgcggatcccagcacagatggctctcaaataatccccaaagtcacagaaataatacctaaatatggcagtataaatggagcaacaaggctgactataagaggggaaggtttttctcaagcaaaccagtttaactatggagttgataacgctgagttgggaaacagtgtgcaattaatttcttctttccagtcaattacttgtgatgtagaaaaagatgcaagtcattcaactcaaattacatgctatactagagcaatgccggaagattcctacactgttagagtcagtgtggacggggttcctgttacggaaaataacacctgcaaaggtcacatcaacagctgggaatgtaccttcaacgcaaaaagttttagaaccccaacaataagaagcatcacacctttatctggaactccaggtacactaataacaatccaaggcagaatcttcactgatgtctatggaagtaatattgcactaagctcaaatgggaaaaatgttaggattttgagagtttacattggaggaatgccctgtgagcttctcataccacaatctgataatttatatggtctaaaactggatcatccaaatggagatatgggttctatggtttgtaagacgactggaacttttattggtcatcacaatgtcagcttcatcttagataatgattatggaaggagttttccacagaaaatggcatattttgtttcttctctcaataaaattgcaatgtttcaaacatatgcagaggtcaccatgattttcccttcacaaggaagcattcgaggtggcaccacgctgacaataagtgggcgtttctttgatcagacagatttccccgtcagagttctagttggaggtgaaccttgtgatattttgaatgtcacagaaaatagtatatgttgcaagacaccccccaaacctcatattctcaaaactgtatatccaggagggagaggcctgaagcttgaggtgtggaataatagccgtccaatacgtttggaagagatactggaatacaatgaaaaaacgcctgggtacatgggtgccagttgggtagattcagcttcctatatttggctcatggaacaagacacatttgttgcacgctttagtggatttttggtggctccagattctgatgtttatagattctacatcaagggtgatgaccgttatgctatttattttagccagactggacttccagaagataaggtgaggattgcatatcattctgctaatgccaacagttatttttccagtccaacacaaagatcagatgatattcatctgcagaaaggaaaagaatactatattgaaatcttgctgcaggagtacagattaagtgcatttgttgatgttggactgtaccagtatcgaaatgtttatactgaacaacaaacaggagatgcagtgaatgaagaacaagttatcaaatcccagtcgacaatcctccaggaagtacaggttataacattggaaaactgggaaacaactaatgcaattaatgaggttcagaagatcaaggtaaccagcccatgtgtggaagctaattcatgttcactttaccaatatagattaatctataatatggaaaaaactgtcttcctacctgctgatgcttctgaattcatactgcaatcagccttgaatgacctctggtctataaaaccggacacagttcaagtaataagaacacaaaatccccagagctatgtctacatggtaacattcatatcaactagaggagactttgatctgcttggttatgaagtagttgaagggaataatgtcacactggatattacagaacaaaccaaaggaaaacccaacttggagacattcacactgaattgggatgggatcgcttctaagccactcactctatggtcatcagaagctgaatttcagggagcagtggaagaaatggttagcactaagtgtccaccacaaattgcaaattttgaagaaggatttgttgtgaaatatttcagagactatgaaactgattttaatctggaacatattaacagagggcagaagacagctgaaaccgatgcttactgtggtcgttattccctgaaaaacccagctgttctttttgactcagcagatgttaaaccaaacagacgaccatatggagatattttattgtttccttataatcagttatgtttagcatacaaaggattcctggcaaattatattggtctaaaatttcagtaccaagacaatagcaagattactagaagcactgatacacagtttacatacaactttgcttatggaaacaactggacttacacttgcatagaccttctggatctcgtaagaacgaaatacactgggacaaatgtttctcttcagaggattagcttacataaagcatcagaatcacagtccttctatgtggatgtagtgtacattggacacacatctacaatctcaacattggatgaaatgcccaagagaagacttcctgcattagcaaataaaggaatattcttagagcactttcaggtgaatcagaccaaaacaaatgggccaactatgacaaaccaatattctgttaccatgacttcatacaattgcagttacaatatacccatgatggctgtgagctttgggcagataatcacacatgagacagagaacgagtttgtctacagaggaaataattggccaggcgagtcaaaaattcatattcaaagaattcaagctgcatctccacctctaagtggcagctttgacattcaagcttatggacatattcttaaaggcctccccgctgctgtgtcagctgcagatctgcagtttgcactccagagtctggagggaatgggaagaatctcagttacacgagagggaacctgtgctggctacgcgtggaacatcaaatggagaagcacctgcggaaagcagaatcttctacagattaatgattccaacattattggagaaaaggctaatatgacagttacaaggataaaggaaggtggcttattcagacaacatgtacttggagacctacttcgtacacccagtcaacagccacaggttgaagtctatgtcaatggaattccagctaaatgttcaggtgactgtggatttacatgggattccaacattactcccctagtcttggcgataagcccttctcaagggtcctatgaagaaggcacaattctaaccatagtgggttctggattttctcctagttcagctgtaacagtctcagttggaccagtaggttgttctcttctttctgtggatgaaaaagagctcaagtgccagattctgaatggaagtgctggacatgcccccgttgctgtgtccatggctgatgttggactagcacagaatgtagggggtgaagagttctactttgtttatcagagtcagatctcacatatctggcctgattctggaagcatagcaggtggtactctactgactttatctggatttggctttaatgaaaattcaaaggtattagttggaaatgaaacctgcaatgtgattgaaggggatttgaataggataacctgcaggacaccaaaaaaaactgagggtacagttgatatttcagttactaccaatggatttcaagccacagcaagggatgcttttagttataattgtttacagacaccaattataactgattttagtccaaaagtacgaacaatactaggagaagttaatttaacaattaagggctataattttggaaatgaactcacacaaaacatggcggtgtatgttggaggaaaaacctgccagattcttcactggaacttcacagatattagatgccttttgcccaagttgtctcctggaaaacatgatatctatgtagaagtcagaaactggggttttgcatcaacaagagacaaattaaattcttcaatacagtatgttttagaagtgaccagcatgtttccacaaagaggctccttgtttggtggaactgaaatcaccataaggggttttggattcagcacaataccagctgagaataccgtgctgttagggtccatcccttgcaatgttacatcatcatcagaaaatgtcataaaatgtattcttcattcaactgggaatatattcaggattaccaacaatgggaaagattcagtacatggattaggttatgcctggtcaccaccagtcctaaatgtgtctgtgggggacacagtggcatggcattggcaaacacatccgtttcttagagggataggatataggattttttctgtctccagtcctggaagtgtaatttatgatggcaaaggattcacaagtggaagacaaaaatctacatcaggttcattttcttaccaatttacttctcctggaatccattattatagcagcgggtatgttgatgaggctcactccatttttctccaaggagtcattaatgttttaccagctgaaaccagacacattcccttgcacctgtttgtgggtcgctctgaagccacatatgcttatggaggacctgagaatttgcacttgggaagctctgtggcaggctgcctagcaacagaacccctgtgcagcctgaacaataccagggttaaaaattcaaaaagattgctatttgaggtttcaagttgtttttcaccatctataagcaacattactccgtccactggaacagtaaatgaactaataacaattattggacatggctttagtaatctcccatgggctaataaggttacaattggtagctacccctgtgtcgtagaagaaagtagtgaggattcaattacatgtcatattgaccctcaaaactcaatggatgttggtatcagggaaactgtcactttgactgtctacaacctgggcactgctatcaatacgttgtccaatgaatttgataggcgatttgtacttttgccaaacattgacctggtgttgccaaatgcaggatcaactacaggaatgacaagcgtgaccataaaaggctctggatttgccgtttcttctgcaggtgtaaaagtccttatgggtcatttcccatgtaaagttctatcagtgaattatacggccattgaatgtgaaacatcccctgctgcccaacagcttgtggatgtagatcttctaatacatggagtgcctgcccagtgccagggaaactgcaccttttcatacttagaaagcatcactccttacataacaggagtcttcccaaactctgtcataggatctgtaaaagttcttattgaaggagaaggtttggggactgttttggaggacattgctgttttcattggaaatcaacagttcagagcaatagaggttaatgaaaacaacatcactgctcttgtgactcctctcccagttggacatcattctgttagtgttgtggtgggaagtaaaggcttggctctgggaaacctgactgtcagcagccccccagtagcatctctatcaccaacttctggaagcattggtggtggaactacactggtgatcacaggaaatggcttctatccaggcaacactacagtcactattggggatgaaccttgtcaaattatttccatcaaccccaatgaagtctactgccgcactcccgctgggaccactggaatggtcgatgttaaaatctttgttaatacaattgcttatccacctttgctttttacatatgccctggaggatactccatttctcagaggaattatcccaagcagaggtccaccaggaactgaaattgagatcactggatccaactttggctttgagatcttggaaatctccgtgatgataaataacattcagtgtaatgtaaccatggccaatgatagtgtggtgcagtgcatcgtgggagatcatgctgggggcacatttcctgttatgatgcatcataagacaaaaggctcagccatgtccacagttgtatttgagtacccgcttaatattcaaaatattaatccaagccaagggagctttggtgggggtcaaaccatgactgtgacaggcaccggatttaatccacaaaattcaattatattagtttgtggctcagaatgtgcaattgacaggcttagatctgattacacaacactattatgtgaaattccatctaataatggcacgggagctgagcaagcctgtgaagtgagtgtggttaatgggaaagatttgtcacagtccatgactccgtttacgtacgcagtgtcactgactccactcatcactgcagtatctcctaagagaggcagtacagcagggggcaccagactgacagtcgtgggatcaggattcagtgaaaatatggaggatgttcatatcaccatagctgaagccaaatgtgatgttgagtattccaacaagacacacatcatctgcatgacagatgcccatactctatcagggtgggctccagtttgtgtccacatcagaggtgtcggcatggccaaactggataatgctgactttctttatgttgatgcctggtcctccaatttctcatgggggggaaaatctcccccagaagaaggatctcttgttgttattacaaaaggacagaccattctgctggatcaaagcacccctattttgaaaatgttgcttattcagggtgggactctaatatttgatgaagctgacattgaactccaggcagaaaatattctaattacagatggaggtgttcttcagattggaacagagacatccccattccaacacaaggctgtcattaccttgcatggtcacctgcgatctcctgagctccctgtctatggtgccaaaacactggctgtgcgggagggaatcctggatctgcacggtgtgcctgttcctgtgacctggactcgcttggctcatactgcaaaggcaggggaaagaattttaattttacaagaagcagtaacatggaaaccaggagataacattgtaattgcaagcacaggacacagacacagtcaaggagagaatgaaaaaatgaccattgcatctgtgtctgctgatggcataaacataacactaagtaacccactaaattacacacacttaggaattacggtcacactccctgatggaactctgtttgaagcaagagcagaagttggaattcttacaagaaatattttaataagaggatctgataatgttgagtggaataacaaaattcctgcatgtcctgatggatttgacacaggagaatttgctacacagacctgtctccaaggaaagtttggagaagaaataggaagtgaccaatttggaggctgcgttatgtttcatgctcctgtacctggtgctaacatggtaactgggagaatagaatatgtagaggtattccatgctggccaggctttccggttggggcgatatccaatacattggcacctgcttggagacttacagtttaaatcttatgtaagaggctgtgcaattcaccaggcctataacagagctgttactattcataacacacaccatcttctggttgagaggaatattatatatgatattaagggaggagcattttttatagaagatggtattgaacatggcaatatcctccagtataacttggcagtatttgtacagcaaagtaccagtcttctgaatgatgatgtgaccccggctgcattttgggtcaccaacccgaacaataccatacgacacaatgctgttgctggtggcactcactttggcttttggtaccggatgaacaaccaccctgatgggccatcctatgacagaaacatttgtcaaaaaagagttccccttggcgaattttttaacaatactgtccattctcaaggttggtttggaatgtggatctttgaggaatatttccccatgcaaacgggatcttgtacatctacagtgcctgcacctgcaatatttaactcacttactacttggaattgtcaaaaaggagctgaatgggtcaatggaggtgcccttcagttccataactttgtgatggtgaataactatgaggctggaattgagactaagaggatcctggctccttatgttggagggtggggtgaaaccaatggagcggtgattaaaaatgccaaaatagtcggccatcttgatgaactgggaatggggtctgcattttgcacagcaaaaggcctggttctcccatttagtgaaggcttgactgtctcttctgtgcactttatgaactttgaccgtcccaactgtgtagctttgggagtgacatccatctctggagtttgtaatgacagatgtgggggttggagtgcaaagtttgttgacgtccagtattctcacacaccgaacaaggctggctttcgctgggaacatgaaatggtaatgattgatgttgatggctcacttacagggcacaaaggacataccgtcattccacacagctcattgctagacccttctcattgtactcaggaagctgagtggagcattgggttccctggatcagtctgtgatgcttcagtcagctttcaccgtttagcgttcaaccagccttctccagtatctctgcttgaaaaggatgtggttctttcagactcttttggcacaagcattattccatttcagaagaaacgactgactcatatgtctggatggatggctctgattccaaatgcaaatcacattaactggtattttaaaggtgtggatcacataaccaacatttcatatacatcgacattctatggattcaaggaagaagactatgtaattatatcacataacttcactcaaaatcctgacatgtttaatattattgatatgaggaatggttcctcaaatccattgaattggaatactagcaagaatggggactggcaccttgaagcaaacactagtactctatattacttggtgtcaggaagaaatgaccttcatcagagtcagctcatttctgggaacctggatcctgatgtgaaagacgttgttattaatttccaagcttactgttgtattctccaggattgctttcctgtacatccgccatcaagaaaaccaattcccaagaagcgaccagccacatataatttatggtcaaatgattctttttggcaatcatcacgagaaaataattatactgtacctcacccaggggcaaatgtgattatacctgaaggaacatggattgtagctgacatagatatgccatcaatggaaagactcattatttggggggttctagaactggaagataaatacaatgtaggagctgcagaatcttcttacagagaagttgttttgaatgctacctacatatcactgcagggaggtagattaatcggtggctgggaagataacccttttaaaggagacttaaagattgttcttagaggaaatcatactacacaagactgggctcttccagaaggaccaaatcaaggggcaaaggtcttaggggtgtttggtgagctggatcttcatggaattccacattcaatatataaaactaagctctcagaaactgcatttgcaggttccaaagtcctgtctctgatggatgctgtggattggcaggagggagaagagattgtgataacaaccacaagctacgatttccaccagacagaaacaagaagtatcgttaaaatcctgcatgatcataaaattctcattcttaatgatagcctttcctatactcactttgctgaaaaataccatgtccctggaactggtgagagctacacgttagcagctgatgttgggatactgagtaggaacatcaaaatagttggtgaagattaccccggttggtctgaggactcttttggagcacgcgtactggttggctcattcactgaaaatatgatgacatttaaaggaaatgcaagaataagtaatgtggaattttatcacagtggtcaagaaggcttcagggatagcacagatccaagatatgctgtaacgtttcttaacctaggacagattcaagaacatggctcatcttatattcgaggctgtgcttttcaccatggcttctctccagcaattggtgtatttgggacagatggattggacatagatgacaacatcattcactttacagtgggggaaggcataagaatatgggggaatgccaaccgagtccgagggaatttgattgcactttcggtttggccaggaacctatcagaacagaaaagatttaagttcaactctctggcatgcagcaattgagataaatagagggaccaatacagttttacagaataatgtagtggctggatttggaagagcaggataccgcattgatggtgaaccttgcccaggccagtttaatcctgtggaaaagtggtttgacaatgaagcccatggaggtttatatgggatctatatgaaccaagatggccttcctggatgttctcttatacaaggatttaccatttggacatgctgggattatggaatttattttcagaccacagagagtgtgcacatttataatgtgaccctggttgacaatggaatggccatttttccaatgatttacatgccagctgctatatcacacaaaatttccagtaaaaatgtacaaattaagagctcattaattgttggaagtagccctgggtttaattgctctgatgtcctaactaatgatgatcctaatattgaactcactgctgctcatcggagtcctagatctccatcaggtgggagaagtgggatttgttggcctacctttgcttcagctcataacatggcaccccgaaagccccatgcaggaatcatgagttacaatgccatcagtggccttttggacatctcaggttcaacatttgttggatttaagaatgtttgttcaggggaaactaatgttatattcattactaaccctttaaatgaggatttacagcatccaatccatgtgaagaatataaaactggttgataccactgaacaatcaaaaatatttatacataggcctgatataagtaaggtcaatccatctgattgtgtagacatggtttgtgatgccaagaggaaatcttttcttagagacatagatggctcctttctggggaatgctggttctgtgatacctcaagcagaatatgaatgggacggaaacagccaagtaggaattggagactacagaattcctaaggcgatgctcacattcttgaatggaagtagaattcctgtcactgagaaagcacctcataaaggaattattagagattcaacctgtaagtaccttccagagtggcagagctatcagtgctttgggatggaatatgcaatgatggttattgaaagtctggatcctgacacagaaactcgaagactttccccagtggctataatgggcaacggttatgttgatcttattaatggcccacaggatcatggctggtgtgctggatatacatgccagagaaggctgtccctgtttcacagcattgtggctctgaacaaatcttatgaagtttacttcactggcaccagtcctcagaatcttcgactgatgttgcttaatgttgatcataacaaggctgttctagtaggaattttcttttccacacttcaacgtttggatgtctatgtgaacaacttattggtctgtccaaaaactacaatatggaatgcccagcagaaacactgtgaacttaataaccatctgtacaaagaccaattccttcctaacctggattccactgtccttggtgaaaactactttgatggaacctaccagatgctttatcttttggttaaaggaactatacctgttgaaattcacactgccacagtgatatttgtttctttccaattatctgttgcaacagaagatgacttttatacctctcacaatctggttaaaaatcttgccttgttcctaaagataccaagtgacaaaatccgtatcagcaaaataagagggaagagtctgaggaggaagagatccatgggattcataattgaaatagagattggagaccctcctattcagttcataagcaatggcaccacaggtcagatgcagttatctgaactccaggaaattgctggttctcttggacaagctgtaattttaggaaacatcagtagtatccttggatttaacatttcgtccatgtctattactaatcccctccccagcccaagtgactctgggtggattaaggtgactgcccagccagttgaaaggtctgcatttcctgttcatcacgtggccttcgtgtcctcactcttagtgatcactcagccggtggcagcacagccaggacagccatttcctcagcagccttcggtaaaggcaacagattctgacggtaactgtgtatcagttggaattactgcactaactttgagggccatactcaaggactccaataataaccaagtcaatggccttagtggaaatacaacaattccgtttagcagctgttgggccaactacacagaccttactccccttagaacaggaaaaaattataagattgaatttatactggataatgttgttggggtagaatccagaactttcagcctgctggcagagtctgtctctagcagtggcagcagcagcagcagcaacagcaaagcatcaactgtgggtacatatgcccagataatgactgtagtaattagctgtctggttggaagaatgtggctcttggaaatatttatggctgcagtttcaactttgaatataactttaagaagctactaaagtgctgttccgaagaataggctgaaacaaaaatataagaattattagctactttgttgggcaataggcaaaagtctatagcattttcatgaaaatatactaaaaatatttttatgatatataaaatgtactaattagctttaaacactaaaatcagatttcttcaaaatataaatttgttttgattctttatatttatatgtttttatttcatttcaataaacttccagaaatttgtca

SEQ ID NO: 22944 - DNA, 7660 bp, Homo sapiens
  source 1..7660: mol_type = unassigned DNA
atgaggcctgggcccgctctcctccttctgggcgtgggcctgagcctgagcgtcggccgcctcccgctgccgccggttcctcgcggggcacaagccgccgtctccggggcgcccggtggcctcctcaggggcgccccgggcctcggggtgcgcggcggccgcgccctcctcagtctgcggcccagcgcggtgcgggcgggcggcgctgtcctgagcggccgcggcagcctctgcttcccccatggcgggaccgggcggcgctggtactgcctcgacttgcgcgtcctgctcagcgcccaacgcctgccctggccggccgcgcccgcgctcgcgctcgtcgacctgcagctctccgcgcgcggcggccgcctctccctgacgtggtccgtgcggctgccgcgctcgcccgggcgcctggcctgggccttccgcctgcggctgctcggacccggcgccgcccgcccggcctcccccgcggcccgcgtctccccgcgctccgccgcgccaggcccgcggccccagcagggcttcgtggcccgcaccgagtgccccacagacggccccgcgcgcgtgatgttgcaggccgtcaactcgtccagccacagagccgtcgagtcgtccgtgtcctgtcagataaacgcctgcgtcatccagcgcgtgaggatcaacacggaccagaagggcgcccccgtgcgcctgagcatgcaggcggaggccaccatcaacgcctcggtgcagctggactgcccggccgcgcgcgccatcgcccagtactggcaggtgttctccgtgcccgccgtgggtcaggcgcccgactggacgcagcccttggatctgccccagctcgagatcaggaacagccccttgttcattcacatccccaataattcgttacagtggggagtgtatgtgtttaatttcacggtgtccatcaccacagggaaccccaagatgcccgaggtgaaagactcggacgccgtctatgtctggatcgtcaggagttccctgcaggcggtgatgcttggcgatgccaacataacagctaatttcacagagcagctgattctggacgggtccacgtcctcggacccagatgcggacagcccgttacagggactccagttcttttggtactgtaccacagatcccagaaactacggtggggatcgaataatcctggggagcaaggaagtctgtcaccccgagcaggccaatctgaaatggccctgggcctcgggccctgtactgacacttttgccagaaacacttaaaggcgaccacgtgtatttcttcagaatggtgattcggaaggactctaggacagcgttttctgataagagggtccacgtgctccaaggaccaaaagccatagcacacatcacatgtatcgaaaattgtgagagaaacttcattgtctctgatagattttctttgttcctaaattgcacaaattgtgcaagccgtgatttctataaatggtcaattttgtcttcttcaggtggtgagatgctatttgattggatgggggaaactgtaacaggaaggaatggtgcttatctgtctataaaagcttttgcttttcggcattttttggaagctgagttttcgatttctctgtatctagcatgttggagtggagtgacctcggtcttcaggcattcttttattattaaccatggccctcagatcggagaatgcaaaattaatccagctaaaggaattgcacttattactaaatttgttgtccagtgtagtaattttagggataagcacgtccctcttacatataaaataattgtttctgatttgcacagtgttggtgaaatcagttcagtaaaagagaacaccctggggaccatcctgtacttggggcctcagtccacagtacccccttcctttctccctgttggtatgttggctagtcaatatggcttgaagatatatgcccaggtctatgattctctaggagctttttctcaggtgactttgcatgccaccgcacaggctcccactgacaaaaattcatcaaagacagtgttgaatcagttactcagtttcaccgtgggaccaagttcattgctgtctactttgattcaaaagaaggattttttacctgcaggttacttactgtatatagtagcttccgttttgaataacatgaaaactgaattacctctccgagatgacagagtcaatctccgaaaacacctcatcgatcagtctttccttcttcctgtaagcactttggtagaaattggccaggtagtcatgactattaccaaattaacccagaaaccctctgaattcacttgggatgctcagaaacgtgccaccatgagggtatggcaagcaaatcaagccctacaagagtatcagcaaaaagataaacgctttcgatctgaacaaatagaaatcgtgagtactggaatactaatgagtttgtctaatattcttaaaatgacttctcctcaccaagtagttaaagatcctttctatgtaatagaatctctatcagacacaatactggctaataaagtgccagggaacaaaaccacctcaatgagaacccccaatttcaacatgtatgtcaagaaagttgaaaagtggggtatcaaccagctcttcagaaatgagaaacactgcagaaattgtttttatccaacactcaatgtgagcagtgttcctggtctgtctgcaaatggtcccatttctacaatgttttgtgatttcacaaatgacctctttccttggttaaatgatcaggaaaacacttcggtggaggtgtctggattcagaatgacaggagttgcagataacggtagtgtgctagagatcacacctgatgtagcggaagtgtaccttgtcaggaaaaacttgacctttgcagcttttaatctcacagtgggacccaacagcgaggttgatgggtccttgaagaagacgacaggtgggtttagctttcaagtggacagcacagtgcttagggaggttctggtccacatagtaacagaagtgatggtgctgttcacagtgttggtgtacacaggcagtcagatcactcccacagcgctggtcgccaccttcctggtgcctcatgacatccctccatttgccagccagagtgccctgtttgacccagcctgcacagtgaagaaggcccgtgtagtctgcctccctgtgtccctgctgcaactcatagctcagcacagccactctccccactgtactgtatccatagttctgcaggcacctcgttttgtcatgaagctcaatgacaagctagtgagaatttctattttcagcgtccagtgcttggacatgtatgggatccagagtgaatggagagagggttattgcattcttggtgagaagaccagctggtatgaggtgcactgcatctgcaagaatgtagtaagggctaggcggcagctgggcacaatcggactcacgggcattcacctgcatacccactatgtgatggccaaggtgattgtgatccctaatcctgtggatctacggttaaacatcatcaagagccttcaccaaaaccccgtgaccctcttcactgtgcttttcattattctcttatacgtgggcctagctttttgggctttatacagggatgaaatggaccagcatcttcgggggcatgtgatagttctaccagataatgatccttatgataatttatgctacttggtgactatttttacaggaagtcgttgggggtctgggaccagggccaatgtctttgtgcaacttagaggaactgtgagtaccagcgacgtgcattgtttaagccatccacatttcacaactctctaccgaggtagcatcaacactttcctcctaacgacaaaaagtgacttgggggacatccattccatccgtgtgtggcacaacaacgagggtcgatcgcctagctggtatttaagtagaatcaaagtggaaaatctgtttagcaggcacatttggctgttcatatgccagaaatggctttctgttgataccactttggacagaacatttcacgttacccatccagatgagcgtctgactagaaaagactttttctttatagatgtgagtagtaatctccggaaaaaccacatgtggttctctatttttgctagtgttgttgctaaaacattcaataggctccagagattgtcctgttgtttagcaatgttgcttagctctcttctttgtaacattatgttctttaatctaaatagacaagaacaaactgagtcaagagagaggaaatacatgagatcaatgatgataggaattgaaagtgtcttaattacaatccctgtgcaattattaataacttttttgttcacctgttcccagaggaaacctcaagcggatctaaaggaggtatctcctcaaaagcatcctctaatgtcagaagcaagtgagcactgggaagaatacttgagaaagtggcatgcttacgaaactgctaaggtgcaccccagggaggttgcaaaacctgcatctaaaggaaagcccaggcttccaaaggcttctcctaaggcaacctccaaacccaagcacaggcataggaaagcacaaatcaagaccccggagaccctcgggccaaatacaaattccaataacaacatagaagatgatcaggatgtccattccgaacagcacccttcccaaaaggatctccagcagcttaagaaaaagccccggatcgtcctaccttggtggtgtgtttatgttgcatggtttttggtttttgctacttctagcatatcctcattcttcattgtattttatggactgacttacggctatgacaagtcaatagaatggctctttgcatctttttgttcattctgtcagtcagttcttctggtgcagccatctaaaattatactcctgtcaggcttcagaacgaataaacccaagtattgcaaaaacctttcatggtcaaccaagtataaatatactgagatcaggttggatggaatgcgtatgcatccagaagaaatgcagaggatacatgaccagatcgtccgaatccgaggcacgaggatgtaccaaccccttacagaagatgaaatcagaatattcaaaagaaagaagaggatcaagagaagagcactcctgtttctgagttacattctaactcactttatctttctagcccttctgttgatccttatcgtcttactacgtcacactgactgcttttactataaccagtttattcgtgatcggttctctatggatcttgctactgtgactaagctggaagacatctatagatggctaaacagcgtgctgttgcctttgttacacaatgacctgaatccaacatttcttcctgaaagctcgtctaaaatccttggccttccattgatgaggcaagtgagagcaaaatctagtgaaaaaatgtgtctacctgccgaaaagtttgtgcaaaacagcatcagaagagaaattcattgtcaccccaaatatggcattgacccagaagacacaaaaaactattctggcttttggaatgaagttgataagcaggctatagatgagagtaccaatggatttacttataagcctcaaggaacgcaatggctatattattcctatggactactacacacctatggatctggaggatatgcactctatttttttccagaacagcagcggtttaattccacactgaggctcaaagaacttcaagaaagcaattggctggatgagaagacatgggctgtggttttggaattaacaacttttaatccagatataaatctgttctgtagcatttcggtcatatttgaagtctctcagttaggagttgtcaacacaagcatatctctgcactctttttcacttgctgattttgacagaaaagcttcagcagaaatctacttgtatgtggccattctcatttttttcttagcctacgttgttgatgagggttgtatcattatgcaagaaagagcctcctatgtgagaagtgtgtataatttgctcaactttgctttaaagtgcatatttactgtgttgattgtgctctttctcaggaaacatttcctggccactggcataattcggttttacttgtcgaacccagaagacttcattccctttcatgcagtttctcaggtagatcacattatgaggataattttgggtttcctgttatttctgacaattttgaagaccctcaggtattccagattcttctacgatgtgcgcctggctcagagggccatccaggctgccctccctggcatctgccacatggcatttgttgtgtccgtgtatttcttcgtatacatggcttttggttacctggtgtttggtcagcatgaatggaactacagtaacttgattcattccactcagacagtattttcctattgtgtctcagctttccagaacactgaattttccaataacaggattctgggggtcctgttcctctcatctttcatgctggtgatgatctgcgtcttgatcaacttatttcaggctgtaattctgtctgcatatgaggaaatgaagcagcccgtgtatgaggagccatcggatgaagtggaagcaatgacctatttgtgccgtaagctgagaaccatgttcagctttctgacctcgcaatctaaggccaaagatgagcctgagttctttattgacatgctgtatgggcagccagagaagaacagccaccgttatctggggctgaagaccagaaacatcaacgggaagaaaatggtttaccttgttgtttgatgaatgatggtttcatgagtcacaagcaagcgttcccccaactgctgagtctgtgggattaaggggattagggagtgtcagtggcctagtcatgctttctactcatgtccttcacaaggcacatcccctacatttggaagaatccccaatcttgtcctctgctcttgggagtgtaaaagttgggagtgtagtgtagcatctggggagacagcaggatcacagtgtgggattcctggactgatttccctttagaggggagttatgtgactccccgtacaagggcaaccctgtttctttggtgcctgcagtttagagaaggcagagccactggttttgagaaccagatttgagagagggacctggccagggtggagcattgtctgggtgtttctgcgcttgacccatgctggaagctaatggcctgttgctcctgacagagccccaaactcctcggcctcactgggaggcccctttgtagaccagggctcccctcctcttgttccccctgggcttagggcctcgtggggagttccaggacttgcttcatgcttgagaatgcagatgtggtgcttctcatttattcttaaagctactggtagttaaagtaaaattcagtaacattttctgaccaagagacatgttttgttaaacaacaaaaaggtacatatgggttcacattgaaatatgtctatatgctgaatatagcaacatatgcatctaagatttgggcatttggttattaatagcgtgctggactattcaggaataaggaaaatgtggtttatcacttaagagaaacaagggctggtagctgtactattttcactcagaagcatgttcatttatgtagatgccactttaagctttatcagaattaaatgtgagatttcttctttga

SEQ ID NO: 22945 - DNA, 14138 bp, Homo sapiens
  source 1..14138: mol_type = unassigned DNA
gcactgcagcgccagcgtccgagcgggcggccgagctcccggagcggcctggccccgagccccgagcgggcgtcgctcagcagcaggtcgcggccgcagccccatccagccccgcgcccgccatgccgtccgcgggccccgcctgagctgcggcctccgcgcgcgggcgggcctggggacggcggggccatgcgcgcgctgccctaacgatgccgcccgccgcgcccgcccgcctggcgctggccctgggcctgggcctgtggctcggggcgctggcggggggccccgggcgcggctgcgggccctgcgagcccccctgcctctgcggcccagcgcccggcgccgcctgccgcgtcaactgctcgggccgcgggctgcggacgctcggtcccgcgctgcgcatccccgcggacgccacagcgctagacgtctcccacaacctgctccgggcgctggacgttgggctcctggcgaacctctcggcgctggcagagctggatataagcaacaacaagatttctacgttagaagaaggaatatttgctaatttatttaatttaagtgaaataaacctgagtgggaacccgtttgagtgtgactgtggcctggcgtggctgccgcgatgggcggaggagcagcaggtgcgggtggtgcagcccgaggcagccacgtgtgctgggcctggctccctggctggccagcctctgcttggcatccccttgctggacagtggctgtggtgaggagtatgtcgcctgcctccctgacaacagctcaggcaccgtggcagcagtgtccttttcagctgcccacgaaggcctgcttcagccagaggcctgcagcgccttctgcttctccaccggccagggcctcgcagccctctcggagcagggctggtgcctgtgtggggcggcccagccctccagtgcctcctttgcctgcctgtccctctgctccggccccccgccacctcctgcccccacctgtaggggccccaccctcctccagcacgtcttccctgcctccccaggggccaccctggtggggccccacggacctctggcctctggccagctagcagccttccacatcgctgccccgctccctgtcactgccacacgctgggacttcggagacggctccgccgaggtggatgccgctgggccggctgcctcgcatcgctatgtgctgcctgggcgctatcacgtgacggccgtgctggccctgggggccggctcagccctgctggggacagacgtgcaggtggaagcggcacctgccgccctggagctcgtgtgcccgtcctcggtgcagagtgacgagagcctcgacctcagcatccagaaccgcggtggttcaggcctggaggccgcctacagcatcgtggccctgggcgaggagccggcccgagcggtgcacccgctctgcccctcggacacggagatcttccctggcaacgggcactgctaccgcctggtggtggagaaggcggcctggctgcaggcgcaggagcagtgtcaggcctgggccggggccgccctggcaatggtggacagtcccgccgtgcagcgcttcctggtctcccgggtcaccaggagcctagacgtgtggatcggcttctcgactgtgcagggggtggaggtgggcccagcgccgcagggcgaggccttcagcctggagagctgccagaactggctgcccggggagccacacccagccacagccgagcactgcgtccggctcgggcccaccgggtggtgtaacaccgacctgtgctcagcgccgcacagctacgtctgcgagctgcagcccggaggcccagtgcaggatgccgagaacctcctcgtgggagcgcccagtggggacctgcagggacccctgacgcctctggcacagcaggacggcctctcagccccgcacgagcccgtggaggtcatggtattcccgggcctgcgtctgagccgtgaagccttcctcaccacggccgaatttgggacccaggagctccggcggcccgcccagctgcggctgcaggtgtaccggctcctcagcacagcagggaccccggagaacggcagcgagcctgagagcaggtccccggacaacaggacccagctggcccccgcgtgcatgccagggggacgctggtgccctggagccaacatctgcttgccgctggacgcctcctgccacccccaggcctgcgccaatggctgcacgtcagggccagggctacccggggccccctatgcgctatggagagagttcctcttctccgttcccgcggggccccccgcgcagtactcggtcaccctccacggccaggatgtcctcatgctccctggtgacctcgttggcttgcagcacgacgctggccctggcgccctcctgcactgctcgccggctcccggccaccctggtccccgggccccgtacctctccgccaacgcctcgtcatggctgccccacttgccagcccagctggagggcacttgggcctgccctgcctgtgccctgcggctgcttgcagccacggaacagctcaccgtgctgctgggcttgaggcccaaccctggactgcggctgcctgggcgctatgaggtccgggcagaggtgggcaatggcgtgtccaggcacaacctctcctgcagctttgacgtggtctccccagtggctgggctgcgggtcatctaccctgccccccgcgacggccgcctctacgtgcccaccaacggctcagccttggtgctccaggtggactctggtgccaacgccacggccacggctcgctggcctgggggcagtgtcagcgcccgctttgagaatgtctgccctgccctggtggccaccttcgtgcccggctgcccctgggagaccaacgataccctgttctcagtggtagcactgccgtggctcagtgagggggagcacgtggtggacgtggtggtggaaaacagcgccagccgggccaacctcagcctgcgggtgacggcggaggagcccatctgtggcctccgcgccacgcccagccccgaggcccgtgtactgcagggagtcctagtgaggtacagccccgtggtggaggccggctcggacatggtcttccggtggaccatcaacgacaagcagtccctgaccttccagaacgtggtcttcaatgtcatttatcagagcgcggcggtcttcaagctctcactgacggcctccaaccacgtgagcaacgtcaccgtgaactacaacgtaaccgtggagcggatgaacaggatgcagggtctgcaggtctccacagtgccggccgtgctgtcccccaatgccacgctagcactgacggcgggcgtgctggtggactcggccgtggaggtggccttcctgtggacctttggggatggggagcaggccctccaccagttccagcctccgtacaacgagtccttcccggttccagacccctcggtggcccaggtgctggtggagcacaatgtcatgcacacctacgctgccccaggtgagtacctcctgaccgtgctggcatctaatgccttcgagaacctgacgcagcaggtgcctgtgagcgtgcgcgcctccctgccctccgtggctgtgggtgtgagtgacggcgtcctggtggccggccggcccgtcaccttctacccgcacccgctgccctcgcctgggggtgttctttacacgtgggacttcggggacggctcccctgtcctgacccagagccagccggctgccaaccacacctatgcctcgaggggcacctaccacgtgcgcctggaggtcaacaacacggtgagcggtgcggcggcccaggcggatgtgcgcgtctttgaggagctccgcggactcagcgtggacatgagcctggccgtggagcagggcgcccccgtggtggtcagcgccgcggtgcagacgggcgacaacatcacgtggaccttcgacatgggggacggcaccgtgctgtcgggcccggaggcaacagtggagcatgtgtacctgcgggcacagaactgcacagtgaccgtgggtgcggccagccccgccggccacctggcccggagcctgcacgtgctggtcttcgtcctggaggtgctgcgcgttgaacccgccgcctgcatccccacgcagcctgacgcgcggctcacggcctacgtcaccgggaacccggcccactacctcttcgactggaccttcggggatggctcctccaacacgaccgtgcgggggtgcccgacggtgacacacaacttcacgcggagcggcacgttccccctggcgctggtgctgtccagccgcgtgaacagggcgcattacttcaccagcatctgcgtggagccagaggtgggcaacgtcaccctgcagccagagaggcagtttgtgcagctcggggacgaggcctggctggtggcatgtgcctggcccccgttcccctaccgctacacctgggactttggcaccgaggaagccgcccccacccgtgccaggggccctgaggtgacgttcatctaccgagacccaggctcctatcttgtgacagtcaccgcgtccaacaacatctctgctgccaatgactcagccctggtggaggtgcaggagcccgtgctggtcaccagcatcaaggtcaatggctcccttgggctggagctgcagcagccgtacctgttctctgctgtgggccgtgggcgccccgccagctacctgtgggatctgggggacggtgggtggctcgagggtccggaggtcacccacgcttacaacagcacaggtgacttcaccgttagggtggccggctggaatgaggtgagccgcagcgaggcctggctcaatgtgacggtgaagcggcgcgtgcgggggctcgtcgtcaatgcaagccgcacggtggtgcccctgaatgggagcgtgagcttcagcacgtcgctggaggccggcagtgatgtgcgctattcctgggtgctctgtgaccgctgcacgcccatccctgggggtcctaccatctcttacaccttccgctccgtgggcaccttcaatatcatcgtcacggctgagaacgaggtgggctccgcccaggacagcatcttcgtctatgtcctgcagctcatagaggggctgcaggtggtgggcggtggccgctacttccccaccaaccacacggtacagctgcaggccgtggttagggatggcaccaacgtctcctacagctggactgcctggagggacaggggcccggccctggccggcagcggcaaaggcttctcgctcaccgtgctcgaggccggcacctaccatgtgcagctgcgggccaccaacatgctgggcagcgcctgggccgactgcaccatggacttcgtggagcctgtggggtggctgatggtggccgcctccccgaacccagctgccgtcaacacaagcgtcaccctcagtgccgagctggctggtggcagtggtgtcgtatacacttggtccttggaggaggggctgagctgggagacctccgagccatttaccacccatagcttccccacacccggcctgcacttggtcaccatgacggcagggaacccgctgggctcagccaacgccaccgtggaagtggatgtgcaggtgcctgtgagtggcctcagcatcagggccagcgagcccggaggcagcttcgtggcggccgggtcctctgtgcccttttgggggcagctggccacgggcaccaatgtgagctggtgctgggctgtgcccggcggcagcagcaagcgtggccctcatgtcaccatggtcttcccggatgctggcaccttctccatccggctcaatgcctccaacgcagtcagctgggtctcagccacgtacaacctcacggcggaggagcccatcgtgggcctggtgctgtgggccagcagcaaggtggtggcgcccgggcagctggtccattttcagatcctgctggctgccggctcagctgtcaccttccgcctgcaggtcggcggggccaaccccgaggtgctccccgggccccgtttctcccacagcttcccccgcgtcggagaccacgtggtgagcgtgcggggcaaaaaccacgtgagctgggcccaggcgcaggtgcgcatcgtggtgctggaggccgtgagtgggctgcaggtgcccaactgctgcgagcctggcatcgccacgggcactgagaggaacttcacagcccgcgtgcagcgcggctctcgggtcgcctacgcctggtacttctcgctgcagaaggtccagggcgactcgctggtcatcctgtcgggccgcgacgtcacctacacgcccgtggccgcggggctgttggagatccaggtgcgcgccttcaacgccctgggcagtgagaaccgcacgctggtgctggaggttcaggacgccgtccagtatgtggccctgcagagcggcccctgcttcaccaaccgctcggcgcagtttgaggccgccaccagccccagcccccggcgtgtggcctaccactgggactttggggatgggtcgccagggcaggacacagatgagcccagggccgagcactcctacctgaggcctggggactaccgcgtgcaggtgaacgcctccaacctggtgagcttcttcgtggcgcaggccacggtgaccgtccaggtgctggcctgccgggagccggaggtggacgtggtcctgcccctgcaggtgctgatgcggcgatcacagcgcaactacttggaggcccacgttgacctgcgcgactgcgtcacctaccagactgagtaccgctgggaggtgtatcgcaccgccagctgccagcggccggggcgcccagcgcgtgtggccctgcccggcgtggacgtgagccggcctcggctggtgctgccgcggctggcgctgcctgtggggcactactgctttgtgtttgtcgtgtcatttggggacacgccactgacacagagcatccaggccaatgtgacggtggcccccgagcgcctggtgcccatcattgagggtggctcataccgcgtgtggtcagacacacgggacctggtgctggatgggagcgagtcctacgaccccaacctggaggacggcgaccagacgccgctcagtttccactgggcctgtgtggcttcgacacagagggaggctggcgggtgtgcgctgaactttgggccccgcgggagcagcacggtcaccattccacgggagcggctggcggctggcgtggagtacaccttcagcctgaccgtgtggaaggccggccgcaaggaggaggccaccaaccagacggtgctgatccggagtggccgggtgcccattgtgtccttggagtgtgtgtcctgcaaggcacaggccgtgtacgaagtgagccgcagctcctacgtgtacttggagggccgctgcctcaattgcagcagcggctccaagcgagggcggtgggctgcacgtacgttcagcaacaagacgctggtgctggatgagaccaccacatccacgggcagtgcaggcatgcgactggtgctgcggcggggcgtgctgcgggacggcgagggatacaccttcacgctcacggtgctgggccgctctggcgaggaggagggctgcgcctccatccgcctgtcccccaaccgcccgccgctggggggctcttgccgcctcttcccactgggcgctgtgcacgccctcaccaccaaggtgcacttcgaatgcacgggctggcatgacgcggaggatgctggcgccccgctggtgtacgccctgctgctgcggcgctgtcgccagggccactgcgaggagttctgtgtctacaagggcagcctctccagctacggagccgtgctgcccccgggtttcaggccacacttcgaggtgggcctggccgtggtggtgcaggaccagctgggagccgctgtggtcgccctcaacaggtctttggccatcaccctcccagagcccaacggcagcgcaacggggctcacagtctggctgcacgggctcaccgctagtgtgctcccagggctgctgcggcaggccgatccccagcacgtcatcgagtactcgttggccctggtcaccgtgctgaacgagtacgagcgggccctggacgtggcggcagagcccaagcacgagcggcagcaccgagcccagatacgcaagaacatcacggagactctggtgtccctgagggtccacactgtggatgacatccagcagatcgctgctgcgctggcccagtgcatggggcccagcagggagctcgtatgccgctcgtgcctgaagcagacgctgcacaagctggaggccatgatgctcatcctgcaggcagagaccaccgcgggcaccgtgacgcccaccgccatcggagacagcatcctcaacatcacaggagacctcatccacctggccagctcggacgtgcgggcaccacagccctcagagctgggagccgagtcaccatctcggatggtggcgtcccaggcctacaacctgacctctgccctcatgcgcatcctcatgcgctcccgcgtgctcaacgaggagcccctgacgctggcgggcgaggagatcgtggcccagggcaagcgctcggacccgcggagcctgctgtgctatggcggcgccccagggcctggctgccacttctccatccccgaggctttcagcggggccctggccaacctcagtgacgtggtgcagctcatctttctggtggactccaatccctttccctttggctatatcagcaactacaccgtctccaccaaggtggcctcgatggcattccagacacaggccggcgcccagatccccatcgagcggctggcctcagagcgcgccatcaccgtgaaggtgcccaacaactcggactgggctgcccggggccaccgcagctccgccaactccgccaactccgttgtggtccagccccaggcctccgtcggtgctgtggtcaccctggacagcagcaaccctgcggccgggctgcatctgcagctcaactatacgctgctggacggccactacctgtctgaggaacctgagccctacctggcagtctacctacactcggagccccggcccaatgagcacaactgctcggctagcaggaggatccgcccagagtcactccagggtgctgaccaccggccctacaccttcttcatttccccggggagcagagacccagcggggagttaccatctgaacctctccagccacttccgctggtcggcgctgcaggtgtccgtgggcctgtacacgtccctgtgccagtacttcagcgaggaggacatggtgtggcggacagaggggctgctgcccctggaggagacctcgccccgccaggccgtctgcctcacccgccacctcaccgccttcggcgccagcctcttcgtgcccccaagccatgtccgctttgtgtttcctgagccgacagcggatgtaaactacatcgtcatgctgacatgtgctgtgtgcctggtgacctacatggtcatggccgccatcctgcacaagctggaccagttggatgccagccggggccgcgccatccctttctgtgggcagcggggccgcttcaagtacgagatcctcgtcaagacaggctggggccggggctcaggtaccacggcccacgtgggcatcatgctgtatggggtggacagccggagcggccaccggcacctggacggcgacagagccttccaccgcaacagcctggacatcttccggatcgccaccccgcacagcctgggtagcgtgtggaagatccgagtgtggcacgacaacaaagggctcagccctgcctggttcctgcagcacgtcatcgtcagggacctgcagacggcacgcagcgccttcttcctggtcaatgactggctttcggtggagacggaggccaacgggggcctggtggagaaggaggtgctggccgcgagcgacgcagcccttttgcgcttccggcgcctgctggtggctgagctgcagcgtggcttctttgacaagcacatctggctctccatatgggaccggccgcctcgtagccgtttcactcgcatccagagggccacctgctgcgttctcctcatctgcctcttcctgggcgccaacgccgtgtggtacggggctgttggcgactctgcctacagcacggggcatgtgtccaggctgagcccgctgagcgtcgacacagtcgctgttggcctggtgtccagcgtggttgtctatcccgtctacctggccatcctttttctcttccggatgtcccggagcaaggtggctgggagcccgagccccacacctgccgggcagcaggtgctggacatcgacagctgcctggactcgtccgtgctggacagctccttcctcacgttctcaggcctccacgctgagcaggcctttgttggacagatgaagagtgacttgtttctggatgattctaagagtctggtgtgctggccctccggcgagggaacgctcagttggccggacctgctcagtgacccgtccattgtgggtagcaatctgcggcagctggcacggggccaggcgggccatgggctgggcccagaggaggacggcttctccctggccagcccctactcgcctgccaaatccttctcagcatcagatgaagacctgatccagcaggtccttgccgagggggtcagcagcccagcccctacccaagacacccacatggaaacggacctgctcagcagcctgtccagcactcctggggagaagacagagacgctggcgctgcagaggctgggggagctggggccacccagcccaggcctgaactgggaacagccccaggcagcgaggctgtccaggacaggactggtggagggtctgcggaagcgcctgctgccggcctggtgtgcctccctggcccacgggctcagcctgctcctggtggctgtggctgtggctgtctcagggtgggtgggtgcgagcttccccccgggcgtgagtgttgcgtggctcctgtccagcagcgccagcttcctggcctcattcctcggctgggagccactgaaggtcttgctggaagccctgtacttctcactggtggccaagcggctgcacccggatgaagatgacaccctggtagagagcccggctgtgacgcctgtgagcgcacgtgtgccccgcgtacggccaccccacggctttgcactcttcctggccaaggaagaagcccgcaaggtcaagaggctacatggcatgctgcggagcctcctggtgtacatgctttttctgctggtgaccctgctggccagctatggggatgcctcatgccatgggcacgcctaccgtctgcaaagcgccatcaagcaggagctgcacagccgggccttcctggccatcacgcggtctgaggagctctggccatggatggcccacgtgctgctgccctacgtccacgggaaccagtccagcccagagctggggcccccacggctgcggcaggtgcggctgcaggaagcactctacccagaccctcccggccccagggtccacacgtgctcggccgcaggaggcttcagcaccagcgattacgacgttggctgggagagtcctcacaatggctcggggacgtgggcctattcagcgccggatctgctgggggcatggtcctggggctcctgtgccgtgtatgacagcgggggctacgtgcaggagctgggcctgagcctggaggagagccgcgaccggctgcgcttcctgcagctgcacaactggctggacaacaggagccgcgctgtgttcctggagctcacgcgctacagcccggccgtggggctgcacgccgccgtcacgctgcgcctcgagttcccggcggccggccgcgccctggccgccctcagcgtccgcccctttgcgctgcgccgcctcagcgcgggcctctcgctgcctctgctcacctcggtgtgcctgctgctgttcgccgtgcacttcgccgtggccgaggcccgtacttggcacagggaagggcgctggcgcgtgctgcggctcggagcctgggcgcggtggctgctggtggcgctgacggcggccacggcactggtacgcctcgcccagctgggtgccgctgaccgccagtggacccgtttcgtgcgcggccgcccgcgccgcttcactagcttcgaccaggtggcgcagctgagctccgcagcccgtggcctggcggcctcgctgctcttcctgcttttggtcaaggctgcccagcagctacgcttcgtgcgccagtggtccgtctttggcaagacattatgccgagctctgccagagctcctgggggtcaccttgggcctggtggtgctcggggtagcctacgcccagctggccatcctgctcgtgtcttcctgtgtggactccctctggagcgtggcccaggccctgttggtgctgtgccctgggactgggctctctaccctgtgtcctgccgagtcctggcacctgtcacccctgctgtgtgtggggctctgggcactgcggctgtggggcgccctacggctgggggctgttattctccgctggcgctaccacgccttgcgtggagagctgtaccggccggcctgggagccccaggactacgagatggtggagttgttcctgcgcaggctgcgcctctggatgggcctcagcaaggtcaaggagttccgccacaaagtccgctttgaagggatggagccgctgccctctcgctcctccaggggctccaaggtatccccggatgtgcccccacccagcgctggctccgatgcctcgcacccctccacctcctccagccagctggatgggctgagcgtgagcctgggccggctggggacaaggtgtgagcctgagccctcccgcctccaagccgtgttcgaggccctgctcacccagtttgaccgactcaaccaggccacagaggacgtctaccagctggagcagcagctgcacagcctgcaaggccgcaggagcagccgggcgcccgccggatcttcccgtggcccatccccgggcctgcggccagcactgcccagccgccttgcccgggccagtcggggtgtggacctggccactggccccagcaggacaccccttcgggccaagaacaaggtccaccccagcagcacttagtcctccttcctggcgggggtgggccgtggagtcggagtggacaccgctcagtattactttctgccgctgtcaaggccgagggccaggcagaatggctgcacgtaggttccccagagagcaggcaggggcatctgtctgtctgtgggcttcagcactttaaagaggctgtgtggccaaccaggacccagggtcccctccccagctcccttgggaaggacacagcagtattggacggtttctagcctctgagatgctaatttatttccccgagtcctcaggtacagcgggctgtgcccggccccaccccctgggcagatgtcccccactgctaaggctgctggcttcagggagggttagcctgcaccgccgccaccctgcccctaagttattacctctccagttcctaccgtactccctgcaccgtctcactgtgtgtctcgtgtcagtaatttatatggtgttaaaatgtgtatatttttgtatgtcactattttcactagggctgaggggcctgcgcccagagctggcctcccccaacacctgctgcgcttggtaggtgtggtggcgttatggcagcccggctgctgcttggatgcgagcttggccttgggccggtgctgggggcacagctgtctgccaggcactctcatcaccccagaggccttgtcatcctcccttgccccaggccaggtagcaagagagcagcgcccaggcctgctggcatcaggtctgggcaagtagcaggactaggcatgtcagaggaccccagggtggttagaggaaaagactcctcctgggggctggctcccagggtggaggaaggtgactgtgtgtgtgtgtgtgtgcgcgcgcgcacgcgcgagtgtgctgtatggcccaggcagcctcaaggccctcggagctggctgtgcctgcttctgtgtaccacttctgtgggcatggccgcttctagagcctcgacacccccccaacccccgcaccaagcagacaaagtcaataaaagagctgtctgactgc

SEQ ID NO: 22946 - DNA, 12140 bp, Homo sapiens
  source 1..12140: mol_type = unassigned DNA
gcactgcagcgccagcgtccgagcgggcggccgagctcccggagcggcctggccccgagccccgagcgggcgtcgctcagcagcaggtcgcggccgcagccccatccagccccgcgcccgccatgccgtccgcgggccccgcctgagctgcggcctccgcgcgcgggcgggcctggggacggcggggccatgcgcgcgctgccctaacgatgccgcccgccgcgcccgcccgcctggcgctggccctgggcctgggcctgtggctcggggcgctggcggggggccccgggcgcggctgcgggccctgcgagcccccctgcctctgcggcccagcgcccggcgccgcctgccgcgtcaactgctcgggccgcgggctgcggacgctcggtcccgcgctgcgcatccccgcggacgccacagcgctaacggcgatggcaaaagcagatggagacgtgaaaaagtacgggagcaagcgaggggctctggccctgacccacggccactcactcctcagagacgtctcccacaacctgctccgggcgctggacgttgggctcctggcgaacctctcggcgctggcagagctggatataagcaacaacaagatttctacgttagaagaaggaatatttgctaatttatttaatttaagtgaaataaacctgagtgggaacccgtttgagtgtgactgtggcctggcgtggctgccgcgatgggcggaggagcagcaggtgcgggtggtgcagcccgaggcagccacgtgtgctgggcctggctccctggctggccagcctctgcttggcatccccttgctggacagtggctgtggggccaccctggtggggccccacggacctctggcctctggccagctagcagccttccacatcgctgccccgctccctgtcactgccacacgctgggacttcggagacggctccgccgaggtggatgccgctgggccggctgcctcgcatcgctatgtgctgcctgggcgctatcacgtgacggccgtgctggccctgggggccggctcagccctgctggggacagacgtgcaggtggaagcggcacctgccgccctggagctcgtgtgcccgtcctcggtgcagagtgacgagagcctcgacctcagcatccagaaccgcggtggttcaggcctggaggccgcctacagcatcgtggccctgggcgaggagccggcccgagcggtgcacccgctctgcccctcggacacggagatcttccctggcaacgggcactgctaccgcctggtggtggagaaggcggcctggctgcaggcgcaggagcagtgtcaggcctgggccggggccgccctggcaatggtggacagtcccgccgtgcagcgcttcctggtctcccgggtcaccaggagcctagacgtgtggatcggcttctcgactgtgcagggggtggaggtgggcccagcgccgcagggcgaggccttcagcctggagagctgccagaactggctgcccggggagccacacccagccacagccgagcactgcgtccggctcgggcccaccgggtggtgtaacaccgacctgtgctcagcgccgcacagctacgtctgcgagctgcagcccggaggcccagtgcaggatgccgagaacctcctcgtgggagcgcccagtggggacctgcagggacccctgacgcctctggcacagcaggacggcctctcagccccgcacgagcccgtggaggctgggatggggtctgtggagctgaggcggccccctgcccaccaggtcatggtattcccgggcctgcgtctgagccgtgaagccttcctcaccacggccgaatttgggacccaggagctccggcggcccgcccagctgcggctgcaggtgtaccggctcctcagcacagcagggaccccggagaacggcagcgagcctgagagcaggtccccggacaacaggacccagctggcccccgcgtgcatgccagggggacgctggtgccctggagccaacatctgcttgccgctggacgcctcctgccacccccaggcctgcgccaatggctgcactgagggggagcacgtggtggacgtggtggtggaaaacagcgccagccgggccaacctcagcctgcgggtgacggcggaggagcccatctgtggcctccgcgccacgcccagccccgaggcccgtgtactgcagggagtcctagtgaggtacagccccgtggtggaggccggctcggacatggtcttccggtggaccatcaacgacaagcagtccctgaccttccagaacgtggtcttcaatgtcatttatcagagcgcggcggtcttcaagctctcactgacggcctccaaccacgtgagcaacgtcaccgtgaactacaacgtaaccgtggagcggatgaacaggatgcagggtctgcaggtctccacagtgccggccgtgctgtcccccaatgccacgctagcactgacggcgggcgtgctggtggactcggccgtggaggtggccttcctgtggacctttggggatggggagcaggccctccaccagttccagcctccgtacaacgagtccttcccggttccagacccctcggtggcccaggtgctggtggagcacaatgtcatgcacacctacgctgccccaggtgagtacctcctgaccgtgctggcatctaatgccttcgagaacctgacgcagcaggtgcctgtgagcgtgcgcgcctccctgccctccgtggctgtgggtgtgagtgacggcgtcctgagccagccggctgccaaccacacctatgcctcgaggggcacctaccacgtgcgcctggaggtcaacaacacggtgagcggtgcggcggcccaggcggatgtgcgcgtctttgaggagctccgcggactcagcgtggacatgagcctggccgtggagcagggcgcccccgtggtggtcagcgccgcggtgcagacgggcgacaacatcacgtggaccttcgacatgggggacggcaccgtgctgtcgggcccggaggcaacagtggagcatgtgtacctgcgggcacagaactgcacagtgaccgtgggtgcggccagccccgccggccacctggcccggagcctgcacgtgctggtcttcgtcctggaggtgctgcgcgttgaacccgccgcctgcatccccacgcagcctgacgcgcggctcacggcctacgtcaccgggaacccggcccactacctcttcgactggaccttcggggatggctcctccaacacgaccgtgcgggggtgcccgacggtgacacacaacttcacgcggagcggcacgttccccctggcgctggtgctgtccagccgcgtgaacagggcgcattacttcaccagcatctgcgtggagccagaggtgggcaacgtcaccctgcagccagagaggcagtttgtgcagctcggggacgaggcctggctggtggcatgtgcctggcccccgttcccctaccgctacacctgggactttggcaccgaggaagccgcccccacccgtgccaggggccctgaggtgacgttcatctaccgagacccaggctcctatcttgtgacagtcaccgcgtccaacaacatctctgctgccaatgactcagccctggtggaggtgcaggagcccgtgctggtcaccagcatcaaggtcaatggctcccttgggctggagctgcagcagccgtacctgttctctgctgtgggccgtgggcgccccgccagctacctgtgggatctgggggacggtgggtggctcgagggtccggaggtcacccacgcttacaacagcacaggtgacttcaccgggcccggccctggccggcagcggcaaaggcttctcgctcaccgtgaggccggcacctaccatgtgcagctgcgggccaccaacatgctgggcagcgcctgggccgactgcaccatggacttcgtggagcctgtggggtggctgatggtggccgcctccccgaacccagctgccgtcaacacaagcgtcaccctcagtgccgagctggctggtggcagtggtgtcgtatacacttggtccttggaggaggggctgagctgggagacctccgagccatttaccacccatagcttccccacacccggcctgcacttggtcaccatgacggcagggaacccgctgggctcagccaacgccaccgtggaagtggatgtgcaggtgcctgtgagtggcctcagcatcagggccagcgagcccggaggcagcttcgtggcggccgggtcctctgtgcccttttgggggcagctggccacgggcaccaatgtgagctggtgctgggctgtgcccggcggcagcagcaagcgtggccctcatgtcaccatggtcttcccggatgctggcaccttctccatccggctcaatgcctccaacgcagtcagctgggtctcagccacgtacaacctcacggcggaggagcccatcgtgggcctggtgctgtgggccagcagcaaggtggtggcgcccgggcagctggtccattttcagatcctgctggctgccggctcagctgtcaccttccgcctgcaggacacagatgagcccagggccgagcactcctacctgaggcctggggactaccgcgtgcaggtgaacgcctccaacctggtgagcttcttcgtggcgcaggccacggtgaccgtccaggtgctggcctgccgggagccggaggtggacgtggtcctgcccctgcaggtgctgatgcggcgatcacagcgcaactacttggaggcccacgttgacctgcgcgactgcgtcacctaccagactgagtaccgctgggaggtgtatcgcaccgccagctgccagcggccggggcgcccagcgcgtgtggccctgcccggcgtggacgtgagccggcctcggctggtgctgccgcggctggcgctgcctgtggggcactactgctttgtgtttgtcgtgtcatttggggacacgccactgacacagagcatccaggccaatgtgacggtggcccccgagcgcctggtgcccatcattgagggtggctcataccgcgtgtggtcagacacacgggacctggtgctggatgggagcgagtcctacgaccccaacctggaggacggcgaccagacgccgctcagtttccactgggcctgtgtggcttcgacacagagggaggctggcgggtgtgcgctgaactttgggccccgcgggagcagcacggtcaccattccacgggagcggctggcggctggcgtggagtacaccttcagcctgaccgtgtggaaggccggccgcaaggaggaggccaccaaccagacggtgctgatccggagtggccgggtgcccattgtgtccttggagtgtgtgtcctgcaaggcacaggccgtgtacgaagtgagccgcagctcctacgtgtacttggagggccgctgcctcaattgcagcagcggctccaagcgagggcggtgggctgcacgtacgttcagcaacaagacgctggtgctggatgagaccaccacatccacgggcagtgcaggcatgcgactggtgctgcggcggggcgtgctgcgggacggcgagggatacaccttcacgctcacggtgctgggccgctctggcgaggaggagggctgcgcctccatccgcctgtcccccaaccgcccgccgctggggggctcttgccgcctcttcccactgggcgctgtgcacgccctcaccaccaaggtgcacttcgaatgcacgggctggcatgacgcggaggatgctggcgccccgctggtgtacgccctgctgctgcggcgctgtcgccagggccactgcgaggagttctgtgtctacaagggcagcctctccagctacggagccgtgctgcccccgggtttcaggccacacttcgaggtgggcctggccgtggtggtgcaggaccagctgggagccgctgtggtcgccctcaacaggtctttggccatcaccctcccagagcccaacggcagcgcaacggggctcacagtctggctgcacgggctcaccgctagtgtgctcccagggctgctgcggcaggccgatccccagcacgtcatcgagtactcgttggccctggtcaccgtgctgaacgagcaccgagcccagatacgcaagaacatcacggagactctggtgtccctgagggtccacactgtggatgacatccagcagatcgctgctgcgctggcccagtgcatggggcccagcagggagctcgtatgccgctcgtgcctgaagcagacgctgcacaagctggaggccatgatgctcatcctgcaggcagagaccaccgcgggcaccgtgacgcccaccgccatcggagacagcatcctcaacatcacaggagacctcatccacctggccagctcggacgtgcgggcaccacagccctcagagctgggagccgagtcaccatctcggatggtggcgtcccaggcctacaacctgacctctgccctcatgcgcatcctcatgcgctcccgcgtgctcaacgaggagcccctgacgctggcgggcgaggagatcgtggcccagggcaagcgctcggacccgcggagcctgctgtgctatggcggcgccccagggcctggctgccacttctccatccccgaggctttcagcggggccctggccaacctcagtgacgtggtgcagctcatctttctggtggactccaatccctttccctttggctatatcagcaactacaccgtctccaccaaggtggcctcgatggcattccagacacaggccggcgcccagatccccatcgagcggctggcctcagagcgcgccatcaccgtgaaggtgcccaacaactcggactgggctgcccggggccaccgcagctccgccaactccgccaactccgttgtggtccagccccaggcctccgtcggtgctgtggtcaccctggacagcagcaaccctgcggccgggctgcatctgcagctcaactatacgctgctggacggccactacctgtctgaggaacctgagccctacctggcagtctacctacactcggagccccggcccaatgagcacaactgctcggctagcaggaggatccgcccagagtcactccagggtgctgaccaccggccctacaccttcttcatttccccggggagcagagacccagcggggagttaccatctgaacctctccagccacttccgctggtcggcgctgcaggtgtccgtgggcctgtacacgtccctgtgccagtacttcagcgaggaggacatggtgtggcggacagaggggctgctgcccctggaggagacctcgccccgccaggccgtctgcctcacccgccacctcaccgccttcggcgccagcctcttcgtgcccccaagccatgtccgctttgtgtttcctgagccgacagcggatgtaaactacatcgtcatgctgacatgtgctgtgtgcctggtgacctacatggtcatggccgccatcctgcacaagctggaccagttggatgccagccggggccgcgccatccctttctgtgggcagcggggccgcttcaagtacgagatcctcgtcaagacaggctggggccggggctcaggtaccacggcccacgtgggcatcatgctgtatggggtggacagccggagcggccaccggcacctggacggcgacagagccttccaccgcaacagcctggacatcttccggatcgccaccccgcacagcctgggtagcgtgtggaagatccgagtgtggcacgacaacaaagggctcagccctgcctggttcctgcagcacgtcatcgtcagggacctgcagacggcacgcagcgccttcttcctggtcaatgactggctttcggtggagacggaggccaacgggggcctggtggagaaggaggtgctggccgcgagcgacgcagcccttttgcgcttccggcgcctgctggtggctgagctgcagcgtggcttctttgacaagcacatctggctctccatatgggaccggccgcctcgtagccgtttcactcgcatccagagggccacctgctgcgttctcctcatctgcctcttcctgggcgccaacgccgtgtggtacggggctgttggcgactctgcctacagcacggggcatgtgtccaggctgagcccgctgagcgtcgacacagtcgctgttggcctggtgtccagcgtggttgtctatcccgtctacctggccatcctttttctcttccggatgtcccggagcaaggtggctgggagcccgagccccacacctgccgggcagcaggtgctggacatcgacagctgcctggactcgtccgtgctggacagctccttcctcacgttctcaggcctccacgctgaggcctttgttggacagatgaagagtgacttgtttctggatgattctaagagtctggtgtgctggccctccggcgagggaacgctcagttggccggacctgctcagtgacccgtccattgtgggtagcaatctgcggcagctggcacggggccaggcgggccatgggctgggcccagaggaggacggcttctccctggccagcccctactcgcctgccaaatccttctcagcatcagatgaagacctgatccagcaggtccttgccgagggggtcagcagcccagcccctacccaagacacccacatggaaacggacctgctcagcagcctgtccagcactcctggggagaagacagagacgctggcgctgcagaggctgggggagctggggccacccagcccaggcctgaactgggaacagccccaggcagcgaggctgtccaggacaggactggtggagggtctgcggaagcgcctgctgccggcctggtgtgcctccctggcccacgggctcagcctgctcctggtggctgtggctgtggctgtctcagggtgggtgggtgcgagcttccccccgggcgtgagtgttgcgtggctcctgtccagcagcgccagcttcctggcctcattcctcggctgggagccactgaaggtcttgctggaagccctgtacttctcactggtggccaagcggctgcacccggatgaagatgacaccctggtagagagcccggctgtgacgcctgtgagcgcacgtgtgccccgcgtacggccaccccacggctttgcactcttcctggccaaggaagaagcccgcaaggtcaagaggctacatggcatgctgcggagcctcctggtgtacatgctttttctgctggtgaccctgctggccagctatggggatgcctcatgccatgggcacgcctaccgtctgcaaagcgccatcaagcaggagctgcacagccgggccttcctggccatcacgcggtctgaggagctctggccatggatggcccacgtgctgctgccctacgtccacgggaaccagtccagcccagagctggggcccccacggctgcggcaggtgcggctgcaggaagcactctacccagaccctcccggccccagggtccacacgtgctcggccgcaggaggcttcagcaccagcgattacgacgttggctgggagagtcctcacaatggctcggggacgtgggcctattcagcgccggatctgctgggggcatggtcctggggctcctgtgccgtgtatgacagcgggggctacgtgcaggagctgggcctgagcctggaggagagccgcgaccggctgcgcttcctgcagctgcacaactggctggacaacaggagccgcgctgtgttcctggagctcacgcgctacagcccggccgtggggctgcacgccgccgtcacgctgcgcctcgagttcccggcggccggccgcgccctggccgccctcagcgtccgcccctttgcgctgcgccgcctcagcgcgggcctctcgctgcctctgctcacctcggtgtgcctgctgctgttcgccgtgcacttcgccgtggccgaggcccgtacttggcacagggaagggcgctggcgcgtgctgcggctcggagcctgggcgcggtggctgctggtggcgctgacggcggccacggcactggtacgcctcgcccagctgggtgccgctgaccgccagtggacccgtttcgtgcgcggccgcccgcgccgcttcactagcttcgaccaggtggcgcagctgagctccgcagcccgtggcctggcggcctcgctgctcttcctgcttttggtcaaggctgcccagcagctacgcttcgtgcgccagtggtccgtctttggcaagacattatgccgagctctgccagagctcctgggggtcaccttgggcctggtggtgctcggggtagcctacgcccagctggccatcctgctcgtgtcttcctgtgtggactccctctggagcgtggcccaggccctgttggtgctgtgccctgggactgggctctctaccctgtgtcctgccgagtcctggcacctgtcacccctgctgtgtgtggggctctgggcactgcggctgtggggcgccctacggctgggggctgttattctccgctggcgctaccacgccttgcgtggagagctgtaccggccggcctgggagccccaggactacgagatggtggagttgttcctgcgcaggctgcgcctctggatgggcctcagcaaggtcaaggagttccgccacaaagtccgctttgaagggatggagccgctgccctctcgctcctccaggggctccaaggtatccccggatgtgcccccacccagcgctggctccgatgcctcgcacccctccacctcctccagccagctggatgggctgagcgtgagcctgggccggctggggacaaggtgtgagcctgagccctcccgcctccaagccgtgttcgaggccctgctcacccagtttgaccgactcaaccaggccacagaggacgtctaccagctggagcagcagctgcacagcctgcaaggccgcaggagcagccgggcgcccgccggatcttcccgtggcccatccccgggcctgcggccagcactgcccagccgccttgcccgggccagtcggggtgtggacctggccactggccccagcaggacaccccttcgggccaagaacaaggtccaccccagcagcacttagtcctccttcctggcgggggtgggccgtggagtcggagtggacaccgctcagtattactttctgccgctgtcaaggccgagggccaggcagaatggctgcacgtaggttccccagagagcaggcaggggcatctgtctgtctgtgggcttcagcactttaaagaggctgtgtggccaaccaggacccagggtcccctccccagctcccttgggaaggacacagcagtattggacggtttctagcctctgagatgctaatttatttccccgagtcctcaggtacagcgggctgtgcccggccccaccccctgggcagatgtcccccactgctaaggctgctggcttcagggagggttagcctgcaccgccgccaccctgcccctaagttattacctctccagttcctaccgtactccctgcaccgtctcactgtgtgtctcgtgtcagtaatttatatggtgttaaaatgtgtatatttttgtatgtcactattttcactagggctgaggggcctgcgcccagagctggcctcccccaacacctgctgcgcttggtaggtgtggtggcgttatggcagcccggctgctgcttggatgcgagcttggccttgggccggtgctgggggcacagctgtctgccaggcactctcatcaccccagaggccttgtcatcctcccttgccccaggccaggtagcaagagagcagcgcccaggcctgctggcatcaggtctgggcaagtagcaggactaggcatgtcagaggaccccagggtggttagaggaaaagactcctcctgggggctggctcccagggtggaggaaggtgactgtgtgtgtgtgtgtgtgcgcgcgcgcacgcgcgagtgtgctgtatggcccaggcagcctcaaggccctcggagctggctgtgcctgcttctgtgtaccacttctgtgggcatggccgcttctagagcctcgacacccccccaacccccgcaccaagcagacaaagtcaataaaagagctgtctgactgc

SEQ ID NO: 22947 - DNA, 14011 bp, Homo sapiens
  source 1..14011: mol_type = unassigned DNA
gcactgcagcgccagcgtccgagcgggcggccgagctcccggagcggcctggccccgagccccgagcgggcgtcgctcagcagcaggtcgcggccgcagccccatccagccccgcgcccgccatgccgtccgcgggccccgcctgagctgcggcctccgcgcgcgggcgggcctggggacggcggggccatgcgcgcgctgccctaacgatgccgcccgccgcgcccgcccgcctggcgctggccctgggcctgggcctgtggctcggggcgctggcggggggccccgggcgcggctgcgggccctgcgagcccccctgcctctgcggcccagcgcccggcgccgcctgccgcgtcaactgctcgggccgcgggctgcggacgctcggtcccgcgctgcgcatccccgcggacgccacagcgctagacgtctcccacaacctgctccgggcgctggacgttgggctcctggcgaacctctcggcgctggcagagctggatataagcaacaacaagatttctacgttagaagaaggaatatttgctaatttatttaatttaagtgaaataaacctgagtgggaacccgtttgagtgtgactgtggcctggcgtggctgccgcgatgggcggaggagcagcaggtgcgggtggtgcagcccgaggcagccacgtgtgctgggcctggctccctggctggccagcctctgcttggcatccccttgctggacagtggctgtggtgaggagtatgtcgcctgcctccctgacaacagctcaggcaccgtggcagcagtgtccttttcagctgcccacgaaggcctgcttcagccagaggcctgcagcgccttctgcttctccaccggccagggcctcgcagccctctcggagcagggctggtgcctgtgtggggcggcccagccctccagtgcctcctttgcctgcctgtccctctgctccggccccccgccacctcctgcccccacctgtaggggccccaccctcctccagcacgtcttccctgcctccccaggggccaccctggtggggccccacggacctctggcctctggccagctagcagccttccacatcgctgccccgctccctgtcactgccacacgctgggacttcggagacggctccgccgaggtggatgccgctgggccggctgcctcgcatcgctatgtgctgcctgggcgctatcacgtgacggccgtgctggccctgggggccggctcagccctgctggggacagacgtgcaggtggaagcggcacctgccgccctggagctcgtgtgcccgtcctcggtgcagagtgacgagagcctcgacctcagcatccagaaccgcggtggttcaggcctggaggccgcctacagcatcgtggccctgggcgaggagccggcccgagcggtgcacccgctctgcccctcggacacggagatcttccctggcaacgggcactgctaccgcctggtggtggagaaggcggcctggctgcaggcgcaggagcagtgtcaggcctgggccggggccgccctggcaatggtggacagtcccgccgtgcagcgcttcctggtctcccgggtcaccaggagcctagacgtgtggatcggcttctcgactgtgcagggggtggaggtgggcccagcgccgcagggcgaggccttcagcctggagagctgccagaactggctgcccggggagccacacccagccacagccgagcactgcgtccggctcgggcccaccgggtggtgtaacaccgacctgtgctcagcgccgcacagctacgtctgcgagctgcagcccggaggcccagtgcaggatgccgagaacctcctcgtgggagcgcccagtggggacctgcagggacccctgacgcctctggcacagcaggacggcctctcagccccgcacgagcccgtggaggtcatggtattcccgggcctgcgtctgagccgtgaagccttcctcaccacggccgaatttgggacccaggagctccggcggcccgcccagctgcggctgcaggtgtaccggctcctcagcacagcagggaccccggagaacggcagcgagcctgagagcaggtccccggacaacaggacccagctggcccccgcgtgcatgccagggggacgctggtgccctggagccaacatctgcttgccgctggacgcctcctgccacccccaggcctgcgccaatggctgcacgtcagggccagggctacccggggccccctatgcgctatggagagagttcctcttctccgttcccgcggggccccccgcgcagtactcggtcaccctccacggccaggatgtcctcatgctccctggtgacctcgttggcttgcagcacgacgctggccctggcgccctcctgcactgctcgccggctcccggccaccctggtccccgggccccgtacctctccgccaacgcctcgtcatggctgccccacttgccagcccagctggagggcacttgggcctgccctgcctgtgccctgcggctgcttgcagccacggaacagctcaccgtgctgctgggcttgaggcccaaccctggactgcggctgcctgggcgctatgaggtccgggcagaggtgggcaatggcgtgtccaggcacaacctctcctgcagctttgacgtggtctccccagtggctgggctgcgggtcatctaccctgccccccgcgacggccgcctctacgtgcccaccaacggctcagccttggtgctccaggtggactctggtgccaacgccacggccacggctcgctggcctgggggcagtgtcagcgcccgctttgagaatgtctgccctgccctggtggccaccttcgtgcccggctgcccctgggagaccaacgataccctgttctcagtggtagcactgccgtggctcagtgagggggagcacgtggtggacgtggtggtggaaaacagcgccagccgggccaacctcagcctgcgggtgacggcggaggagcccatctgtggcctccgcgccacgcccagccccgaggcccgtgtactgcagggagtcctagtgaggtacagccccgtggtggaggccggctcggacatggtcttccggtggaccatcaacgacaagcagtccctgaccttccagaacgtggtcttcaatgtcatttatcagagcgcggcggtcttcaagctctcactgacggcctccaaccacgtgagcaacgtcaccgtgaactacaacgtaaccgtggagcggatgaacaggatgcagggtctgcaggtctccacagtgccggccgtgctgtcccccaatgccacgctagcactgacggcgggcgtgctggtggactcggccgtggaggtggccttcctgtggacctttggggatggggagcaggccctccaccagttccagcctccgtacaacgagtccttcccggttccagacccctcggtggcccaggtgctggtggagcacaatgtcatgcacacctacgctgccccaggtgagtacctcctgaccgtgctggcatctaatgccttcgagaacctgacgcagcaggtgcctgtgagcgtgcgcgcctccctgccctccgtggctgtgggtgtgagtgacggcgtcctggtggccggccggcccgtcaccttctacccgcacccgctgccctcgcctgggggtgttctttacacgtgggacttcggggacggctcccctgtcctgacccagagccagccggctgccaaccacacctatgcctcgaggggcacctaccacgtgcgcctggaggtcaacaacacggtgagcggtgcggcggcccaggcggatgtgcgcgtctttgaggagctccgcggactcagcgtggacatgagcctggccgtggagcagggcgcccccgtggtggtcagcgccgcggtgcagacgggcgacaacatcacgtggaccttcgacatgggggacggcaccgtgctgtcgggcccggaggcaacagtggagcatgtgtacctgcgggcacagaactgcacagtgaccgtgggtgcggccagccccgccggccacctggcccggagcctgcacgtgctggtcttcgtcctggaggtgctgcgcgttgaacccgccgcctgcatccccacgcagcctgacgcgcggctcacggcctacgtcaccgggaacccggcccactacctcttcgactggaccttcggggatggctcctccaacacgaccgtgcgggggtgcccgacggtgacacacaacttcacgcggagcggcacgttccccctggcgctggtgctgtccagccgcgtgaacagggcgcattacttcaccagcatctgcgtggagccagaggtgggcaacgtcaccctgcagccagagaggcagtttgtgcagctcggggacgaggcctggctggtggcatgtgcctggcccccgttcccctaccgctacacctgggactttggcaccgaggaagccgcccccacccgtgccaggggccctgaggtgacgttcatctaccgagacccaggctcctatcttgtgacagtcaccgcgtccaacaacatctctgctgccaatgactcagccctggtggaggtgcaggagcccgtgctggtcaccagcatcaaggtcaatggctcccttgggctggagctgcagcagccgtacctgttctctgctgtgggccgtgggcgccccgccagctacctgtgggatctgggggacggtgggtggctcgagggtccggaggtcacccacgcttacaacagcacaggtgacttcaccgttagggtggccggctggaatgaggtgagccgcagcgaggcctggctcaatgtgacggtgaagcggcgcgtgcgggggctcgtcgtcaatgcaagccgcacggtggtgcccctgaatgggagcgtgagcttcagcacgtcgctggaggccggcagtgatgtgcgctattcctgggtgctctgtgaccgctgcacgcccatccctgggggtcctaccatctcttacaccttccgctccgtgggcaccttcaatatcatcgtcacggctgagaacgaggtgggctccgcccaggacagcatcttcgtctatgtcctgcagctcatagaggggctgcaggtggtgggcggtggccgctacttccccaccaaccacacggtacagctgcaggccgtggttagggatggcaccaacgtctcctacagctggactgcctggagggacaggggcccggccctggccggcagcggcaaaggcttctcgctcaccgtgctcgaggccggcacctaccatgtgcagctgcgggccaccaacatgctgggcagcgcctgggccgactgcaccatggacttcgtggagcctgtggggtggctgatggtggccgcctccccgaacccagctgccgtcaacacaagcgtcaccctcagtgccgagctggctggtggcagtggtgtcgtatacacttggtccttggaggaggggctgagctgggagacctccgagccatttaccacccatagcttccccacacccggcctgcacttggtcaccatgacggcagggaacccgctgggctcagccaacgccaccgtggaagtggatgtgcaggtgcctgtgagtggcctcagcatcagggccagcgagcccggaggcagcttcgtggcggccgggtcctctgtgcccttttgggggcagctggccacgggcaccaatgtgagctggtgctgggctgtgcccggcggcagcagcaagcgtggccctcatgtcaccatggtcttcccggatgctggcaccttctccatccggctcaatgcctccaacgcagtcagctgggtctcagccacgtacaacctcacggcggaggagcccatcgtgggcctggtgctgtgggccagcagcaaggtggtggcgcccgggcagctggtccattttcagatcctgctggctgccggctcagctgtcaccttccgcctgcaggtcggcggggccaaccccgaggtgctccccgggccccgtttctcccacagcttcccccgcgtcggagaccacgtggtgagcgtgcggggcaaaaaccacgtgagctgggcccaggcgcaggtgcgcatcgtggtgctggaggccgtgagtgggctgcaggtgcccaactgctgcgagcctggcatcgccacgggcactgagaggaacttcacagcccgcgtgcagcgcggctctcgggtcgcctacgcctggtacttctcgctgcagaaggtccagggcgactcgctggtcatcctgtcgggccgcgacgtcacctacacgcccgtggccgcggggctgttggagatccaggtgcgcgccttcaacgccctgggcagtgagaaccgcacgctggtgctggaggttcaggacgccgtccagtatgtggccctgcagagcggcccctgcttcaccaaccgctcggcgcagtttgaggccgccaccagccccagcccccggcgtgtggcctaccactgggactttggggatgggtcgccagggcaggacacagatgagcccagggccgagcactcctacctgaggcctggggactaccgcgtgcaggtgaacgcctccaacctggtgagcttcttcgtggcgcaggccacggtgaccgtccaggtgctggcctgccgggagccggaggtggacgtggtcctgcccctgcaggtgctgatgcggcgatcacagcgcaactacttggaggcccacgttgacctgcgcgactgcgtcacctaccagactgagtaccgctgggaggtgtatcgcaccgccagctgccagcggccggggcgcccagcgcgtgtggccctgcccggcgtggacgtgagccggcctcggctggtgctgccgcggctggcgctgcctgtggggcactactgctttgtgtttgtcgtgtcatttggggacacgccactgacacagagcatccaggccaatgtgacggtggcccccgagcgcctggtgcccatcattgagggtggctcataccgcgtgtggtcagacacacgggacctggtgctggatgggagcgagtcctacgaccccaacctggaggacggcgaccagacgccgctcagtttccactgggcctgtgtggcttcgacacagagggaggctggcgggtgtgcgctgaactttgggccccgcgggagcagcacggtcaccattccacgggagcggctggcggctggcgtggagtacaccttcagcctgaccgtgtggaaggccggccgcaaggaggaggccaccaaccagacggtgctgatccggagtggccgggtgcccattgtgtccttggagtgtgtgtcctgcaaggcacaggccgtgtacgaagtgagccgcagctcctacgtgtacttggagggccgctgcctcaattgcagcagcggctccaagcgagggcggtgggctgcacgtacgttcagcaacaagacgctggtgctggatgagaccaccacatccacgggcagtgcaggcatgcgactggtgctgcggcggggcgtgctgcgggacggcgagggatacaccttcacgctcacggtgctgggccgctctggcgaggaggagggctgcgcctccatccgcctgtcccccaaccgcccgccgctggggggctcttgccgcctcttcccactgggcgctgtgcacgccctcaccaccaaggtgcacttcgaatgcacgggctggcatgacgcggaggatgctggcgccccgctggtgtacgccctgctgctgcggcgctgtcgccagggccactgcgaggagttctgtgtctacaagggcagcctctccagctacggagccgtgctgcccccgggtttcaggccacacttcgaggtgggcctggccgtggtggtgcaggaccagctgggagccgctgtggtcgccctcaacaggtctttggccatcaccctcccagagcccaacggcagcgcaacggggctcacagtctggctgcacgggctcaccgctagtgtgctcccagggctgctgcggcaggccgatccccagcacgtcatcgagtactcgttggccctggtcaccgtgctgaacgagtacgagcgggccctggacgtggcggcagagcccaagcacgagcggcagcaccgagcccagatacgcaagaacatcacggagactctggtgtccctgagggtccacactgtggatgacatccagcagatcgctgctgcgctggcccagtgcatggggcccagcagggagctcgtatgccgctcgtgcctgaagcagacgctgcacaagctggaggccatgatgctcatcctgcaggcagagaccaccgcgggcaccgtgacgcccaccgccatcggagacagcatcctcaacatcacaggagacctcatccacctggccagctcggacgtgcgggcaccacagccctcagagctgggagccgagtcaccatctcggatggtggcgtcccaggcctacaacctgacctctgccctcatgcgcatcctcatgcgctcccgcgtgctcaacgaggagcccctgacgctggcgggcgaggagatcgtggcccagggcaagcgctcggacccgcggagcctgctgtgctatggcggcgccccagggcctggctgccacttctccatccccgaggctttcagcggggccctggccaacctcagtgacgtggtgcagctcatctttctggtggactccaatccctttccctttggctatatcagcaactacaccgtctccaccaaggctccgccaactccgccaactccgttgtggtccagccccaggcctccgtcggtgctgtggtcaccctggacagcagcaaccctgcggccgggctgcatctgcagctcaactatacgctgctggacggccactacctgtctgaggaacctgagccctacctggcagtctacctacactcggagccccggcccaatgagcacaactgctcggctagcaggaggatccgcccagagtcactccagggtgctgaccaccggccctacaccttcttcatttccccggggagcagagacccagcggggagttaccatctgaacctctccagccacttccgctggtcggcgctgcaggtgtccgtgggcctgtacacgtccctgtgccagtacttcagcgaggaggacatggtgtggcggacagaggggctgctgcccctggaggagacctcgccccgccaggccgtctgcctcacccgccacctcaccgccttcggcgccagcctcttcgtgcccccaagccatgtccgctttgtgtttcctgagccgacagcggatgtaaactacatcgtcatgctgacatgtgctgtgtgcctggtgacctacatggtcatggccgccatcctgcacaagctggaccagttggatgccagccggggccgcgccatccctttctgtgggcagcggggccgcttcaagtacgagatcctcgtcaagacaggctggggccggggctcaggtaccacggcccacgtgggcatcatgctgtatggggtggacagccggagcggccaccggcacctggacggcgacagagccttccaccgcaacagcctggacatcttccggatcgccaccccgcacagcctgggtagcgtgtggaagatccgagtgtggcacgacaacaaagggctcagccctgcctggttcctgcagcacgtcatcgtcagggacctgcagacggcacgcagcgccttcttcctggtcaatgactggctttcggtggagacggaggccaacgggggcctggtggagaaggaggtgctggccgcgagcgacgcagcccttttgcgcttccggcgcctgctggtggctgagctgcagcgtggcttctttgacaagcacatctggctctccatatgggaccggccgcctcgtagccgtttcactcgcatccagagggccacctgctgcgttctcctcatctgcctcttcctgggcgccaacgccgtgtggtacggggctgttggcgactctgcctacagcacggggcatgtgtccaggctgagcccgctgagcgtcgacacagtcgctgttggcctggtgtccagcgtggttgtctatcccgtctacctggccatcctttttctcttccggatgtcccggagcaaggtggctgggagcccgagccccacacctgccgggcagcaggtgctggacatcgacagctgcctggactcgtccgtgctggacagctccttcctcacgttctcaggcctccacgctgaggcctttgttggacagatgaagagtgacttgtttctggatgattctaagagtctggtgtgctggccctccggcgagggaacgctcagttggccggacctgctcagtgacccgtccattgtgggtagcaatctgcggcagctggcacggggccaggcgggccatgggctgggcccagaggaggacggcttctccctggccagcccctactcgcctgccaaatccttctcagcatcagatgaagacctgatccagcaggtccttgccgagggggtcagcagcccagcccctacccaagacacccacatggaaacggacctgctcagcagcctgtccagcactcctggggagaagacagagacgctggcgctgcagaggctgggggagctggggccacccagcccaggcctgaactgggaacagccccaggcagcgaggctgtccaggacaggtgtgcttgcgtagccccgggatgcccctagcccctccctgtgtgcctccctggcccacgggctcagcctgctcctggtggctgtggctgtggctgtctcagggtgggtgggtgcgagcttccccccgggcgtgagtgttgcgtggctcctgtccagcagcgccagcttcctggcctcattcctcggctgggagccactgaaggtcttgctggaagccctgtacttctcactggtggccaagcggctgcacccggatgaagatgacaccctggtagagagcccggctgtgacgcctgtgagcgcacgtgtgccccgcgtacggccaccccacggctttgcactcttcctggccaaggaagaagcccgcaaggtcaagaggctacatggcatgctgcggagcctcctggtgtacatgctttttctgctggtgaccctgctggccagctatggggatgcctcatgccatgggcacgcctaccgtctgcaaagcgccatcaagcaggagctgcacagccgggccttcctggccatcacgcggtctgaggagctctggccatggatggcccacgtgctgctgccctacgtccacgggaaccagtccagcccagagctggggcccccacggctgcggcaggtgcggctgcaggaagcactctacccagaccctcccggccccagggtccacacgtgctcggccgcaggaggcttcagcaccagcgattacgacgttggctgggagagtcctcacaatggctcggggacgtgggcctattcagcgccggatctgctgggggcatggtcctggggctcctgtgccgtgtatgacagcgggggctacgtgcaggagctgggcctgagcctggaggagagccgcgaccggctgcgcttcctgcagctgcacaactggctggacaacaggagccgcgctgtgttcctggagctcacgcgctacagcccggccgtggggctgcacgccgccgtcacgctgcgcctcgagttcccggcggccggccgcgccctggccgccctcagcgtccgcccctttgcgctgcgccgcctcagcgcgggcctctcgctgcctctgctcacctcggtgtgcctgctgctgttcgccgtgcacttcgccgtggccgaggcccgtacttggcacagggaagggcgctggcgcgtgctgcggctcggagcctgggcgcggtggctgctggtggcgctgacggcggccacggcactggtacgcctcgcccagctgggtgccgctgaccgccagtggacccgtttcgtgcgcggccgcccgcgccgcttcactagcttcgaccaggtggcgcagctgagctccgcagcccgtggcctggcggcctcgctgctcttcctgcttttggtcaaggctgcccagcagctacgcttcgtgcgccagtggtccgtctttggcaagacattatgccgagctctgccagagctcctgggggtcaccttgggcctggtggtgctcggggtagcctacgcccagctggccatcctgctcgtgtcttcctgtgtggactccctctggagcgtggcccaggccctgttggtgctgtgccctgggactgggctctctaccctgtgtcctgccgagtcctggcacctgtcacccctgctgtgtgtggggctctgggcactgcggctgtggggcgccctacggctgggggctgttattctccgctggcgctaccacgccttgcgtggagagctgtaccggccggcctgggagccccaggactacgagatggtggagttgttcctgcgcaggctgcgcctctggatgggcctcagcaaggtcaaggagttccgccacaaagtccgctttgaagggatggagccgctgccctctcgctcctccaggggctccaaggtatccccggatgtgcccccacccagcgctggctccgatgcctcgcacccctccacctcctccagccagctggatgggctgagcgtgagcctgggccggctggggacaaggtgtgagcctgagccctcccgcctccaagccgtgttcgaggccctgctcacccagtttgaccgactcaaccaggccacagaggacgtctaccagctggagcagcagctgcacagcctgcaaggccgcaggagcagccgggcgcccgccggatcttcccgtggcccatccccgggcctgcggccagcactgcccagccgccttgcccgggccagtcggggtgtggacctggccactggccccagcaggacaccccttcgggccaagaacaaggtccaccccagcagcacttagtcctccttcctggcgggggtgggccgtggagtcggagtggacaccgctcagtattactttctgccgctgtcaaggccgagggccaggcagaatggctgcacgtaggttccccagagagcaggcaggggcatctgtctgtctgtgggcttcagcactttaaagaggctgtgtggccaaccaggacccagggtcccctccccagctcccttgggaaggacacagcagtattggacggtttctagcctctgagatgctaatttatttccccgagtcctcaggtacagcgggctgtgcccggccccaccccctgggcagatgtcccccactgctaaggctgctggcttcagggagggttagcctgcaccgccgccaccctgcccctaagttattacctctccagttcctaccgtactccctgcaccgtctcactgtgtgtctcgtgtcagtaatttatatggtgttaaaatgtgtatatttttgtatgtcactattttcactagggctgaggggcctgcgcccagagctggcctcccccaacacctgctgcgcttggtaggtgtggtggcgttatggcagcccggctgctgcttggatgcgagcttggccttgggccggtgctgggggcacagctgtctgccaggcactctcatcaccccagaggccttgtcatcctcccttgccccaggccaggtagcaagagagcagcgcccaggcctgctggcatcaggtctgggcaagtagcaggactaggcatgtcagaggaccccagggtggttagaggaaaagactcctcctgggggctggctcccagggtggaggaaggtgactgtgtgtgtgtgtgtgtgcgcgcgcgcacgcgcgagtgtgctgtatggcccaggcagcctcaaggccctcggagctggctgtgcctgcttctgtgtaccacttctgtgggcatggccgcttctagagcctcgacacccccccaacccccgcaccaagcagacaaagtcaataaaagagctgtctgactgc

SEQ ID NO: 22948 - DNA, 14135 bp, Homo sapiens
  source 1..14135: mol_type = unassigned DNA
gcactgcagcgccagcgtccgagcgggcggccgagctcccggagcggcctggccccgagccccgagcgggcgtcgctcagcagcaggtcgcggccgcagccccatccagccccgcgcccgccatgccgtccgcgggccccgcctgagctgcggcctccgcgcgcgggcgggcctggggacggcggggccatgcgcgcgctgccctaacgatgccgcccgccgcgcccgcccgcctggcgctggccctgggcctgggcctgtggctcggggcgctggcggggggccccgggcgcggctgcgggccctgcgagcccccctgcctctgcggcccagcgcccggcgccgcctgccgcgtcaactgctcgggccgcgggctgcggacgctcggtcccgcgctgcgcatccccgcggacgccacagcgctagacgtctcccacaacctgctccgggcgctggacgttgggctcctggcgaacctctcggcgctggcagagctggatataagcaacaacaagatttctacgttagaagaaggaatatttgctaatttatttaatttaagtgaaataaacctgagtgggaacccgtttgagtgtgactgtggcctggcgtggctgccgcgatgggcggaggagcagcaggtgcgggtggtgcagcccgaggcagccacgtgtgctgggcctggctccctggctggccagcctctgcttggcatccccttgctggacagtggctgtggtgaggagtatgtcgcctgcctccctgacaacagctcaggcaccgtggcagcagtgtccttttcagctgcccacgaaggcctgcttcagccagaggcctgcagcgccttctgcttctccaccggccagggcctcgcagccctctcggagcagggctggtgcctgtgtggggcggcccagccctccagtgcctcctttgcctgcctgtccctctgctccggccccccgccacctcctgcccccacctgtaggggccccaccctcctccagcacgtcttccctgcctccccaggggccaccctggtggggccccacggacctctggcctctggccagctagcagccttccacatcgctgccccgctccctgtcactgccacacgctgggacttcggagacggctccgccgaggtggatgccgctgggccggctgcctcgcatcgctatgtgctgcctgggcgctatcacgtgacggccgtgctggccctgggggccggctcagccctgctggggacagacgtgcaggtggaagcggcacctgccgccctggagctcgtgtgcccgtcctcggtgcagagtgacgagagcctcgacctcagcatccagaaccgcggtggttcaggcctggaggccgcctacagcatcgtggccctgggcgaggagccggcccgagcggtgcacccgctctgcccctcggacacggagatcttccctggcaacgggcactgctaccgcctggtggtggagaaggcggcctggctgcaggcgcaggagcagtgtcaggcctgggccggggccgccctggcaatggtggacagtcccgccgtgcagcgcttcctggtctcccgggtcaccaggagcctagacgtgtggatcggcttctcgactgtgcagggggtggaggtgggcccagcgccgcagggcgaggccttcagcctggagagctgccagaactggctgcccggggagccacacccagccacagccgagcactgcgtccggctcgggcccaccgggtggtgtaacaccgacctgtgctcagcgccgcacagctacgtctgcgagctgcagcccggaggcccagtgcaggatgccgagaacctcctcgtgggagcgcccagtggggacctgcagggacccctgacgcctctggcacagcaggacggcctctcagccccgcacgagcccgtggaggtcatggtattcccgggcctgcgtctgagccgtgaagccttcctcaccacggccgaatttgggacccaggagctccggcggcccgcccagctgcggctgcaggtgtaccggctcctcagcacagcagggaccccggagaacggcagcgagcctgagagcaggtccccggacaacaggacccagctggcccccgcgtgcatgccagggggacgctggtgccctggagccaacatctgcttgccgctggacgcctcctgccacccccaggcctgcgccaatggctgcacgtcagggccagggctacccggggccccctatgcgctatggagagagttcctcttctccgttcccgcggggccccccgcgcagtactcggtcaccctccacggccaggatgtcctcatgctccctggtgacctcgttggcttgcagcacgacgctggccctggcgccctcctgcactgctcgccggctcccggccaccctggtccccgggccccgtacctctccgccaacgcctcgtcatggctgccccacttgccagcccagctggagggcacttgggcctgccctgcctgtgccctgcggctgcttgcagccacggaacagctcaccgtgctgctgggcttgaggcccaaccctggactgcggctgcctgggcgctatgaggtccgggcagaggtgggcaatggcgtgtccaggcacaacctctcctgcagctttgacgtggtctccccagtggctgggctgcgggtcatctaccctgccccccgcgacggccgcctctacgtgcccaccaacggctcagccttggtgctccaggtggactctggtgccaacgccacggccacggctcgctggcctgggggcagtgtcagcgcccgctttgagaatgtctgccctgccctggtggccaccttcgtgcccggctgcccctgggagaccaacgataccctgttctcagtggtagcactgccgtggctcagtgagggggagcacgtggtggacgtggtggtggaaaacagcgccagccgggccaacctcagcctgcgggtgacggcggaggagcccatctgtggcctccgcgccacgcccagccccgaggcccgtgtactgcagggagtcctagtgaggtacagccccgtggtggaggccggctcggacatggtcttccggtggaccatcaacgacaagcagtccctgaccttccagaacgtggtcttcaatgtcatttatcagagcgcggcggtcttcaagctctcactgacggcctccaaccacgtgagcaacgtcaccgtgaactacaacgtaaccgtggagcggatgaacaggatgcagggtctgcaggtctccacagtgccggccgtgctgtcccccaatgccacgctagcactgacggcgggcgtgctggtggactcggccgtggaggtggccttcctgtggacctttggggatggggagcaggccctccaccagttccagcctccgtacaacgagtccttcccggttccagacccctcggtggcccaggtgctggtggagcacaatgtcatgcacacctacgctgccccaggtgagtacctcctgaccgtgctggcatctaatgccttcgagaacctgacgcagcaggtgcctgtgagcgtgcgcgcctccctgccctccgtggctgtgggtgtgagtgacggcgtcctggtggccggccggcccgtcaccttctacccgcacccgctgccctcgcctgggggtgttctttacacgtgggacttcggggacggctcccctgtcctgacccagagccagccggctgccaaccacacctatgcctcgaggggcacctaccacgtgcgcctggaggtcaacaacacggtgagcggtgcggcggcccaggcggatgtgcgcgtctttgaggagctccgcggactcagcgtggacatgagcctggccgtggagcagggcgcccccgtggtggtcagcgccgcggtgcagacgggcgacaacatcacgtggaccttcgacatgggggacggcaccgtgctgtcgggcccggaggcaacagtggagcatgtgtacctgcgggcacagaactgcacagtgaccgtgggtgcggccagccccgccggccacctggcccggagcctgcacgtgctggtcttcgtcctggaggtgctgcgcgttgaacccgccgcctgcatccccacgcagcctgacgcgcggctcacggcctacgtcaccgggaacccggcccactacctcttcgactggaccttcggggatggctcctccaacacgaccgtgcgggggtgcccgacggtgacacacaacttcacgcggagcggcacgttccccctggcgctggtgctgtccagccgcgtgaacagggcgcattacttcaccagcatctgcgtggagccagaggtgggcaacgtcaccctgcagccagagaggcagtttgtgcagctcggggacgaggcctggctggtggcatgtgcctggcccccgttcccctaccgctacacctgggactttggcaccgaggaagccgcccccacccgtgccaggggccctgaggtgacgttcatctaccgagacccaggctcctatcttgtgacagtcaccgcgtccaacaacatctctgctgccaatgactcagccctggtggaggtgcaggagcccgtgctggtcaccagcatcaaggtcaatggctcccttgggctggagctgcagcagccgtacctgttctctgctgtgggccgtgggcgccccgccagctacctgtgggatctgggggacggtgggtggctcgagggtccggaggtcacccacgcttacaacagcacaggtgacttcaccgttagggtggccggctggaatgaggtgagccgcagcgaggcctggctcaatgtgacggtgaagcggcgcgtgcgggggctcgtcgtcaatgcaagccgcacggtggtgcccctgaatgggagcgtgagcttcagcacgtcgctggaggccggcagtgatgtgcgctattcctgggtgctctgtgaccgctgcacgcccatccctgggggtcctaccatctcttacaccttccgctccgtgggcaccttcaatatcatcgtcacggctgagaacgaggtgggctccgcccaggacagcatcttcgtctatgtcctgcagctcatagaggggctgcaggtggtgggcggtggccgctacttccccaccaaccacacggtacagctgcaggccgtggttagggatggcaccaacgtctcctacagctggactgcctggagggacaggggcccggccctggccggcagcggcaaaggcttctcgctcaccgtgctcgaggccggcacctaccatgtgcagctgcgggccaccaacatgctgggcagcgcctgggccgactgcaccatggacttcgtggagcctgtggggtggctgatggtggccgcctccccgaacccagctgccgtcaacacaagcgtcaccctcagtgccgagctggctggtggcagtggtgtcgtatacacttggtccttggaggaggggctgagctgggagacctccgagccatttaccacccatagcttccccacacccggcctgcacttggtcaccatgacggcagggaacccgctgggctcagccaacgccaccgtggaagtggatgtgcaggtgcctgtgagtggcctcagcatcagggccagcgagcccggaggcagcttcgtggcggccgggtcctctgtgcccttttgggggcagctggccacgggcaccaatgtgagctggtgctgggctgtgcccggcggcagcagcaagcgtggccctcatgtcaccatggtcttcccggatgctggcaccttctccatccggctcaatgcctccaacgcagtcagctgggtctcagccacgtacaacctcacggcggaggagcccatcgtgggcctggtgctgtgggccagcagcaaggtggtggcgcccgggcagctggtccattttcagatcctgctggctgccggctcagctgtcaccttccgcctgcaggtcggcggggccaaccccgaggtgctccccgggccccgtttctcccacagcttcccccgcgtcggagaccacgtggtgagcgtgcggggcaaaaaccacgtgagctgggcccaggcgcaggtgcgcatcgtggtgctggaggccgtgagtgggctgcaggtgcccaactgctgcgagcctggcatcgccacgggcactgagaggaacttcacagcccgcgtgcagcgcggctctcgggtcgcctacgcctggtacttctcgctgcagaaggtccagggcgactcgctggtcatcctgtcgggccgcgacgtcacctacacgcccgtggccgcggggctgttggagatccaggtgcgcgccttcaacgccctgggcagtgagaaccgcacgctggtgctggaggttcaggacgccgtccagtatgtggccctgcagagcggcccctgcttcaccaaccgctcggcgcagtttgaggccgccaccagccccagcccccggcgtgtggcctaccactgggactttggggatgggtcgccagggcaggacacagatgagcccagggccgagcactcctacctgaggcctggggactaccgcgtgcaggtgaacgcctccaacctggtgagcttcttcgtggcgcaggccacggtgaccgtccaggtgctggcctgccgggagccggaggtggacgtggtcctgcccctgcaggtgctgatgcggcgatcacagcgcaactacttggaggcccacgttgacctgcgcgactgcgtcacctaccagactgagtaccgctgggaggtgtatcgcaccgccagctgccagcggccggggcgcccagcgcgtgtggccctgcccggcgtggacgtgagccggcctcggctggtgctgccgcggctggcgctgcctgtggggcactactgctttgtgtttgtcgtgtcatttggggacacgccactgacacagagcatccaggccaatgtgacggtggcccccgagcgcctggtgcccatcattgagggtggctcataccgcgtgtggtcagacacacgggacctggtgctggatgggagcgagtcctacgaccccaacctggaggacggcgaccagacgccgctcagtttccactgggcctgtgtggcttcgacacagagggaggctggcgggtgtgcgctgaactttgggccccgcgggagcagcacggtcaccattccacgggagcggctggcggctggcgtggagtacaccttcagcctgaccgtgtggaaggccggccgcaaggaggaggccaccaaccagacggtgctgatccggagtggccgggtgcccattgtgtccttggagtgtgtgtcctgcaaggcacaggccgtgtacgaagtgagccgcagctcctacgtgtacttggagggccgctgcctcaattgcagcagcggctccaagcgagggcggtgggctgcacgtacgttcagcaacaagacgctggtgctggatgagaccaccacatccacgggcagtgcaggcatgcgactggtgctgcggcggggcgtgctgcgggacggcgagggatacaccttcacgctcacggtgctgggccgctctggcgaggaggagggctgcgcctccatccgcctgtcccccaaccgcccgccgctggggggctcttgccgcctcttcccactgggcgctgtgcacgccctcaccaccaaggtgcacttcgaatgcacgggctggcatgacgcggaggatgctggcgccccgctggtgtacgccctgctgctgcggcgctgtcgccagggccactgcgaggagttctgtgtctacaagggcagcctctccagctacggagccgtgctgcccccgggtttcaggccacacttcgaggtgggcctggccgtggtggtgcaggaccagctgggagccgctgtggtcgccctcaacaggtctttggccatcaccctcccagagcccaacggcagcgcaacggggctcacagtctggctgcacgggctcaccgctagtgtgctcccagggctgctgcggcaggccgatccccagcacgtcatcgagtactcgttggccctggtcaccgtgctgaacgagtacgagcgggccctggacgtggcggcagagcccaagcacgagcggcagcaccgagcccagatacgcaagaacatcacggagactctggtgtccctgagggtccacactgtggatgacatccagcagatcgctgctgcgctggcccagtgcatggggcccagcagggagctcgtatgccgctcgtgcctgaagcagacgctgcacaagctggaggccatgatgctcatcctgcaggcagagaccaccgcgggcaccgtgacgcccaccgccatcggagacagcatcctcaacatcacaggagacctcatccacctggccagctcggacgtgcgggcaccacagccctcagagctgggagccgagtcaccatctcggatggtggcgtcccaggcctacaacctgacctctgccctcatgcgcatcctcatgcgctcccgcgtgctcaacgaggagcccctgacgctggcgggcgaggagatcgtggcccagggcaagcgctcggacccgcggagcctgctgtgctatggcggcgccccagggcctggctgccacttctccatccccgaggctttcagcggggccctggccaacctcagtgacgtggtgcagctcatctttctggtggactccaatccctttccctttggctatatcagcaactacaccgtctccaccaaggtggcctcgatggcattccagacacaggccggcgcccagatccccatcgagcggctggcctcagagcgcgccatcaccgtgaaggtgcccaacaactcggactgggctgcccggggccaccgcagctccgccaactccgccaactccgttgtggtccagccccaggcctccgtcggtgctgtggtcaccctggacagcagcaaccctgcggccgggctgcatctgcagctcaactatacgctgctggacggccactacctgtctgaggaacctgagccctacctggcagtctacctacactcggagccccggcccaatgagcacaactgctcggctagcaggaggatccgcccagagtcactccagggtgctgaccaccggccctacaccttcttcatttccccggggagcagagacccagcggggagttaccatctgaacctctccagccacttccgctggtcggcgctgcaggtgtccgtgggcctgtacacgtccctgtgccagtacttcagcgaggaggacatggtgtggcggacagaggggctgctgcccctggaggagacctcgccccgccaggccgtctgcctcacccgccacctcaccgccttcggcgccagcctcttcgtgcccccaagccatgtccgctttgtgtttcctgagccgacagcggatgtaaactacatcgtcatgctgacatgtgctgtgtgcctggtgacctacatggtcatggccgccatcctgcacaagctggaccagttggatgccagccggggccgcgccatccctttctgtgggcagcggggccgcttcaagtacgagatcctcgtcaagacaggctggggccggggctcaggtaccacggcccacgtgggcatcatgctgtatggggtggacagccggagcggccaccggcacctggacggcgacagagccttccaccgcaacagcctggacatcttccggatcgccaccccgcacagcctgggtagcgtgtggaagatccgagtgtggcacgacaacaaagggctcagccctgcctggttcctgcagcacgtcatcgtcagggacctgcagacggcacgcagcgccttcttcctggtcaatgactggctttcggtggagacggaggccaacgggggcctggtggagaaggaggtgctggccgcgagcgacgcagcccttttgcgcttccggcgcctgctggtggctgagctgcagcgtggcttctttgacaagcacatctggctctccatatgggaccggccgcctcgtagccgtttcactcgcatccagagggccacctgctgcgttctcctcatctgcctcttcctgggcgccaacgccgtgtggtacggggctgttggcgactctgcctacagcacggggcatgtgtccaggctgagcccgctgagcgtcgacacagtcgctgttggcctggtgtccagcgtggttgtctatcccgtctacctggccatcctttttctcttccggatgtcccggagcaaggtggctgggagcccgagccccacacctgccgggcagcaggtgctggacatcgacagctgcctggactcgtccgtgctggacagctccttcctcacgttctcaggcctccacgctgaggcctttgttggacagatgaagagtgacttgtttctggatgattctaagagtctggtgtgctggccctccggcgagggaacgctcagttggccggacctgctcagtgacccgtccattgtgggtagcaatctgcggcagctggcacggggccaggcgggccatgggctgggcccagaggaggacggcttctccctggccagcccctactcgcctgccaaatccttctcagcatcagatgaagacctgatccagcaggtccttgccgagggggtcagcagcccagcccctacccaagacacccacatggaaacggacctgctcagcagcctgtccagcactcctggggagaagacagagacgctggcgctgcagaggctgggggagctggggccacccagcccaggcctgaactgggaacagccccaggcagcgaggctgtccaggacaggactggtggagggtctgcggaagcgcctgctgccggcctggtgtgcctccctggcccacgggctcagcctgctcctggtggctgtggctgtggctgtctcagggtgggtgggtgcgagcttccccccgggcgtgagtgttgcgtggctcctgtccagcagcgccagcttcctggcctcattcctcggctgggagccactgaaggtcttgctggaagccctgtacttctcactggtggccaagcggctgcacccggatgaagatgacaccctggtagagagcccggctgtgacgcctgtgagcgcacgtgtgccccgcgtacggccaccccacggctttgcactcttcctggccaaggaagaagcccgcaaggtcaagaggctacatggcatgctgcggagcctcctggtgtacatgctttttctgctggtgaccctgctggccagctatggggatgcctcatgccatgggcacgcctaccgtctgcaaagcgccatcaagcaggagctgcacagccgggccttcctggccatcacgcggtctgaggagctctggccatggatggcccacgtgctgctgccctacgtccacgggaaccagtccagcccagagctggggcccccacggctgcggcaggtgcggctgcaggaagcactctacccagaccctcccggccccagggtccacacgtgctcggccgcaggaggcttcagcaccagcgattacgacgttggctgggagagtcctcacaatggctcggggacgtgggcctattcagcgccggatctgctgggggcatggtcctggggctcctgtgccgtgtatgacagcgggggctacgtgcaggagctgggcctgagcctggaggagagccgcgaccggctgcgcttcctgcagctgcacaactggctggacaacaggagccgcgctgtgttcctggagctcacgcgctacagcccggccgtggggctgcacgccgccgtcacgctgcgcctcgagttcccggcggccggccgcgccctggccgccctcagcgtccgcccctttgcgctgcgccgcctcagcgcgggcctctcgctgcctctgctcacctcggtgtgcctgctgctgttcgccgtgcacttcgccgtggccgaggcccgtacttggcacagggaagggcgctggcgcgtgctgcggctcggagcctgggcgcggtggctgctggtggcgctgacggcggccacggcactggtacgcctcgcccagctgggtgccgctgaccgccagtggacccgtttcgtgcgcggccgcccgcgccgcttcactagcttcgaccaggtggcgcagctgagctccgcagcccgtggcctggcggcctcgctgctcttcctgcttttggtcaaggctgcccagcagctacgcttcgtgcgccagtggtccgtctttggcaagacattatgccgagctctgccagagctcctgggggtcaccttgggcctggtggtgctcggggtagcctacgcccagctggccatcctgctcgtgtcttcctgtgtggactccctctggagcgtggcccaggccctgttggtgctgtgccctgggactgggctctctaccctgtgtcctgccgagtcctggcacctgtcacccctgctgtgtgtggggctctgggcactgcggctgtggggcgccctacggctgggggctgttattctccgctggcgctaccacgccttgcgtggagagctgtaccggccggcctgggagccccaggactacgagatggtggagttgttcctgcgcaggctgcgcctctggatgggcctcagcaaggtcaaggagttccgccacaaagtccgctttgaagggatggagccgctgccctctcgctcctccaggggctccaaggtatccccggatgtgcccccacccagcgctggctccgatgcctcgcacccctccacctcctccagccagctggatgggctgagcgtgagcctgggccggctggggacaaggtgtgagcctgagccctcccgcctccaagccgtgttcgaggccctgctcacccagtttgaccgactcaaccaggccacagaggacgtctaccagctggagcagcagctgcacagcctgcaaggccgcaggagcagccgggcgcccgccggatcttcccgtggcccatccccgggcctgcggccagcactgcccagccgccttgcccgggccagtcggggtgtggacctggccactggccccagcaggacaccccttcgggccaagaacaaggtccaccccagcagcacttagtcctccttcctggcgggggtgggccgtggagtcggagtggacaccgctcagtattactttctgccgctgtcaaggccgagggccaggcagaatggctgcacgtaggttccccagagagcaggcaggggcatctgtctgtctgtgggcttcagcactttaaagaggctgtgtggccaaccaggacccagggtcccctccccagctcccttgggaaggacacagcagtattggacggtttctagcctctgagatgctaatttatttccccgagtcctcaggtacagcgggctgtgcccggccccaccccctgggcagatgtcccccactgctaaggctgctggcttcagggagggttagcctgcaccgccgccaccctgcccctaagttattacctctccagttcctaccgtactccctgcaccgtctcactgtgtgtctcgtgtcagtaatttatatggtgttaaaatgtgtatatttttgtatgtcactattttcactagggctgaggggcctgcgcccagagctggcctcccccaacacctgctgcgcttggtaggtgtggtggcgttatggcagcccggctgctgcttggatgcgagcttggccttgggccggtgctgggggcacagctgtctgccaggcactctcatcaccccagaggccttgtcatcctcccttgccccaggccaggtagcaagagagcagcgcccaggcctgctggcatcaggtctgggcaagtagcaggactaggcatgtcagaggaccccagggtggttagaggaaaagactcctcctgggggctggctcccagggtggaggaaggtgactgtgtgtgtgtgtgtgtgcgcgcgcgcacgcgcgagtgtgctgtatggcccaggcagcctcaaggccctcggagctggctgtgcctgcttctgtgtaccacttctgtgggcatggccgcttctagagcctcgacacccccccaacccccgcaccaagcagacaaagtcaataaaagagctgtctgactgc

SEQ ID NO: 22949 - DNA, 9092 bp, Homo sapiens
  source 1..9092: mol_type = unassigned DNA
ggaagaagctggtctgctgactgtcatacttgtgaccagcttgcacaggacatggccgaggaggcagcccagaacatttctgatgaccaggaaaggtgtctccaggctgcctgctgcctttcctttggtggtgagctgtctgtgagcactgacaagagctggggtcttcatctgtgcagctgtagccctcctggaggtggattgtgggtcgaggtctatgctaatcatgtgcttcttatgagtgatgggaagtgtggctgtccttggtgtgctctgaatggaaaggcagaagaccgggaatcacagagcccatcctcatcagcttccaggcagaagaacatttggaaaacaactagtgaagcagcgttaagtgttgttaatgaaaaaacacaggctgttgttaatgaaaaaacacaggcgcctctggattgtgataacagtgctgatagaattccccacaaacctttcattataatcgcaagggcctggagcagtggtggccccaggttccatcacaggcggctgtgtgctactgggaccgcagacagcacattctctgctcttctccagctccagggcaccacttctgcagcagctccctgcagcctgaagatggaggcttcctgctgtgtcctgagactgctgtgctgtgcggaggatgtggccacggggctgcttcctgggactgtcacgatggagacccccaccaaggtggccagacccactcagaccagctcccagcgagtgcccctgtggccgatttcacattttcccacttctcccagaagctcccacggccttccgcctggcattcctcgcacccccagcttcacggcatcgcagtctggttctgagatcctctatccccctactcagcatcctcctgtggccatcctagctcgaaattctgataacttcatgaaccctgttcttaattgctccctggaagtggaagctcgggcacctccaaatctgggattccgtgttcatatggcttctggagaggctctctgtctgatgatggatttcggggacagttctggggttgaaatgaggctacacaacatgtctgaggcaatggcggtgactgcctaccaccagtactcaaaaggtattttttttcatcttttacattttcagttggatatgtccacctacaaagaagcagagacacaaaatacaactttaaatgtttacttgtgccaaagtgaaaacagctgcctggaagactcagaccccagtaaccttggatatgagcttatttctgcctttgtcaccaaaggagtctatatgctcaaggctgttatttataacgagtttcatggaaccgaagtggagcttgggccttattatgtggagattggccatgaggccgtgtctgcgttcatgaactccagcagtgtccatgaagatgaagtgcttgtctttgctgactcccaagtgaatcagaaaagcactgtggttatacatcactttccatctattccttcatataacgtgtcctttatttctcagactcaagtgggtgacagccaggcttggcacagcatgactgtctggtataagatgcaatccgtctctgtctacacaaatggaactgtgtttgccacagacacagacattacatttacagctgttaccaaggaaacaatacccctggaatttgagtggtattttggagaggatccaccagtgaggacaacttcaagaagcattaaaaaaagactcagcatcccccaatggtatcgtgtgatggttaaggcttccaacaggatgagcagtgtggtctctgagccccatgtcatcagggtgcagaagaaaattgtggccaatcggctcacgtccccctcctcagctctggtaaatgccagtgtggcctttgagtgctggatcaacttcggcacagatgttgcctacctgtgggactttggggatggcaccgtcagcctggggagcagctccagcagccatgtctacagtagggaaggagaatttacagtggaggtccttgccttcaataatgtcagtgcctccactctaagacagcaacttttcatcgtgtgcgagccctgccagccacccctggtgaagaacatggggcctgggaaagtccagatatggaggtctcagcctgtgaggctgggagtgacgtttgaagctgcagtcttctgtgatatttcccaaggtctttcttacacctggaacttgatggactctgaagggctccctgtctccctccctgctgctgtggacactcacagacagaccctcatcctcccgagccacaccttggagtatgggaactacactgcccttgccaaggttcagattgaaggcagtgtggtgtacagcaactactgtgtgggcctggaggtgcgagcccaggcccctgtcagtgtgatctccgagggcacacacctattcttctccaggaccacctcatcccccattgtcctcagagggacccagtccttcgaccctgacgaccctggggcgactctcaggtatcactgggaatgcgccaccgctggctccccagcacatccctgcttcgactcctccactgcacaccaactggatgccgcggctcccactgtttcctttgaggcacaatggctcagtgacagctatgatcagttccttgtgatgctgagggtctccagtggtggccggaactcttctgagacccgggtgttcctgtccccctaccctgactcggcgttcagattcgtccacatctcctgggtcagctttaaagacaccttcgtcaactggaatgacgaactctctcttcaagctatgtgtgaggactgcagtgaaataccgaatctgtcttattcctgggatctctttttagtcaatgcaacagaaaagaataggatagaagttcccttctgcagagtagtggggctgcttggctcgctgggactcggtgccatttcagagtcatcacagttaaacctgctgcccactgagcctggcactgcagatcctgatgcaacgaccacaccattctcacgggaaccttcacccgtgacccttggccaacctgccacttcagctccaaggggaacccccacagagcccatgactggagtctactggattcctcctgcgggggactctgcagtcctgggggaggctccagaggaaggttcactagacctagagccagggccacagagcaagggatccctgatgactggccgctctgagagaagtcagcccacccacagccctgaccctcacctctctgattttgaagcctattacagtgacattcaagaagcaataccatcgggaggaagacagccagctaaggacaccagctttccaggatcaggacctagcttgagtgccgaggagagccctggagatggggataacctggtggacccctccctgtctgcaggcagagccgagcctgtcctcatgattgactggcccaaggccctgctgggtcgagcagttttccaaggctattcatcctcaggtattacagaacagacagtgacaatcaagccatactctctgagcagtggagagacgtacgtcctgcaagtgtctgtggcttcgaagcatggcttactgggtaaagctcagctgtacttgacagtcaacccggctcctcgggacatggcctgtcaggtgcagccccaccatggtctggaagcacacaccgtcttcagtgtcttctgcatgtctggaaaaccggacttccattatgaatttagttaccagataggaaacacctccaaacacactttgtaccatgggagagacacccagtattattttgtgttgccagctggtgagcacttggacaattacaaagtcatggtttccactgaaatcacagatggcaaaggctccaaggtccagccgtgcactgtggtggtgactgtgctgccccgctaccatggaaatgactgtctgggcgaggacctgtataattccagcctgaaaaacctttctaccctccagctgatggggagttacacagaaatcaggaactacatcactgtgatcaccagaatcctgagtcgtttgtctaaggaggacaaaactgcctcctgcaaccaatggtcacgaatacaggatgcattaatttcttcagtatgcagattggcttttgtagatcaggaagaaatgattggttctgttcttatgttgagggacctcgtgagcttctctaataagctaggctttatgagtgcggttctcatcctcaagtacacccgggcactccttgctcaaggccagttctcggggccatttgtgattgacaaaggagtgaggcttgagctcatcggtctcatatccagagtctgggaagtctctgagcaagaaaactcgaaggaggaagtctatcgacatgaagaaggaattacagtcatctcagatttattgttgggttgtctctctttgaaccatgttagcactgggcagatggagttccggacccttcttcattacaaccttcagagctctgtccagagcctgggatctgtccaggtgcatttacctggtgaccttgctgggcacagtcctgctggggcggagacacagagcccatgctacattagccagctcatactcttcaagaagaacccatatccagggagccaagctcctgggcagattggtggagttgtgggcctcaacctctatacctgctccagcagaagacccatcaacaggcaatggctaaggaaacccgtgatggtcgagtttggggaggaggatggcctggataataggagaaataaaacgacatttgtattacttcgggataaagtgaatctccatcagttcactgagctttccgaaaacccccaggaatctctacagatagaaattgaattttccaaacctgttacaagggcatttcccgtcatgttgctagtaagattctctgagaaacctactccctctgattttcttgtgaagcagatctacttctgggatgagtcaattgtgcagatttatatacctgctgcttctcagaaagatgccagtgtaggctatttatccttattggatgctgactatgacagaaaacctccaaacagatatttagctaaggcagtgaactatacagtacatttccagtggatccgatgcctgttttgggacaagagagagtggaaatctgaacgtttctctccacaaccagggacttctcctgaaaaagtgaactgcagctaccatcgcctcgcggcattcgctctcctaaggagaaagctgaaggccagttttgaagtgagtgacatttccaagctacagagccacccagaaaacttgcttcccagtatttttattatgggttctgtgattctttatggatttttggtcgctaaaagtagacaagtagatcatcatgaaaaaaagaaagctggttacatctttctgcaagaagcttccctgccgggccatcagctatatgcggtcgtcattgacactggcttccgagctccggccaggttgacctcaaaggtgtacattgttttatgtggcgacaatggactgtcagaaaccaaggagctctcctgtccagagaagcccctgtttgaaaggaattccagacacacctttatcctgagcgctcctgcccaactgggcctgctgaggaagatccgcctctggcacgacagccgtgggccttccccaggctggttcatcagccacgtgatggtgaaggagctgcacacgggacagggctggttcttccctgcccagtgctggctgtctgccggcaggcatgatggtcgcgtggagcgggagctcacctgtctgcaagggggactcggcttccggaagcttttctattgcaagttcacagagtacctggaggatttccatgtctggctgtcggtgtacagcaggccctcctccagccgctacctgcacacgccgcgcctcaccgtgtccttctccctgctgtgcgtctacgcgtgtctcactgccctggttgctgctggagggcaagagcagccccacttggacgtcagccccacccttggatccttcagggtgggtctcctgtgtaccctcctggcttctccaggggcccagctcttgtccctgctcttcaggctcagcaaggaagccccggggtctgcccgagtggagccacacagcccacttagaggaggagcacagaccgaggcaccccatggtcctaattcctggggaaggataccagacgcacaggagccacgcaagcaacctgcatcagccattctctctgggagtggcagggcccaaaggaaggcggcaagtgacaatggcacagcttgtccagcccctaagctgcaggttcatggggctgaccacagcaggacttctctgatggggaaaagccactgctgccctccccacactcaagcacccagcagtggtttggagggactaatgccccagtggtcaagggcccttcagccttggtggagctctgcagtgtgggccatttgtgggaccgcttctttggcctgcagtttggggacaggatttctagcctacaggtttggccaggagcaatgtgtgcagtggctgcacctgctgtccctctccgtggtctgctgtattttcatcacccagccacttatggtatgcctcatggccttgggttttgcttggaaaagaagagctgacaaccacttttttactgagtctttatgtgaggctaccagggatctggactctgaattggcagaacgttcctggactcgcctccccttctcttcaagctgcagtattcctgactgtgcaggcgaggttgaaaaagtcttggctgcccgacaacaagctcgccacctgcgctgggcgcatccaccatccaaggcccagctgaggggcaccagacagaggatgaggagagagagtcgcacacgggctgccctgagagacatttccatggacatcctcatgctgcttctgcttttgtgtgtaatatatgggagattttcccaagatgaatactccctcaatcaagctatccggaaagaatttacaagaaatgccagaaactgcttgggtggcctgagaaacatcgctgactggtgggactggagtctgaccacacttctggatggcctgtacccgggaggcaccccgtcagcccgtgtgccgggggctcagcctggagctcttggaggaaaatgctacctaataggcagttccgtaattaggcagctaaaagtttttcctaggcatttatgcaagcctcccaggccattttcagcactcatcgaagactctattcctacatgtagtcccgaagttggaggccctgagaacccctacctgatagacccagagaaccaaaacgtgaccctgaatggtcctgggggctgtgggacaagggaggactgtgtgctcagcctgggcagaacaaggactgaagcccacacagccctgtcccgactcagggccagcatgtggattgaccgcagcaccagggctgtgtctgtgcacttcactctctataaccctccaacccaactcttcaccagcgtgtccctgagagtggagatcctccctacggggagtctcgtcccctcatccctggtggagtcattcagcatcttccgcagcgactcagccctgcagtaccacctcatgcttccccagctggtcttcctggcactcagcctgatccacctctgtgttcaactctaccgtatgatggacaagggcgtcctcagctactggcgaaagccaaggaactggctggagctctccgtggttggagtgagcctcacctactatgcagtttccggccaccttgttactcttgctggagatgtcactaaccagtttcacagaggactttgccgagcatttatggacctcacccttatggcatcatggaatcagagggctcgatggctccggggaatcctcttattcctcttcacattaaaatgcgtctatcttcctggcattcaaaacacaatggcatcctgctcctccatgatgcgccactcactccccagcatctttgtagcagggctggtgggggcactgatgctggccgccctctcccacctgcaccgatttctgctctctatgtgggttctaccacctggcaccttcacagacgccttccccgggctgctgtttcattttcccagaagaagccaaaaagactgcctccttggcctttccaagtctgaccagcgggccatggcttgttactttgggatccttttaatagtctctgccacactgtgttttggaatgctgagaggttttctcatgactttaccccaaaaaagaaaatcttttcaaagtaaatcttttgtgagacttaaagatgtcactgcttatatgtgggaaaaggtcctcacctttctgagactggaaacaccaaagttggaagaggctgagatggttgagaatcacaattactacttggatgaatttgcaaatctgttagacgaacttctgatgaagattaatggtttgtccgacagcctacaactcccccttctggaaaaaacatccaacaacacaggggaggcaaggacagaagagagtcccttagtggacatttctagttaccaagctgctgagccagcagacatcaaggacttctgaggagcctggtaccttgcataggcactatggaccctgttttgcttaacccacccaacagccaattttagcagacatcctagttttgcaggtgagaagagctgaggtacgaagaagttttgttaatttttccagttcacgtaacaagtaaatgggaaaccaggatgaaaatcaaggtttatctgtcatcagactgttactcataatcaccattcggagagttcagatgtgggacaagattctaactccagccttctcccaaatggttaatttgccagttgccctagagttacatattgtcttatttgtttgttttactgaatctgtctgagtattaaaagccttgtatcttgtgaaatttctttcaggtctcataaaagcgatgaaagagaccaggataacattctaatatttaaataagatttttgaagtaaaatccttattttgtaaatttaacaattgaatcttgctagattaataacgcatctttcctg

SEQ ID NO: 22950 - DNA, 520 bp, Homo sapiens
  source 1..520: mol_type = unassigned DNA
agttggaggccctgagaacccctacctgatagacccagagaaccaaaacgtgaccctgaatggtcctgggggctgtgggacaagggaggactgtgtgctcagcctgggcagaacaaggactgaagcccacacagccctgtcccgactcagggccagcatgtggattgaccgcagcaccagggctgtgtctgtgcacttcactctctataaccctccaacccaactcttcaccagcgtgtccctgagagtggagatcctccctacggggagtctcgtcccctcatccctggtggagtcattcagcatcttccgcagcgactcagccctgcagtaccacctcatgcttccccagctggtcttcctggcactcagcctgatccacctctgtgttcaactctaccgtatgatggacaagggcgtcctcagctactggcgaaagccaaggaactggctggaggtagcctctcttgtgtcattttcttttgaaaaataacaataaactgtttatatcttgaaaaaa

SEQ ID NO: 22951 - DNA, 5056 bp, Homo sapiens
  source 1..5056: mol_type = unassigned DNA
ggctcctgaggcgcacagcgccgagcgcggcgccgcgcacccgcgcgccggacgccagtgaccgcgatggtgaactccagtcgcgtgcagcctcagcagcccggggacgccaagcggccgcccgcgccccgcgcgccggacccgggccggctgatggctggctgcgcggccgtgggcgccagcctcgccgccccgggcggcctctgcgagcagcggggcctggagatcgagatgcagcgcatccggcaggcggccgcgcgggaccccccggccggagccgcggcctccccttctcctccgctctcgtcgtgctcccggcaggcgtggagccgcgataaccccggcttcgaggccgaggaggaggaggaggaggtggaaggggaagaaggcggaatggtggtggagatggacgtagagtggcgcccgggcagccggaggtcggccgcctcctcggccgtgagctccgtgggcgcgcggagccgggggcttgggggctaccacggcgcgggccacccgagcgggaggcggcgccggcgagaggaccagggcccgccgtgccccagcccagtcggcggcggggacccgctgcatcgccacctccccctggaagggcagccgccccgagtggcctgggcggagaggctggttcgcgggctgcgaggtctctggggaacaagactcatggaggaaagcagcactaaccgagagaaataccttaaaagtgttttacgggaactggtcacatacctcctttttctcatagtcttgtgcatcttgacctacggcatgatgagctccaatgtgtactactacacccggatgatgtcacagctcttcctagacacccccgtgtccaaaacggagaaaactaactttaaaactctgtcttccatggaagacttctggaagttcacagaaggctccttattggatgggctgtactggaagatgcagcccagcaaccagactgaagctgacaaccgaagtttcatcttctatgagaacctgctgttaggggttccacgaatacggcaactccgagtcagaaatggatcctgctctatcccccaggacttgagagatgaaattaaagagtgctatgatgtctactctgtcagtagtgaagatagggctccctttgggccccgaaatggaaccgcttggatctacacaagtgaaaaagacttgaatggtagtagccactggggaatcattgcaacttatagtggagctggctattatctggatttgtcaagaacaagagaggaaacagctgcacaagttgctagcctcaagaaaaatgtctggctggaccgaggaaccagggcaacttttattgacttctcagtgtacaacgccaacattaacctgttctgtgtggtcaggttattggttgaattcccagcaacaggtggtgtgattccatcttggcaatttcagcctttaaagctgatccgatatgtcacaacttttgatttcttcctggcagcctgtgagattatcttttgtttctttatcttttactatgtggtggaagagatattggaaattcgcattcacaaactacactatttcaggagtttctggaattgtctggatgttgtgatcgttgtgctgtcagtggtagctataggaattaacatatacagaacatcaaatgtggaggtgctactacagtttctggaagatcaaaatactttccccaactttgagcatctggcatattggcagatacagttcaacaatatagctgctgtcacagtattttttgtctggattaagctcttcaaattcatcaattttaacaggaccatgagccagctctcgacaaccatgtctcgatgtgccaaagacctgtttggctttgctattatgttcttcattattttcctagcgtatgctcagttggcataccttgtctttggcactcaggtcgatgacttcagtactttccaagagtgtatcttcactcaattccgtatcattttgggcgatatcaactttgcagagattgaggaagctaatcgagttttgggaccaatttatttcactacatttgtgttctttatgttcttcattcttttgaatatgtttttggctatcatcaatgatacttactctgaagtgaaatctgacttggcacagcagaaagctgaaatggaactctcagatcttatcagaaagggctaccataaagctttggtcaaactaaaactgaaaaaaaataccgtggatgacatttcagagagtctgcggcaaggaggaggcaagttaaactttgacgaacttcgacaagatctcaaagggaagggccatactgatgcagagattgaggcaatattcacaaagtacgaccaagatggagaccaagaactgaccgaacatgaacatcagcagatgagagacgacttggagaaagagagggaggacctggatttggatcacagttctttaccacgtcccatgagcagccgaagtttccctcgaagcctggatgactctgaggaggatgacgatgaagatagcggacatagctccagaaggaggggaagcatttctagtggcgtttcttacgaagagtttcaagtcctggtgagacgagtggaccggatggagcattccatcggcagcatagtgtccaagattgacgccgtgatcgtgaagctagagattatggagcgagccaaactgaagaggagggaggtgctgggaaggctgttggatggggtggccgaggatgaaaggctgggtcgtgacagtgaaatccatagggaacagatggaacggctagtacgtgaagagttggaacgctgggaatccgatgatgcagcttcccagatcagtcatggtttaggcacgccagtgggactaaatggtcaacctcgccccagaagctcccgcccatcttcctcccaatctacagaaggcatggaaggtgcaggtggaaatgggagttctaatgtccacgtatgatatgtgtgtttcagtatgtgtgtttctaataagtgaggaagtggctgtcctgaattgctgtaacaagcacactatttatatgccctgaccaccataggatgctagtctttgtgaccgattgctaatcttctgcactttaatttattttatataaactttacccatggttcaaagatttttttttctttttctcatataagaaatctaggtgtaaatattgagtacagaaaaaaaatcttcatgatgtgtattgagcggtacgcccagttgccaccatgactgagtcttctcagttgacaatgaagtagccttttaaagctagaaaactgtcaaagggcttctgagtttcatttccagtcacaaaaatcagtattgttatttttttccaagagtgtgaaggaaaatggggcattcctttccactctggcatagttcatgagcttaatacatagctttcttttaagaaaggagccttttttttcaactagcttcctggggtaaacttttctaaaagataaaatggaaaggaactccaaactatgatagaatctgtgtgaatggttaagatgaatgttaaatactatgcttttttgtaagttgatcgtatctgatgtctgtgggactaactgtatcacttaatttttaccttattttggctctaatttgaataagctgagtaaaaccaccaaagatcagttataggataaaatggcatctctaaccataacacaggagaattggaaggagccctaagttgtcactcagtttaatttcttttaatggttagtttagcctaaagatttatctgcatattctttttcccatgtggctctactcatttgcaactgaatttaatgttataactcatctagtgagaccaacttactaaatttttagtatgcactgaaagtttttatccaacaattatgttcattttaagcaaaattttaagaaagttttgaaattcataaagcatttggttttaaactattttaagaatatagtactcggtcaggtatgacggctcacgcctgtaatcccagcactttgggaggccgaaacaggcgaatcacttgagcccaggagttcaagaccaacatgggcaatgtggcgaaactccatctctacaaaaaatgcaaaaataaaaaatatagtactcaagtattcttgatcctgtgtttcaaaactagaatttgtaatgcaaatggagctcagtctaataaaaaagaggttttggtattaaaagttcatacattagacagtatcagccaaaatttgagttagcaacactgttttctttacgagagggtctcacccaaatttatggggagaaatctatttctcaaaaaaaaaaatcttcttttacagaaatgttgagtaaggtgacattttgagcgctaataagcaaaagagcatgcagtgctgttgaataaccctcacttggagaaccaagagaatcctgtcgtttaatgctatattttaatttcacaagttgttcatttaactggtagaatgtcagtccaatctccaatgagaacatgagcaaatagacctttccaggttgaaagtgaaacatactgggtttctgtaagtttttcctcatggcttcatctctatctttactttctcttgaatatgctacacaaagttctttattactacatactaaagtttgcattccagggatattgactgtacatatttatgtatatgtaccatgttgttacatgtaaacaaacttcaatttgaagtgcagctattatgtggtatccatgtgtatcgaccatgtgccatatatcaattatggtcactagaaagtctctttatgatactttttattgtactgtttttcatttcacttgcaaaattttgcagaattcctcctttctacccataaattacatatatttttcttctttagtcatggagaactccccccctcatctcttccctattatctttccctgtgtactggtattattaaaaagacattacatacgcaagtctttctcgacaatcaagaatgttattaatgtgtaatactgagcactttacttcttaataaaaacttgatatagtagca

SEQ ID NO: 22952 - DNA, 1222 bp, Homo sapiens
  source 1..1222: mol_type = unassigned DNA
atgtcttctctctcttacagctcttcaaattcatcaattttaacaggaccatgagccagctctcgacaaccatgtctcgatgtgccaaagacctgtttggctttgctattatgttcttcattattttcctagcgtatgctcagttggcataccttgtctttggcactcaggtcgatgacttcagtactttccaagagtgtatcttcactcaattccgtatcattttgggcgatatcaactttgcagagattgaggaagctaatcgagttttgggaccaatttatttcactacatttgtgttctttatgttcttcattcttttgaatatgtttttggctatcatcaatgatacttactctgaagtgaaatctgacttggcacagcagaaagctgaaatggaactctcagatcttatcagaaagggctaccataaagctttggtcaaactaaaactgaaaaaaaataccgtggatgacatttcagagagtctgcggcaaggaggaggcaagttaaactttgacgaacttcgacaagatctcaaagggaagggccatactgatgcagagattgaggcaatattcacaaagtacgaccaagatggagaccaagaactgaccgaacatgaacatcagcagatgagagacgacttggagaaagagagggaggacctggatttggatcacagttctttaccacgtcccatgagcagccgaagtttccctcgaagcctggatgactctgaggaggatgacgatgaagatagcggacatagctccagaaggaggggaagcatttctagtggcgtttcttacgaagagtttcaagtcctggtgagacgagtggaccggatggagcattccatcggcagcatagtgtccaagattgacgccgtgatcgtgaagctagagattatggagcgagccaaactgaagaggagggaggtgctgggaaggctgttggatggggtggccgaggatgaaaggctgggtcgtgacagtgaaatccatagggaacagatggaacggctagtacgtgaagagttggaacgctgggaatccgatgatgcagcttcccagatcagtcatggtttaggcacgccagtgggactaaatggtcaacctcgccccagaagctcccgcccatcttcctcccaatctacagaaggcatggaaggtgcaggtggaaatgggagttctaatgtccacgtatgatatgtgtgttt

SEQ ID NO: 22953 - DNA, 1720 bp, Homo sapiens
  source 1..1720: mol_type = unassigned DNA
aatggtagtagccactggggaatcattgcaacttatagtggagctggctattatctggatttgtcaagaacaagagaggaaacagctgcacaagttgctagcctcaagaaaaatgtctggctggaccgaggaaccagggcaacttttattgacttctcagtgtacaacgccaacattaacctgttctgtgtggtcagctgtcagtggtagctataggaattaacatatacagaacatcaaatgtggaggtgctactacagtttctggaagatcaaaatactttccccaactttgagcatctggcatattggcagatacagttcaacaatatagctgctgtcacagtattttttgtctggattaagctcttcaaattcatcaattttaacaggaccatgagccagctctcgacaaccatgtctcgatgtgccaaagacctgtttggctttgctattatgttcttcattattttcctagcgtatgctcagttggcataccttgtctttggcactcaggtcgatgacttcagtactttccaagagtgtatcttcactcaattccgtatcattttgggcgatatcaactttgcagagattgaggaagctaatcgagttttgggaccaatttatttcactacatttgtgttctttatgttcttcattcttttgaatatgtttttggctatcatcaatgatacttactctgaagtgaaatctgacttggcacagcagaaagctgaaatggaactctcagatcttatcagaaagggctaccataaagctttggtcaaactaaaactgaaaaaaaataccgtggatgacatttcagagagtctgcggcaaggaggaggcaagttaaactttgacgaacttcgacaagatctcaaagggaagggccatactgatgcagagattgaggcaatattcacaaagtacgaccaagatggagaccaagaactgaccgaacatgaacatcagcagatgagagacgacttggagaaagagagggaggacctggatttggatcacagttctttaccacgtcccatgagcagccgaagtttccctcgaagcctggatgactctgaggaggatgacgatgaagatagcggacatagctccagaaggaggggaagcatttctagtggcgtttcttacgaagagtttcaagtcctggtgagacgagtggaccggatggagcattccatcggcagcatagtgtccaagattgacgccgtgatcgtgaagctagagattatggagcgagccaaactgaagaggagggaggtgctgggaaggctgttggatggggtggccgaggatgaaaggctgggtcgtgacagtgaaatccatagggaacagatggaacggctagtacgtgaagagttggaacgctgggaatccgatgatgcagcttcccagatcagtcatggtttaggcacgccagtgggactaaatggtcaacctcgccccagaagctcccgcccatcttcctcccaatctacagaaggcatggaaggtgcaggtggaaatgggagttctaatgtccacgtatgatatgtgtgtttcagtatgtgtgtttctaataagtgaggaagtggctgtcctgaattgctgtaacaagcacactatttatatgccctgaccaccataggatgctagtctttgtgaccgattgctaatcttctgcactttaatttattttatataaactttaccca

SEQ ID NO: 22954 - DNA, 3043 bp, Homo sapiens
  source 1..3043: mol_type = unassigned DNA
cagcatcgccttttcctcccgtttctccttccactcccagctccacatcctcctcctattctcccctctcccctcttcaaacccccaccttccagttccctcacctcccctttcggctggtcccctggggcttgcagcaagagggagagagagctcctgacaggattgatggtccttccccaccctgtcctctcatccgctccctccccagcaggcacagacatccccctacaaaaggcaggagcccaggctgtgtggaaacagctgctctcagacgcctttccatttgctctctgctggctaggctgggctgtgcctctgctccctcttcctctagctgagagtgggcacctggggtaccgggcccccccacctcattccccatgaatgctgtgggaagtcctgaggggcaggagctgcaaaagctggggagtggagcctgggacaaccccgcctacagtggtcccccttccccacacgggacgctgagagtctgcaccatctccagcacggggcctctccagccccaacccaagaagcctgaagatgaaccccaggagacggcatacaggacccaggtgtccagctgctgcctccatatctgtcaaggcatcagaggactttggggaacaaccctgactgagaacacagctgagaaccgggaactttatatcaagaccaccctgagggagctgttggtatatattgtgttcctggtggacatctgtctactgacctatggaatgacaagctccagtgcttattactacaccaaagtgatgtctgagctcttcttacatactccatcagacactggagtctcctttcaggccatcagcagcatggcggacttctgggattttgcccagggcccactactggacagtttgtattggaccaaatggtacaacaaccagagcctgggccatggctcccactccttcatctactatgagaacatgctgctgggggttccgaggctgcggcagctaaaggtccgcaatgactcctgtgtggtgcatgaagacttccgggaggacattctgagctgctatgatgtctactctccagacaaagaagaacaactcccctttgggcccttcaatggcacagcgtggacataccactcgcaggatgagttggggggcttctcccactggggcaggctcacaagctacagcggaggtggctactacctggaccttccaggatcccgacagggtagtgcagaggctctccgggcccttcaggaggggctgtggctggacaggggcactcgagtggtgttcatcgacttctcagtctacaatgccaatatcaatcttttctgtgtcctgaggctggtggtggagtttccagctacaggaggtgccatcccatcctggcaaatccgcacagtcaagctgatccgctatgtcagcaactgggacttctttatcgttggctgtgaggtcatcttctgcgtcttcatcttctactatgtggtggaagagatcctggagctccacattcaccggcttcgctacctcagcagcatctggaacatactggacctggtggtcatcttgctctccattgtggctgtgggcttccacatattccgaaccctcgaggtgaatcggctcatggggaagctcctgcagcagccaaacacgtatgcagactttgagttcctcgccttctggcagacacagtacaacaacatgaatgctgtcaacctcttcttcgcctggatcaagatattcaagtacatcagcttcaacaaaaccatgacccagctctcctccacgctggcccgctgtgccaaggacatcctgggcttcgccgtcatgttcttcattgttttcttcgcctatgcccaactcggctacctgcttttcgggacccaagtggaaaactttagcactttcatcaagtgcattttcactcagttccggataatcctcggggactttgactacaatgctatcgacaatgccaaccgcatcctgggccctgcctactttgtcacctatgtcttcttcgtcttcttcgtgctcctgaacatgttcctggccatcatcaatgacacatattcagaggtcaaggaggagctggctggacagaaggatgagctgcaactttctgacctcctgaaacagggctacaacaagaccctactaagactgcgtctgaggaaggagagggtttcggatgtgcagaaggtcctgcagggtggggagcaggagatccagtttgaggatttcaccaacaccttaagggaactgggacacgcagagcatgaaatcactgagctcacggccaccttcaccaagtttgacagagatgggaatcgtattctggatgagaaggaacaggaaaaaatgcgacaggacctggaggaagagagggtggccctcaacactgagattgagaaactaggccgatctattgtgagcagcccacaaggcaaatcgggtccagaggctgccagagcaggaggctgggtttcaggagaagaattctacatgctcacaaggagagttctgcagctggagactgtcctggaaggagtagtgtcccagattgatgctgtaggctcaaagctgaaaatgctggagaggaaggggtggctggctccctccccaggcgtgaaggaacaagctatttggaagcacccgcagccagccccagctgtgaccccagacccctggggagtccagggtgggcaggagagtgaggttccctataaaagagaagaggaagccttagaggagaggagactctcccgtggtgagattccaacgttgcagaggagttaagtgtgaggcactcccggagcaaagtctatgaaggatcttctgcaagaggctgcctcctggtccactgaacctggaaactgagtgggctttaaccaggagataaaaatggagcctgaagggaatcaggcaaggaaatgaactcaggattcagagatctttgaattaatatgtggtgggttctgacattattcttccataagaccatgtgggtttccatggtggctatcaataaaactccttag

SEQ ID NO: 22955 - DNA, 2826 bp, Homo sapiens
  source 1..2826: mol_type = unassigned DNA
cagcatcgccttttcctcccgtttctccttccactcccagctccacatcctcctcctattctcccctctcccctcttcaaacccccaccttccagttccctcacctcccctttcggctggtcccctggggcttgcagcaagagggagagagagctcctgacaggattgatggtccttccccaccctgtcctctcatccgctccctccccagcaggcacagacatccccctacaaaaggcaggagcccaggctgtgtggaaacagctgctctcagacgcctttccatttgctctctgctggctaggctgggctgtgcctctgctccctcttcctctagctgagagtgggcacctggggtaccgggcccccccacctcattccccatgaatgctgtgggaagtcctgaggggcaggagctgcaaaagctggggagtggagcctgggacaaccccgcctacagtggtcccccttccccacacgggacgctgagagtctgcaccatctccagcacggggcctctccagccccaacccaagaagcctgaagatgaaccccaggagacggcatacaggacccaggtgtccagctgctgcctccatatctgtcaaggcatcagaggactttggggaacaaccctgactgagaacacagctgagaaccgggaactttatatcaagaccaccctgagggagctgttggtatatattgtgttcctggtggacatctgtctactgacctatggaatgacaagctccagtgcttattactacaccaaagtgatgtctgagctcttcttacatactccatcagacactggagtctcctttcaggccatcagcagcatggcggacttctgggattttgcccagggcccactactggacagtttgtattggaccaaatggtacaacaaccagagcctgggccatggctcccactccttcatctactatgagaacatgctgctgggggttccgaggctgcggcagctaaaggtccgcaatgactcctgtgtggtgcatgaagacttccgggaggacattctgagctgctatgatgtctactctccagacaaagaagaacaactcccctttgggcccttcaatggcacagcgctggtggtggagtttccagctacaggaggtgccatcccatcctggcaaatccgcacagtcaagctgatccgctatgtcagcaactgggacttctttatcgttggctgtgaggtcatcttctgcgtcttcatcttctactatgtggtggaagagatcctggagctccacattcaccggcttcgctacctcagcagcatctggaacatactggacctggtggtcatcttgctctccattgtggctgtgggcttccacatattccgaaccctcgaggtgaatcggctcatggggaagctcctgcagcagccaaacacgtatgcagactttgagttcctcgccttctggcagacacagtacaacaacatgaatgctgtcaacctcttcttcgcctggatcaagatattcaagtacatcagcttcaacaaaaccatgacccagctctcctccacgctggcccgctgtgccaaggacatcctgggcttcgccgtcatgttcttcattgttttcttcgcctatgcccaactcggctacctgcttttcgggacccaagtggaaaactttagcactttcatcaagtgcattttcactcagttccggataatcctcggggactttgactacaatgctatcgacaatgccaaccgcatcctgggccctgcctactttgtcacctatgtcttcttcgtcttcttcgtgctcctgaacatgttcctggccatcatcaatgacacatattcagaggtcaaggaggagctggctggacagaaggatgagctgcaactttctgacctcctgaaacagggctacaacaagaccctactaagactgcgtctgaggaaggagagggtttcggatgtgcagaaggtcctgcagggtggggagcaggagatccagtttgaggatttcaccaacaccttaagggaactgggacacgcagagcatgaaatcactgagctcacggccaccttcaccaagtttgacagagatgggaatcgtattctggatgagaaggaacaggaaaaaatgcgacaggacctggaggaagagagggtggccctcaacactgagattgagaaactaggccgatctattgtgagcagcccacaaggcaaatcgggtccagaggctgccagagcaggaggctgggtttcaggagaagaattctacatgctcacaaggagagttctgcagctggagactgtcctggaaggagtagtgtcccagattgatgctgtaggctcaaagctgaaaatgctggagaggaaggggtggctggctccctccccaggcgtgaaggaacaagctatttggaagcacccgcagccagccccagctgtgaccccagacccctggggagtccagggtgggcaggagagtgaggttccctataaaagagaagaggaagccttagaggagaggagactctcccgtggtgagattccaacgttgcagaggagttaagtgtgaggcactcccggagcaaagtctatgaaggatcttctgcaagaggctgcctcctggtccactgaacctggaaactgagtgggctttaaccaggagataaaaatggagcctgaagggaatcaggcaaggaaatgaactcaggattcagagatctttgaattaatatgtggtgggttctgacattattcttccataagaccatgtgggtttccatggtggctatcaataaaactccttaggaaaactt

SEQ ID NO: 22956 - DNA, 2708 bp, Homo sapiens
  source 1..2708: mol_type = unassigned DNA
cagcatcgccttttcctcccgtttctccttccactcccagctccacatcctcctcctattctcccctctcccctcttcaaacccccaccttccagttccctcacctcccctttcggctggtcccctggggcttgcagcaagagggagagagagctcctgacaggattgatggtccttccccaccctgtcctctcatccgctccctccccagcaggcacagacatccccctacaaaaggcaggagcccaggctgtgtggaaacagctgctctcagacgcctttccatttgctctctgctggctaggctgggctgtgcctctgctccctcttcctctagctgagagtgggcacctggggtaccgggcccccccacctcattccccatgaatgctgtgggaagtcctgaggggcaggagctgcaaaagctggggagtggagcctgggacaaccccgcctacagtggtcccccttccccacacgggacgctgagagtctgcaccatctccagcacggggcctctccagccccaacccaagaagcctgaagatgaaccccaggagacggcatacaggacccaggtgtccagctgctgcctccatatctgtcaaggcatcagaggactttggggaacaaccctgactgagaacacagctgagaaccgggaactttatatcaagaccaccctgagggagctgttggtatatattgtgttcctggtggacatctgtctactgacctatggaatgacaagctccagtgcttattactacaccaaagtgatgtctgagctcttcttacatactccatcagacactggagtctcctttcaggccatcagcagcatggcggacttctgggattttgcccagggcccactactggacagtttgtattggaccaaatggtacaacaaccagagcctgggccatggctcccactccttcatctactatgagaacatgctgctgggggttccgaggctgcggcagctaaaggtccgcaatgactcctgtgtggtgcatgaagacttccgggaggacattctgagctgctatgatgtctactctccagacaaagaagaacaactcccctttgggcccttcaatggcacagcgtggacataccactcgcaggatgagttggggggcttctcccactggggcaggctcacaagctacagcggaggtggctactacctggaccttccaggatcccgacagggtagtgcagaggctctccgggcccttcaggaggggctgtggctggacaggggcactcgagtggtgttcatcgacttctcagtctacaatgccaatatcaatcttttctgtgtcctgaggctggtggtggagtttccagctaggaggtgccatcccatcctggcaaatccgcacagtcaagctgatccgctatgtcagcaactgttctttatcgttggctgtgaggtcatcttctgcgtcttcatcttctactatgtggtggaagagatcctggagctccacattcaccggcttcgctacctcagcagcatctggaacatactggacctggtggtcatcttgctctccattgtggctgtgggcttccacatattccgaaccctcgaggtgaatcggctcatggggaagctcctgcagcagccaaacacgtatgcagactttgagttcctcgccttctggcagacacagtacaacaacatgaatgctgtcaacctcttcttcgcctggatcaagatattcaagtacatcagcttcaacaaaaccatgacccagctctcctccacgctggcccgctgtgccaaggacatcctgggcttcgccgtcatgttcttcattgttttcttcgcctatgcccaactcggctacctgcttttcgggacccaagtggaaaactttagcactttcatcaagtgcattttcactcagttccggataatcctcggggactttgactacaatgctatcgacaatgccaaccgcatcctgggccctgcctactttgtcacctatgtcttcttcgtcttcttcgtgctcctgaacatgttcctggccatcatcaatgacacatattcagaggtcaaggaggagctggctggacagaaggatgagctgcaactttctgacctcctgaaacagggctacaacaagaccctactaagactgcgtctgaggaaggagagggtttcggatgtgcagaaggtcctgcagggtggggagcaggagatccagtttgaggatttcaccaacaccttaagggaactgggacacgcagagcatgaaatcactgagctcacggccaccttcaccaagtttgacagagatgggaatcgtattctggatgagaaggaacaggaaaaaatgcgacaggacctggaggaagagagggtggccctcaacactgagattgagaaactaggccgatctattgtgagcagcccacaaggcaaatcgggtccagaggctgccagagcaggaggctgggtttcaggagaagaattctacatgctcacaaggagagttctgcagctggagactgtcctggaaggagtagtgtcccagattgatgctgtaggctcaaagctgaaaatgctggagaggaaggggtggctggctccctccccaggcgtgaaggaacaagctatttggaagcacccgcagccagccccagctgtgaccccagacccctggggaccagggtgggcaggagag

SEQ ID NO: 22957 - DNA, 2966 bp, Homo sapiens
  source 1..2966: mol_type = unassigned DNA
cagcatcgccttttcctcccgtttctccttccactcccagctccacatcctcctcctattctcccctctcccctcttcaaacccccaccttccagttccctcacctcccctttcggctggtcccctggggcttgcagcaagagggagagagagctcctgacaggattgatggtccttccccaccctgtcctctcatccgctccctccccagcaggcacagacatccccctacaaaaggcaggagcccaggctgtgtggaaacagctgctctcagacgcctttccatttgctctctgctggctaggctgggctgtgcctctgctccctcttcctctagctgagagtgggcacctggggtaccgggcccccccacctcattccccatgaatgctgtgggaagtcctgaggggcaggagctgcaaaagctggggagtggagcctgggacaaccccgcctacagtggtcccccttccccacacgggacgctgagagtctgcaccatctccagcacggggcctctccagccccaacccaagaagcctgaagatgaaccccaggagacggcatacaggacccaggtgtccagctgctgcctccatatctgtcaaggcatcagaggactttggggaacaaccctgactgagaacacagctgagaaccgggaactttatatcaagaccaccctgagggagctgttggtatatattgtgttcctggtggacatctgtctactgacctatggaatgacaagctccagtgcttattactacaccaaagtgatgtctgagctcttcttacatactccatcagacactggagtctcctttcaggccatcagcagcatggcggacttctgggattttgcccagggcccactactggacagtttgtattggaccaaatggtacaacaaccagagcctgggccatggctcccactccttcatctactatgagaacatgctgctgggggttccgaggctgcggcagctaaaggtccgcaatgactcctgtgtggtgcatgaagacttccgggaggacattctgagctgctatgatgtctactctccagacaaagaagaacaactcccctttgggcccttcaatggcacagcgtggacataccactcgcaggatgagttggggggcttctcccactggggcaggctcacaagctacagcggaggtggctactacctggaccttccaggatcccgacagggtagtgcagaggctctccgggcccttcaggaggggctgtggctggacaggggcactcgagtggtgttcatcgacttctcagtctacaatgccaatatcaatcttttctgtgtcctgaggctggtggtggagtttccagctacaggaggtgccatcccatcctggcaaatccgcacagtcaagctgatccgctatgtcagcaactgggacttctttatcgttggctgtgaggtcatcttctgcgtcttcatcttctactatgtggtggaagagatcctggagctccacattcaccggcttcgctacctcagcagcatctggaacatactggacctggtggtcatcttgctctccattgtggctgtgggcttccacatattccgaaccctcgaggtgaatcggctcatggggaagctcctgcagcagccaaacacgtatgcagactttgagttcctcgccttctggcagacacagtacaacaacatgaatgctgtcaacctcttcttcgcctggatcaagatattcaagtacatcagcttcaacaaaaccatgacccagctctcctccacgctggcccgctgtgccaaggacatcctgggcttcgccgtcatgttcttcattgttttcttcgcctatgcccaactcggctacctgcttttcgggacccaagtggaaaactttagcactttcatcaagtgcattttcactcagttccggataatcctcggggactttgactacaatgctatcgacaatgccaaccgcatcctgggccctgcctactttgtcacctatgtcttcttcgtcttcttcgtgctcctgaacatgttcctggccatcatcaatgacacatattcagaggtcaaggaggagctggctggacagaaggatgagctgcaactttctgacctcctgaaacagggctacaacaagaccctactaagactgcgtctgaggaaggagagggtttcggatgtgcagaaggtcctgcagggtggggagcaggagatccagtttgaggatttcaccaacaccttaagggaactgggacacgcagagcatgaaatcactgagctcacggccaccttcaccaagtttgacagagatgggaatcgtattctggatgagaaggaacaggaaaaaatgcgacaggacctggaggaagagagggtggccctcaacactgagattgagaaactaggccgatctattgtgagcagcccacaaggcaaatcgggtccagaggctgccagagcaggaggctgggtttcaggagaagaattctacatgctcacaaggagagttctgcagctggagactgtcctggaaggagtagtgtcccagattgatgctgtaggctcaaagctgaaaatgctggagaggaaggggtggctggctccctccccaggcgtgaggttccctataaaagagaagaggaagccttagaggagaggagactctcccgtggtgagattccaacgttgcagaggagttaagtgtgaggcactcccggagcaaagtctatgaaggatcttctgcaagaggctgcctcctggtccactgaacctggaaactgagtgggctttaaccaggagataaaaatggagcctgaagggaatcaggcaaggaaatgaactcaggattcagagatctttgaattaatatgtggtgggttctgacattattcttccataagaccatgtgggtttccatggtggctatcaataaaactccttaggaaaactt

SEQ ID NO: 22958 - DNA, 2202 bp, Homo sapiens
  source 1..2202: mol_type = unassigned DNA
gggcggtgtagtgcaggtccgccatggctgaggcgtcacggtggcaccgaggcggggcttcgaaacataagttgcattacagaaaggaagtagaaattacaaccacacttcaggaattgttactctactttatttttttaataaacctatgtatattgacttttgggatggtaaacccacatatgtattacttaaacaaggttatgtcatctctatttttggacacttctgtgcctggtgaagaaagaaccaactttaagtccattcgcagcataactgatttttggaagtttatggaaggaccccttttggaaggtctgtactgggattcatggtacaataaccagcagctgtataatttaaagaacagcagtcgcatctactatgaaaatatacttctaggagttcccagagttcgtcaactaaaagtccgcaacaacacatgcaaagtctattcatcttttcagtctttgatgagtgaatgttatggcaaatatacttctgcaaatgaagacctctctaattttggccttcaaattaatactgaatggagatattctacttctaataccaactccccttggcactggggatttcttggtgtttaccgaaatgggggatacattttcactttatcaaaatcgaaatctgaaaccaaaaacaagttcattgaccttcgactgaacagctggatcacaagagggactagagttatttttattgatttttccttatataatgctaatgtaaatctattttgtattatcagattggtggcagaattccctgcaactggaggaatacttacttcatggcagttttactctgtgaagctcctcagatatgttagctactatgactattttattgcttcctgtgaaatcacattctgtatttttctttttgtcttcacaacacaagaagtcaaaaaaataaaagaatttaagtctgcctatttcaaaagtatttggaactggctagaattgctacttttgctgttgtgttttgtggctgtttccttcaacacatactataatgtacaaatttttctcttacttggacagctgttgaaaagtactgaaaaatattcagatttctattttcttgcatgctggcacatttattacaataatataattgctattaccatcttttttgcatggataaagatattcaaattcataagctttaacaagacaatgtctcagctgtcatcaaccttgtcccgttgtgttaaagacatagtaggatttgccatcatgttttttataatattctttgcttatgcccagttaggatttcttgtttttggatcacaagttgatgacttttccacttttcagaattccatatttgcacaatttcgaattgttcttggagattttaattttgctggtattcagcaagccaatcctatcttgggacccatttacttcatcactttcatcttttttgtgttctttgtcctgctgaatatgttcttggcaattattaatgatacctattctgaagtgaaagctgactattcaataggcagaaggctagattttgaacttggcaaaatgattaaacagagttacaaaaatgttctcgagaaattcagactgaagaaagctcaaaaagatgaagacaagaaaaccaaaggcagcggagatttggctgaacaagccagaagagaaggctttgacgaaaatgagattcaaaacgcagagcagatgaaaaaatggaaagagaggcttgagaaaaagtattattctatggaaattcaagatgactaccagcctgtcactcaagaagaatttcgagatggcaccacaaccaagtacaaaatgagattctctgagtgcctgacaaaacgaatttaagtaccagccaagtacacacgatgatagcttcaaggaatacaactgactttatgatatgaattttcaaggaacgtatcttatatggattttgaagaatcttgtttgcttataagaacttcaagaagcctaagcttggctttaattttcttgtactctctgtactcctcaagcactggaacacgatcctctttctgggcattcctaggggagaaaataaaatttgtaatgttctagagatcatttggaaaaaaagatccaaaagttgtcttaatatgagacatactgttactaaacataagttcaaataaaaagttgttctgttaaaaaaaaaaaaaaa

SEQ ID NO: 22959 - DNA, 1829 bp, Homo sapiens
  source 1..1829: mol_type = unassigned DNA
gcgcgcaagcgccgcggcctcaggcgaacgaacgggcggtgtagtgcaggtccgccatggctgaggcgtcacggtggcaccgaggcgtgacttttgggatggtaaacccacatatgtattacttaaacaaggttatgtcatctctatttttggacacttctgtgcctggtgaagaaagaaccaactttaagtccattcgcagcataactgatttttggaagtttatggaaggaccccttttggaaggtctgtactgggattcatggtacaataaccagcagctgtataatttaaagaacagcagtcgcatctactatgaaaatatacttctaggagttcccagagttcgtcaactaaaagtccgcaacaacacatgcaaagtctattcatcttttcagtctttgatgagtgaatgttatggcaaatatacttctgcaaatgaagacctctctaattttggccttcaaattaatactgaatggagatattctacttctaataccaactccccttggcactggggatttcttggtgtttaccgaaatgggggatacattttcactttatcaaaatcgaaatctgaaaccaaaaacaagttcattgaccttcgactgaacagctggatcacaagagggactagagttatttttattgatttttccttatataatgctaatgtaaatctattttgtattatcagattggtggcagaattccctgcaactggaggaatacttacttcatggcagttttactctgtgaagctcctcagatatgttagctactatgactattttattgcttcctgtgaaatcacattctgtatttttctttttgtcttcacaacacaagaagtcaaaaaaataaaagaatttaagtctgcctatttcaaaagtatttggaactggctagaattgctacttttgctgttgtgttttgtggctgtttccttcaacacatactataatgtacaaatttttctcttacttggacagctgttgaaaagtactgaaaaatattcagatttctattttcttgcatgctggcacatttattacaataatataattgctattaccatcttttttgcatggataaagatattcaaattcataagctttaacaagacaatgtctcagctgtcatcaaccttgtcccgttgtgttaaagacatagtaggatttgccatcatgttttttataatattctttgcttatgcccagttaggatttcttgtttttggatcacaagttgatgacttttccacttttcagaattccatatttgcacaatttcgaattgttcttggagattttaattttgctggtattcagcaagccaatcctatcttgggacccatttacttcatcactttcatcttttttgtgttctttgtcctgctgaatatgttcttggcaattattaatgatacctattctgaagtgaaagctgactattcaataggcagaaggctagattttgaacttggcaaaatgattaaacagagttacaaaaatgttctcgagaaattcagactgaagaaagctcaaaaagatgaagacaagaaaaccaaaggcagcggagatttggctgaacaagccagaagagaaggctttgacgaaaatgagattcaaaacgcagagcagatgaaaaaatggaaagagaggcttgagaaaaagtattattctatggaaattcaagatgactaccagcctgtcactcaagaagaatttcgagaactttttttatatgctgtggagctggagaaggaattacactacatcaatttgaagctaaatcaagtggtgagaaaggtttcagctctatag

SEQ ID NO: 22960 - DNA, 2282 bp, Homo sapiens
  source 1..2282: mol_type = unassigned DNA
aacgggcggtgtagtgcaggtccgccatggctgaggcgtcacggtggcaccgaggcggggcttcgaaacataagttgcattacagaaaggaagtagaaattacaaccacacttcaggaattgttactctactttatttttttaataaacctatgtatattgacttttgggatggtaaacccacatatgtattacttaaacaaggttatgtcatctctatttttggacacttctgtgcctggtgaagaaagaaccaactttaagtccattcgcagcataactgatttttggaagtttatggaaggaccccttttggaaggtctgtactgggattcatggtacaataaccagcagctgtataatttaaagaacagcagtcgcatctactatgaaaatatacttctaggagttcccagagttcgtcaactaaaagtccgcaacaacacatgcaaagtctattcatcttttcagtctttgatgagtgaatgttatggcaaatatacttctgcaaatgaagacctctctaattttggccttcaaattaatactgaatggagatattctacttctaataccaactccccttggcactggggatttcttggtgtttaccgaaatgggggatacattttcactttatcaaaatcgaaatctgaaaccaaaaacaagttcattgaccttcgactgaacagctggatcacaagagggactagagttatttttattgatttttccttatataatgctaatgtaaatctattttgtattatcagattggtggcagaattccctgcaactggaggaatacttacttcatggcagttttactctgtgaagctcctcagatatgttagctactatgactattttattgcttcctgtgaaatcacattctgtatttttctttttgtcttcacaacacaagaagtcaaaaaaataaaagaatttaagtctgcctatttcaaaagtatttggaactggctagaattgctacttttgctgttgtgttttgtggctgtttccttcaacacatactataatgtacaaatttttctcttacttggacagctgttgaaaagtactgaaaaatattcagatttctattttcttgcatgctggcacatttattacaataatataattgctattaccatcttttttgcatggataaagatattcaaattcataagctttaacaagacaatgtctcagctgtcatcaaccttgtcccgttgtgttaaagacatagtaggatttgccatcatgttttttataatattctttgcttatgcccagttaggatttcttgtttttggatcacaagttgatgacttttccacttttcagaattccatatttgcacaatttcgaattgttcttggagattttaattttgctggtattcagcaagccaatcctatcttgggacccatttacttcatcactttcatcttttttgtgttctttgtcctgctgaatatgttcttggcaattattaatgatacctattctgaagtgaaagctgactattcaataggcagaaggctagattttgaacttggcaaaatgattaaacagagttacaaaaatgttctcgagaaattcagactgaagaaagctcaaaaagatgaagacaagaaaaccaaaggcagcggagatttggctgaacaagccagaagagaaggctttgacgaaaatgagattcaaaacgcagagcagatgaaaaaatggaaagagaggcttgagaaaaagtattattctatggaaattcaagatgactaccagcctgtcactcaagaagaatttcgagaactttttttatatgctgtggagctggagaaggaattacactacatcaatttgaagctaaatcaagtggtgagaaaggtttcagctctatagtattgagacaagtggagagacagagtctcactctgtcgcccaggctggaacagcggtgcgacagtggcctcaacatcctccaaacagagaatcaagtgatcctcttgcctcagcctcccaagtatctgggactacacgcgaacaccaccacccctggctaatttaaacaaaatttttatacagtctgggtcccactatattgcccaggctggtcttgaactcctggcctcaagggatcctcctgcctcagcttcaaaaactgctgggattataggcatgagccactgtgcctggctagatttttttttaatttttgaaatacagtaatgttttatttaaaaatgggaatgacaataaatatttgcaaatcacacttgaaaa

SEQ ID NO: 22961 - DNA, 2185 bp, Homo sapiens
  source 1..2185: mol_type = unassigned DNA
gaacgaacgggcggtgtagtgcaggtccgccatggctgaggcgtcacggtggcaccgaggcggggcttcgaaacataagttgcattacagaaaggaagtagaaattacaaccacacttcaggaattgttactctactttatttttttaataaacctatgtatattgacttttgggatggtaaacccacatatgtattacttaaacaaggttatgtcatctctatttttggacacttctgtgcctggtgaagaaagaaccaactttaagtccattcgcagcataactgatttttggaagtttatggaaggaccccttttggaaggtctgtactgggattcatggtacaataaccagcagctgtataatttaaagaacagcagtcgcatctactatgaaaatatacttctaggagttcccagagttcgtcaactaaaagtccgcaacaacacatgcaaagtctattcatcttttcagtctttgatgagtgaatgttatggcaaatatacttctgcaaatgaagacctctctaattttggccttcaaattaatactgaatggagatattctacttctaataccaactccccttggcactggggatttcttggtgtttaccgaaatgggggatacattttcactttatcaaaatcgaaatctgaaaccaaaaacaagttcattgaccttcgactgaacagctggatcacaagagggactagagttatttttattgatttttccttatataatgctaatgtaaatctattttgtattatcagattggtggcagaattccctgcaactggaggaatacttacttcatggcagttttactctgtgaagctcctcagatatgttagctactatgactattttattgcttcctgtgaaatcacattctgtatttttctttttgtcttcacaacacaagaagtcaaaaaaataaaagaatttaagtctgcctatttcaaaagtatttggaactggctagaattgctacttttgctgctgttgaaaagtactgaaaaatattcagatttctattttcttgcatgctggcacatttattacaataatataattgctattaccatcttttttgcatggataaagatattcaaattcataagctttaacaagacaatgtctcagctgtcatcaaccttgtcccgttgtgttaaagacatagtaggatttgccatcatgttttttataatattctttgcttatgcccagttaggatttcttgtttttggatcacaagttgatgacttttccacttttcagaattccatatttgcacaatttcgaattgttcttggagattttaattttgctggtattcagcaagccaatcctatcttgggacccatttacttcatcactttcatcttttttgtgttctttgtcctgctgaatatgttcttggcaattattaatgatacctattctgaagtgaaagctgactattcaataggcagaaggctagattttgaacttggcaaaatgattaaacagagttacaaaaatgttctcgagaaattcagactgaagaaagctcaaaaagatgaagacaagaaaaccaaaggcagcggagatttggctgaacaagccagaagagaaggctttgacgaaaatgagattcaaaacgcagagcagatgaaaaaatggaaagagaggcttgagaaaaagtattattctatggaaattcaagatgactaccagcctgtcactcaagaagaatttcgagaactttttttatatgctgtggagctggagaaggaattacactacatcaatttgaagctaaatcaagtggtgagaaaggtttcagctctatagtattgagacaagtggagtggcaccacaaccaagtacaaaatgagattctctgagtgcctgacaaaacgaatttaagtaccagccaagtacacacgatgatagcttcaaggaatacaactgactttatgatatgaattttcaaggaacgtatcttatatggattttgaagaatcttgtttgcttataagaacttcaagaagcctaagcttggctttaattttcttgtactctctgtactcctcaagcactggaacacgatcctctttctgggcattcctaggggagaaaataaaatttgtaatgttctagagatcatttggaaaaaaagatccaaaagttgtctta

SEQ ID NO: 22962 - DNA, 2333 bp, Homo sapiens
  source 1..2333: mol_type = unassigned DNA
cgcgcaagcgccgcggcctcaggcgaacgaacgggcggtgtagtgcaggtccgccatggctgaggcgtcacggtggcaccgaggcggggcttcgaaacataagttgcattacagaaaggaagtagaaattacaaccacacttcaggaattgttactctactttatttttttaataaacctatgtatattgacttttgggatggtaaacccacatatgtattacttaaacaaggttatgtcatctctatttttggacacttctgtgcctggtgaagaaagaaccaactttaagtccattcgcagcataactgatttttggaagtttatggaaggaccccttttggaaggtctgtactgggattcatggtacaataaccagcagctgtataatttaaagaacagcagtcgcatctactatgaaaatatacttctaggagttcccagagttcgtcaactaaaagtccgcaacaacacatgcaaagtctattcatcttttcagtctttgatgagtgaatgttatggcaaatatacttctgcaaatgaagacctctctaattttggccttcaaattaatactgaatggagatattctacttctaataccaactccccttggcactggggatttcttggtgtttaccgaaatgggggatacattttcactttatcaaaatcgaaatctgaaaccaaaaacaagttcattgaccttcgactgaacagctggatcacaagagggactagagttatttttattgatttttccttatataatgctaatgtaaatctattttgtattatcagattggtggcagaattccctgcaactggaggaatacttacttcatggcagttttactctgtgaagctcctcagatatgttagctactatgactattttattgcttcctgtgaaatcacattctgtatttttctttttgtcttcacaacacaagaagtcaaaaaaataaaagaatttaagtctgcctatttcaaaagtatttggaactggctagaattgctacttttgctgttgtgttttgtggctgtttccttcaacacatactataatgtacaaatttttctcttacttggacagctgttgaaaagtactgaaaaatattcagatttctattttcttgcatgctggcacatttattacaataatataattgctattaccatcttttttgcatggataaagaatatgttcttggcaattattaatgatacctattctgaagtgaaagctgactattcaataggcagaaggctagattttgaacttggcaaaatgattaaacagagttacaaaaatgttctcgagaaattcagactgaagaaagctcaaaaagatgaagacaagaaaaccaaaggcagcggagatttggctgaacaagccagaagagaaggctttgacgaaaatgagattcaaaacgcagagcagatgaaaaaatggaaagagaggcttgagaaaaagtattattctatggaaattcaagatgactaccagcctgtcactcaagaagaatttcgagaactttttttatatgctgtggagctggagaaggaattacactacatcaatttgaagctaaatcaagtggtgagaaaggtttcagctctatagtattgagacaagtggagtcattctgtaagaaaaaggcaacagaagaattcagtatgaagattttcctccaattttcttcagtaatgagaaacaaaaagttggtaataacaaaaagcttgcatttccaaagttcttgaagttgaaaggataaaattccagtcttttgctaaaaggatgtatctgtagtacaaaacaatgaagtaaaccatatgtttgctaaaggtggagaggacagtctgtggttaatatggaacatcacttacgctcccttgagagggcctacttactctcccatcatttgttttgtttagtggcaccacaaccaagtacaaaatgagattctctgagtgcctgacaaaacgaatttaagtaccagccaagtacacacgatgatagcttcaaggaatacaactgactttatgatatgaattttcaaggaacgtatcttatatggattttgaagaatcttgtttgcttataagaacttcaagaagcctaagcttggctttaattttcttgtactctctgtactcctcaagcactggaacacgatcctctttctgggcattcctaggggagaaaataaaatttgtaatgttctagagatcatttggaaaaaaagatccaaaagttgtcttaatatgagacatactgttactaaacataagttcaaataaaaagttgttctgttaaaaaaaaaaaaaaa

SEQ ID NO: 22963 - DNA, 1110 bp, Homo sapiens
  source 1..1110: mol_type = unassigned DNA
agaggaacagggccctggagcacctggtttcggggacagtagggttggtgggagttgcgatgatattgccacctacctcttacatcttttagtgcgtatgttctgtccacccagctactggttcatttgagtagatcggagtcagatgagtacatgtttacgggaggcgcttggttacgggatccagataggaatctttatctgagctgcttgtcagtttgttcgtctgtccctaggtctgtctgctatcagctatgccgctgcccgttgcgctgcagacccgcttggccaagagaggcatcctcaaacatctggagcctgaaccagaggaagagatcattgccgaggactatgacgatgatcctgtggactacgaggccaccaggttggagggcctaccaccaagctggtacaaggtgttcgacccttcctgcgggctcccttactactggaatgcagacacagaccttgtatcctggctctccccacatgaccccaactccgtggttaccaaatcggccaagaagctcagaagcagtaatgcagatgctgaagaaaagttggaccggagccatgacaagtcggacaggggccatgacaagtcggaccgcagccatgagaaactagacaggggccacgacaagtcagaccggggccacgacaagtctgacagggatcgagagcgtggctatgacaaggtagacagagagagagagcgagacagggaacgggatcgggaccgcgggtatgacaaggcagaccgggaagagggcaaagaacggcgccaccatcgccgggaggagctggctccctatcccaagagcaagaaggcagtaagccgaaaggatgaagagttagaccccatggaccctagctcatactcagacgccccccggggcacgtggtcaacaggactccccaagcggaatgaggccaagactggcgctgacaccacagcagctgggcccctcttccagcagcggccgtatccatccccaggggctgtgctccgggccaatgcagaggcctcccgaaccaagcagcaggattgaagcttcggcctccctggccctgggttaaaataaaagctttctggtgatcctgcccacc

SEQ ID NO: 22964 - DNA, 664 bp, Homo sapiens
  source 1..664: mol_type = unassigned DNA
caggctcggggagtgaaggcctcgttgagagaaggtctcattcggtgttttgggaagagagtcgtgtgggcccaggtctgtctgctatcagctatgccgctgcccgttgcgctgcagacccgcttggccaagagaggcatcctcaaacatctggagcctgaaccagaggaagagatcattgccgaggactatgacgatgatcctgtggactacgaggccaccaggttggagggcctaccaccaagctggtacaaggtgttcgacccttcctgcgggctcccttactactggaatgcagacacagaccttgtatcctggctctccccacatgaccccaactccgtggttaccaaatcggccaagaagctcagaagcagtaatgcagcagtaagccgaaaggatgaagagttagaccccatggaccctagctcatactcagacgccccccggggcacgtggtcaacaggactccccaagcggaatgaggccaagactggcgctgacaccacagcagctgggcccctcttccagcagcggccgtatccatccccaggggctgtgctccgggccaatgcagaggcctcccgaaccaagcagcaggattgaagcttcggcctccctggccctgggttaaaataaaagctttctggtgatcctgcccacc

SEQ ID NO: 22965 - DNA, 374 bp, Homo sapiens
  source 1..374: mol_type = unassigned DNA
agttactttcaggctcggggagtgaaggcctcgttgagagaaggtctcattcggtgttttgggaagagagtcgtgtgggcccaggtatcgtagcggcgacacgagagagacgggcggtgtgacagccttccactacctgcacgagtgtattggtctgtctgctatcagctatgccgctgcccgttgcgctgcagacccgcttggccaagagaggcatcctcaaacatctggagcctgaaccagaggaagagatcattgccgaggactatgacgatgatcctgtggactacgaggccaccaggttggagggcctaccaccaagctggtacaaggtgttcgacccttcctgcccgggctggagtgcaatggtgtga

SEQ ID NO: 22966 - DNA, 1056 bp, Homo sapiens
  source 1..1056: mol_type = unassigned DNA
tgcctcctgagcgtagtccagttactttcaggctcggggagtgaaggcctcgttgagagaaggtctcattcggtgttttgggaagagagtcgtgtgggcccaggtatcgtagcggcgacacgagagagacgggcggtgtgacagccttccactacctgcacgagtgtattggtaacgttggggtctgtctgctatcagctatgccgctgcccgttgcgctgcagacccgcttggccaagagaggcatcctcaaacatctggagcctgaaccagaggaagagatcattgccgaggactatgacgatgatcctgtggactacgaggccaccaggttggagggcctaccaccaagctggtacaaggtgttcgacccttcctgcgggctcccttactactggaatgcagacacagaccttgtatcctggctctccccacatgaccccaactccgtggttaccaaatcggccaagaagctcagaagcagtaatgcagatgctgaagaaaagttggaccggagccatgacaagtcggacaggggccatgacaagtcggaccgcagccatgagaaactagacaggggccacgacaagtcagaccggggccacgacaagtctgacagggatcgagagcgtggctatgacaaggtagacagagagagagagcgagacagggaacgggatcgggaccgcgggtatgacaaggcagaccgggaagagggcaaagaacggcgccaccatcgccgggaggagctggctccctatcccaagagcaagaaggcagtaagccgaaaggatgaagagttagaccccatggaccctagctcatactcagacgccccccggggcacgtggtcaacaggactccccaagcggaatgaggccaagactggcgctgacaccacagcagctgggcccctcttccagcagcggccgtatccatccccaggggctgtgctccgggccaatgcagaggcctcccgaaccaagcagcaggattgaagcttcggcctccctggccctgggttaaaataaaagctttctggtgatcctgcccacc

SEQ ID NO: 22967 - DNA, 760 bp, Homo sapiens
  source 1..760: mol_type = unassigned DNA
tgcctcctgagcgtagtccagttactttcaggctcggggagtgaaggcctcgttgagagaaggtctcattcggtgttttgggaagagagtcgtgtgggcccaggtatcgtagcggcgacacgagagagacgggcggtgtgacagccttccactacctgcacgagtgtattggtctgtctgctatcagctatgccgctgcccgttgcgctgcagacccgcttggccaagagaggcatcctcaaacatctggagcctgaaccagaggaagagatcattgccgaggactatgacgatgatcctgtggactacgaggccaccaggttggagggcctaccaccaagctggtacaaggtgttcgacccttcctgcgggctcccttactactggaatgcagacacagaccttgtatcctggctctccccacatgaccccaactccgtggttaccaaatcggccaagaagctcagaagcagtaatgcagcagtaagccgaaaggatgaagagttagaccccatggaccctagctcatactcagacgccccccggggcacgtggtcaacaggactccccaagcggaatgaggccaagactggcgctgacaccacagcagctgggcccctcttccagcagcggccgtatccatccccaggggctgtgctccgggccaatgcagaggcctcccgaaccaagcagcaggattgaagcttcggcctccctggccctgggttaaaataaaagctttctggtgatcctgcccacc

SEQ ID NO: 22968 - DNA, 965 bp, Homo sapiens
  source 1..965: mol_type = unassigned DNA
agaggaacagggccctggagcacctggtttcggggacagtagggttggtgggagttgcgatgatattgccacctacctcttacatcttttagtctgtctgctatcagctatgccgctgcccgttgcgctgcagacccgcttggccaagagaggcatcctcaaacatctggagcctgaaccagaggaagagatcattgccgaggactatgacgatgatcctgtggactacgaggccaccaggttggagggcctaccaccaagctggtacaaggtgttcgacccttcctgcgggctcccttactactggaatgcagacacagaccttgtatcctggctctccccacatgaccccaactccgtggttaccaaatcggccaagaagctcagaagcagtaatgcagatgctgaagaaaagttggaccggagccatgacaagtcggacaggggccatgacaagtcggaccgcagccatgagaaactagacaggggccacgacaagtcagaccggggccacgacaagtctgacagggatcgagagcgtggctatgacaaggtagacagagagagagagcgagacagggaacgggatcgggaccgcgggtatgacaaggcagaccgggaagagggcaaagaacggcgccaccatcgccgggaggagctggctccctatcccaagagcaagaaggcagtaagccgaaaggatgaagagttagaccccatggaccctagctcatactcagacgccccccggggcacgtggtcaacaggactccccaagcggaatgaggccaagactggcgctgacaccacagcagctgggcccctcttccagcagcggccgtatccatccccaggggctgtgctccgggccaatgcagaggcctcccgaaccaagcagcaggattgaagcttcggcctccctggccctgggttaaaataaaagctttctggtgatcctgcccacc

SEQ ID NO: 22969 - DNA, 744 bp, Homo sapiens
  source 1..744: mol_type = unassigned DNA
gaacagggccctggagcacctggtttcggggacagtagggttggtgggagttgcgatgatattgccacctacctcttacatcttttagtctgtctgctatcagctatgccgctgcccgttgcgctgcagacccgcttggccaagagaggcatcctcaaacatctggagcctgaaccagaggaagagatcattgccgaggactatgacgatgatcctgtggactacgaggccaccaggttggagggcctaccaccaagctggtacaaggtgttcgacccttcctgcgggctcccttactactggaatgcagacacagaccttgtatcctggctctccccacatgaccccaactccgtggttaccaaatcggccaagaagctcagaagcagtaatgcagatgctgaagaaaagttggaccggagccatgacaagtcggacaggggccatgacaagtcggaccgcagccatgagaaactagacaggggccacgacaagtcagaccggggccacgacaagtctgacagggatcgagagcgtggctatgacaaggtagacagagagagagagcgagacagggaacgggatcgggaccgcgggtatgacaaggcagaccgggaagagggcaaagaacggcgccaccatcgccgggaggagctggctccctatcccaagagcaagaaggcagtaagccgaaaggatgaagagttagaccccatggaccctagctcatactcagacgccccc

SEQ ID NO: 22970 - DNA, 1020 bp, Homo sapiens
  source 1..1020: mol_type = unassigned DNA
agttactttcaggctcggggagtgaaggcctcgttgagagaaggtctcattcggtgttttgggaagagagtcgtgtgggcccaggtatcgtagcggcgacacgagagagacgggcggtgtgacagccttccactacctgcacgagtgtattggtctgtctgctatcagctatgccgctgcccgttgcgctgcagacccgcttggccaagagaggcatcctcaaacatctggagcctgaaccagaggaagagatcattgccgaggactatgacgatgatcctgtggactacgaggccaccaggttggagggcctaccaccaagctggtacaaggtgttcgacccttcctgcgggctcccttactactggaatgcagacacagaccttgtatcctggctctccccacatgaccccaactccgtggttaccaaatcggccaagaagctcagaagcagtaatgcagatgctgaagaaaagttggaccggagccatgacaagtcggacaggggccatgacaagtcggaccgcagccatgagaaactagacaggggccacgacaagtcagaccggggccacgacaagtctgacagggatcgagagcgtggctatgacaaggtagacagagagagagagcgagacagggaacgggatcgggaccgcgggtatgacaaggcagaccgggaagagggcaaagaacggcgccaccatcgccgggaggagctggctccctatcccaagagcaagaaggcagtaagccgaaaggatgaagagttagaccccatggaccctagctcatactcagacgccccccggggcacgtggtcaacaggactccccaagcggaatgaggccaagactggcgctgacaccacagcagctgggcccctcttccagcagcggccgtatccatccccaggggctgtgctccgggccaatgcagaggcctcccgaaccaagcagcaggattgaagcttcggcctccctggccctgggttaaaataaaagctttctggtgatcctg

SEQ ID NO: 22971 - DNA, 451 bp, Homo sapiens
  source 1..451: mol_type = unassigned DNA
atattgccacctacctcttacatcttttagtgcaaccagaggaagagatcattgccgaggactatgacgatgatcctgtggactacgaggccaccaggttggagggcctaccaccaagctggtacaaggtgttcgacccttcctgcgggctcccttactactggaatgcagacacagaccttgtatcctggctctccccacatgaccccaactccgtggttaccaaatcggccaagaagctcagaagcagtaatgcagcagtaagccgaaaggatgaagagttagaccccatggaccctagctcatactcagacgccccccggggcacgtggtcaacaggactccccaagcggaatgaggccaagactggcgctgacaccacagcagctgggcccctcttccagcagcggccgtatccatccccaggggctgtgctccgggccaatgcaga

SEQ ID NO: 22972 - DNA, 2511 bp, Homo sapiens
  source 1..2511: mol_type = unassigned DNA
agcgctgcggttggcagcggcgggatggagaagctgggggtggagccggaggaggaaggcggcggcgacgacgacgaggaagacgccgaggcctgggccatggaactggcggacgtgggggcggcagccagctcgcagggagttcatgatcaagtgttgcccacaccaaatgcttcatccagagtcatagtacatgtggatctggattgcttttatgcacaagtagaaatgatctcaaatccagagctaaaagacaaacctttaggggttcaacagaaatatttggtggttacctgcaactatgaagctaggaaacttggagttaagaaacttatgaatgtcagagatgcaaaagaaaagtgtccacagttggtattagttaatggagaagacctgacccgctacagagaaatgtcttataaggttacagaattactggaagaatttagtccagttgttgagagacttggatttgatgaaaattttgtggatctaacagaaatggttgagaagagactacagcagctgcaaagtgatgaactttctgcggtgactgtgtcgggtcatgtatacaataatcagtctataaacctgcttgacgtcttgcacatcagactacttgttggatctcagattgcagcagagatgcgggaagccatgtataatcagttggggctcactggctgtgctggagtggcttctaataaactgttggcaaaattagtttctggtgtctttaaaccaaatcaacaaacagtcttattacctgaaagttgtcaacatcttattcatagtttgaatcacataaaggaaatacctggtattggctataaaactgccaaatgtcttgaagcactgggtatcaatagtgtgcgtgatctccaaaccttttcacccaaaattttagaaaaagaattaggaatttcagttgctcagcgtatccaaaagctcagttttggagaggataactcccctgtgatactctcaggaccacctcagtcctttagtgaagaagattcatttaaaaaatgttcatctgaagttgaagctaaaaataagattgaagaactacttgctagtcttttaaacagagtatgccaagatggaaggaagcctcatacagtgagattaataatccgtcggtattcctctgagaagcactatggtcgtgagagtcgtcagtgccctattccttcacatgtaattcagaaattagggacaggaaattatgatgtgatgaccccaatggttgatatacttatgaaactttttcgaaatatggtgaatgtgaagatgccatttcaccttacccttctaagtgtgtgcttctgcaaccttaaagcactaaatactgctaagaaagggcttattgattattatttaatgccatcattatcaactacttcacgctctggcaagcacagttttaaaatgaaagacactcatatggaagattttcccaaagacaaagaaacaaaccgggatttcctaccaagtggaagaattgaaagtacaagaactagggagtctccactagataccacaaatttttctaaagaaaaagacattaatgaattcccactctgttcacttcctgaaggtgttgaccaagaagtcttcaagcagcttccagtagatattcaagaagaaatcctttctggaaaatctagggaaaaatttcaagggaaaggaagtgtgagttgtccattacatgcctctagaggagtattatctttcttttctaaaaaacaaatgcaagatattcccataaatcctagagatcatttatccagtagcaaacaggtatcctctgtatctccttgtgaaccgggaacatcaggctttaatagcagtagttcttcttacatgtctagccaaaaggattattcatattatttagataatagattaaaagatgaacgaataagtcaaggacctaaagaacctcaaggattccactttacaaattcaaaccctgctgtgtctgcttttcattcatttccaaacttgcagagtgagcaacttttctccagaaaccacactacagatagccataagcaaacagtagcaacagactctcatgaaggacttacagaaaatagagagccagattctgttgatgagaaaattactttcccttctgacattgatcctcaagttttctatgaactaccagaagcagtacaaaaggaactgctggcagagtggaagagagcaggatcagatttccacattggacataaataagcatattcagcaaaaaggtctgaaaagcaagggaataccattattttcggattagcggtttattaagctcttctatattaaacactaatagatattcaataacggagtaaactgttccagataaagcaagaatagttgcaagaagtaaattctggcacaaagcgtaaaaatataacagaagaaataatgtaaaatactatcttttatgtctaaagccattttatattacttttcaataaaaagaatatcatggtcaacatagaa

SEQ ID NO: 22973 - DNA, 2025 bp, Homo sapiens
  source 1..2025: mol_type = unassigned DNA
aagtagcgctgcggttggcagcggcgggatggagaagctgggggtggagccggaggaggaaggcggcggcgacgacgacgaggaagacgccgaggcctgggccatggaactggcggacgtgggggcggcagccagctcgcagggagttcatgatcaagtgttgcccacaccaaatgcttcatccagagtcatagtacatgtggatctggattgcttttatgcacaagtagaaatgatctcaaatccagagctaaaagacaaacctttaggggttcaacagaaatatttggtggttacctgcaactatgaagctaggaaacttggagttaagaaacttatgaatgtcagagatgcaaaagaaaagtgtccacagttggtattagttaatggagaagacctgacccgctacagagaaatgtcttataaggttacagaattactggaagaatttagtccagttgttgagagacttggatttgatgaaaattttgtggatctaacagaaatggttgagaagagactacagcagctgcaaagtgatgaactttctgcggtgactgtgtcgggtcatgtatacaataatcagtgtattggctataaaactgccaaatgtcttgaagcactgggtatcaatagtgtgcgtgatctccaaaccttttcacccaaaattttagaaaaagaattaggaatttcagttgctcagcgtatccaaaagctcagttttggagaggataactcccctgtgatactctcaggaccacctcagtcctttagtgaagaagattcatttaaaaaatgttcatctgaagttgaagctaaaaataagattgaagaactacttgctagtcttttaaacagagtatgccaagatggaaggaagcctcatacagtgagattaataatccgtcggtattcctctgagaagcactatggtcgtgagagtcgtcagtgccctattccttcacatgtaattcagaaattagggacaggaaattatgatgtgatgaccccaatggttgatatacttatgaaactttttcgaaatatggtgaatgtgaagatgccatttcaccttacccttctaagtgtgtgcttctgcaaccttaaagcactaaatactgctaagaaagggcttattgattattatttaatgccatcattatcaactacttcacgctctggcaagcacagttttaaaatgaaagacactcatatggaagattttcccaaagacaaagaaacaaaccgggatttcctaccaagtggaagaattgaaagtacaagaactagggagtctccactagataccacaaatttttctaaagaaaaagacattaatgaattcccactctgttcacttcctgaaggtgttgaccaagaagtcttcaagcagcttccagtagatattcaagaagaaatcctttctggaaaatctagggaaaaatttcaagggaaaggaagtgtgagttgtccattacatgcctctagaggagtattatctttcttttctaaaaaacaaatgcaagatattcccataaatcctagagatcatttatccagtagcaaacaggtatcctctgtatctccttgtgaaccgggaacatcaggctttaatagcagtagttcttcttacatgtctagccaaaaggattattcatattatttagataatagattaaaagatgaacgaataagtcaaggacctaaagaacctcaaggattccactttacaaattcaaaccctgctgtgtctgcttttcattcatttccaaacttgcagagtgagcaacttttctccagaaaccacactacagatagccataagcaaacagtagcaacagactctcatgaaggacttacagaaaatagagagccagattctgttgatgagaaaattactttcccttctgacattgatcctcaagttttctatgaactaccagaagcagtacaaaaggaactgctggcagagtggaagagagcaggatcagatttccacattggacataaataagcatattcagc

SEQ ID NO: 22974 - DNA, 6131 bp, Homo sapiens
  source 1..6131: mol_type = unassigned DNA
atgcgtgtcactctgggcaacaggctggtcggccacgactgcgcaggcgagaggcacagagcgactggagactgtagtcccccggtttccctggagaccaggcggaagcggccggaagtagcgctgcggttggcagcggcgggatggagaagctgggggtggagccggaggaggaaggcggcggcgacgacgacgaggaagacgccgaggcctgggccatggaactggcggacgtgggggcggcagccagctcgcagggagttcatgatcaagtgttgcccacaccaaatgcttcatccagagtcatagtacatgtggatctggattgcttttatgcacaagtagaaatgatctcaaatccagagctaaaagacaaacctttaggggttcaacagaaatatttggtggttacctgcaactatgaagctaggaaacttggagttaagaaacttatgaatgtcagagatgcaaaagaaaagtgtccacagttggtattagttaatggagaagacctgacccgctacagagaaatgtcttataaggttacagaattactggaagaatttagtccagttgttgagagacttggatttgatgaaaattttgtggatctaacagaaatggttgagaagagactacagcagctgcaaagtgatgaactttctgcggtgactgtgtcgggtcatgtatacaataatcagtctataaacctgcttgacgtcttgcacatcagactacttgttggatctcagattgcagcagagatgcgggaagccatgtataatcagttggggctcactggctgtgctggagtggcttctaataaactgttggcaaaattagtttctggtgtctttaaaccaaatcaacaaacagtcttattacctgaaagttgtcaacatcttattcatagtttgaatcacataaaggaaatacctggtattggctataaaactgccaaatgtcttgaagcactgggtatcaatagtgtgcgtgatctccaaaccttttcacccaaaattttagaaaaagaattaggaatttcagttgctcagcgtatccaaaagctcagttttggagaggataactcccctgtgatactctcaggaccacctcagtcctttagtgaagaagattcatttaaaaaatgttcatctgaagttgaagctaaaaataagattgaagaactacttgctagtcttttaaacagagtatgccaagatggaaggaagcctcatacagtgagattaataatccgtcggtattcctctgagaagcactatggtcgtgagagtcgtcagtgccctattccttcacatgtaattcagaaattagggacaggaaattatgatgtgatgaccccaatggttgatatacttatgaaactttttcgaaatatggtgaatgtgaagatgccatttcaccttacccttctaagtgtgtgcttctgcaaccttaaagcactaaatactgctaagaaagggcttattgattattatttaatgccatcattatcaactacttcacgctctggcaagcacagttttaaaatgaaagacactcatatggaagattttcccaaagacaaagaaacaaaccgggatttcctaccaagtggaagaattgaaagtacaagaactagggagtctccactagataccacaaatttttctaaagaaaaagacattaatgaattcccactctgttcacttcctgaaggtgttgaccaagaagtcttcaagcagcttccagtagatattcaagaagaaatcctttctggaaaatctagggaaaaatttcaagggaaaggaagtgtgagttgtccattacatgcctctagaggagtattatctttcttttctaaaaaacaaatgcaagatattcccataaatcctagagatcatttatccagtagcaaacaggtatcctctgtatctccttgtgaaccgggaacatcaggctttaatagcagtagttcttcttacatgtctagccaaaaggattattcatattatttagataatagattaaaagatgaacgaataagtcaaggacctaaagaacctcaaggattccactttacaaattcaaaccctgctgtgtctgcttttcattcatttccaaacttgcagagtgagcaacttttctccagaaaccacactacagatagccataagcaaacagtagcaacagactctcatgaaggacttacagaaaatagagagccagattctgttgatgagaaaattactttcccttctgacattgatcctcaagttttctatgaactaccagaagcagtacaaaaggaactgctggcagagtggaagagagcaggatcagatttccacattggacataaataagcatattcagcaaaaaggtctgaaaagcaagggaataccattattttcggattagcggtttattaagctcttctatattaaacactaatagatattcaataacggagtaaactgttccagataaagcaagaatagttgcaagaagtaaattctggcacaaagcgtaaaaatataacagaagaaataatgtaaaatactatcttttatgtctaaagccattttatattacttttcaataaaaagaatatcatggtcaacatagaatatttttcatgaattggtggggagatgtatatgtttatatataaaaaatagccaaatcgttgcaatgatatggtaaaggacacattttttttttttttttcctgtgaaatgtggaatatctcaaattcagcctcttaggctgaatagcaaatcctactgccaactaacctattaaaaatatagatagttttgactaaagtactacattacatttagtatgttgacttttaaaataccaaagcaatttatattcaattaatgcttcttcatacaccaagaatctaccacaatacacagcacacaaaggccgttcaataaacattgaatgaatgaatggtttggctagggccagggtggggagttaaagtgagaggagggtatatgttatagagaacagtggtagaaggaactctccgtgcaagtaaattaagggaaagatggacaccagaaaggcaaggtgatgggcctataagcatactggataatggaagaagtccatttctttctagctagtttgaagggcctaaaagcactgagatgtttttgtatcttccctacatttggagatgatattaggttgtcataacaaccacaaatatagaccattactaaattggtggatgtcctctttctcccattgttattgccttcctcttttgcctgctaaactaaaaattggatataagattgagaatgtattatataatttgcaagacatagaggatgtttatagaatatactaaagtatccctcagcaccaatatgggagtatcctggtctcaagtttataatttttgcacatataatctaaagaagagactttaaaaataaagtacacaaatatgaaccaaagagtagcttaaaaatactttcttctaggtctgaaattttcttttctttctttttttgttttggagacagagtctcactctgtcgcccagggtggagtacagtggcgcaatcccagctcactacaacctccgcctcccaggttcaagcaattctcctgcctcagcctcctgagtagctgggattacacgcatgccctaccacacccagcaaatttttgtatttttagtagagatgacatttcaccatattggccaggctggtctcgaactcctggtctcaggtgatcctccaccttggcctcccaaagtgctgggattacaggtgtgagccattgctcctggccccagctctgaaattttaacttagttttggattccttggaatttgaaaatatgctaacacgaaggattgtaaataggtagtttgaggttatcaggaacagtaacttgaagcaagaacatcagaaattgttcaccatgcaaatatttagtactctgaatcaaggaacatagtattttttacatgagtattccagtaaggtaattaaacttatgaaaagggtatataactttttgtaaatcattaaaacattttatagtccttgtaatgatttcaggaccttggacagctagaaggggcttaagaaaaaatggctaagaaaacaaagtaaatggttttggccagcttaaaaagagaaagcaaaatagttaaaaatacatttcatagattgagaatgtacgggctatgtcacagttacgctacttattttgtggttttaagttagtctcaacatctttgggcctcagaatcaacttttttatgggatcttttttctctgtttttaagattatctcttttttctttggtgctttgcaggtttactgtattatttggaagtgcgaatttatttttattcttagtatatactggcttcttcctgtatcttttaattcatgttctgtaaaattctcaaccactagctcttcaaatatttcttctctattctaggactgtatacaaatgatagactttcttactgtatccttcatgtctcttaatttctcatatttttcatcctcttgtttctctttactgcattttgggtaatttcatcagctctatctttctgtttactagttcatttttcagtagcatctcacctgctatttaaaacaatgatggttttaatttcaataaatatatttttcatttgattctttttaacttcccgtttactcattacagtcccttgtaagtctgtttctaatttttaaaagtcaaatatatgatatttttgataatttcaatattttaagtctttataagtctacatttaaggttattattgcatatcattgtgacttatttccttgagtatgtgttaatctgcgagaagacagagggcctaaattgtgtatgttttccttcagtatgatttgagttcgttgcttctctgggtgaggtggtacaaactccttggcatactctattcacctttgtggatcctgattgaatgccttgtcttaagtgtaagctccctgacccttactactagccgaaggttttgtctctgcaggtcaattccaaactaacaggcagatgctgttagctatctgcctccagggataaaccccatctttcaagcttgcttcttgcttgatgctttctgctgctttcttgcttttgtttcagctcgagtttgttgttgttttttttttttcctgtttctgtcttgaatgtagagggtatttttatttttattttttctgtttctctcttgagtgtatagtgtagagggggtttctgtcttgagtgtaggcctggagatttcccttatatggtacaaaccagcaatgaattaagaggtctcttttctccaagatctagtgttttgtactaggagaactctaaaaagtatctattccactgtagtgccaaagtacaaatttatttggatttattttttgccatcttattttttaatatatttctttttctatgttgtgcttctttcccacctttatctctcctcctatcttttgggatcagttgggttttctatttaatcatatattttccctttactgatttggaatgtgaatgttacaagtccttttgattatccttaaacatctaaaaatgctaccctctttccaaacaacacaaaggtattgaaataacattaattctaattaaattccacaagttctttattaaatctccaaattggatattattagtattttatatagtcaatgtttatttttttgatgggacatggtgggggcttaccttttttcttgtgtgtcagatgttccttctaggtagaattctttataccttctgaaattatgtccttagagctgtagatttagaactgacatctcttgagctgttctaagataatatcttttactttggagatacgcagtttttattatatgtctagctatagatttatcatggatttaggttcattatgaatctgcagatttgtgtcttccatcaaatctggattgttttcaatattaaaaaaacttctattttaaaatctgtatatagaaaggtacataaacataaatgaacatgttaatgagtaattgtaacaactatgtaactgtccaagtcaagaaataaaacatatcaagt

SEQ ID NO: 22975 - DNA, 5911 bp, Homo sapiens
  source 1..5911: mol_type = unassigned DNA
tacctccggctctcccgggtgacgacgggtagaaaagcaggaggagcggagaaaggagagggcggggtagggatgcagctgtgctgcattctgggaagggcgttggtccgtcgctcgcgcagcctcctgggagttgtagtcgcgatcctgaggtaacggataagtttataccatggatagcacaaaggagaagtgtgacagttacaaagatgatcttctgcttaggatgggacttaatgataataaagcaggaatggaaggattagataaagagaaaattaacaaaattataatggaagccacgaaggggtccagattttatggaaatgagctcaagaaagaaaagcaagtcaaccaacgaattgaaaatatgatgcaacaaaaagctcaaatcaccagccaacagctaagaaaagcacaattacaggttgacagatttgcaatggaattagaacaaagccgaaatttgagcaataccatagtgcacattgacatggatgctttctatgcagctgtagaaatgagggacaatccagaattgaaggataaacccattgctgtaggatcaatgagtatgctgtctacttcaaattaccatgcaaggagatttggtgttcgtgcagccatgccaggatttattgctaagaggctgtgcccacaacttataatagtgccccccaactttgacaaataccgagctgtgagtaaagaggttaaggaaatacttgctgattatgatcccaattttatggccatgagtcttgatgaagcctacttgaatataacaaagcacttagaagaaagacaaaattggcctgaggataaaagaaggtatttcatcaaaatgggaagctctgtagaaaatgataatccaggaaaggaagttaataaactgagtgagcatgaacgatccatctctccactactttttgaagagagtccttctgatgtgcagcccccaggagatcctttccaagtgaactttgaagaacaaaacaatcctcaaatactccaaaactcagttgtttttggaacatcagcccaggaagtggtaaaggaaattcgtttcagaattgagcagaaaacaacactgacagccagtgcaggcattgccccaaatacaatgttagcaaaagtatgcagtgataagaataaaccaaatggacaataccaaattcttcccaatagacaagctgtgatggacttcatcaaggatttacccattagaaaggtttctggaataggaaaagttacagagaaaatgttaaaggcccttggaattattacatgtacagaactttaccaacagagggcattgctttctctccttttctctgaaacatcttggcattatttccttcatatctccttgggtctaggttcaacacacctgacgagggatggagagaggaaaagtatgagcgttgagaggacattcagtgagataaataaagcggaagagcaatacagcctatgtcaagaactttgcagtgagcttgctcaggatctacagaaagaaagacttaagggtagaactgttaccattaagttgaagaatgtgaattttgaagtaaaaactcgtgcatctacagtttcatctgttgtttctactgcagaagaaatatttgccattgctaaggaattgctaaaaacagaaattgatgctgattttccacatcccttgagattaaggcttatgggtgttcggatatctagttttcccaatgaagaggacaggaaacaccaacaaaggagcattattggctttttacaggctggaaaccaagccctgtcagccactgagtgtacattagagaaaactgacaaagataagtttgtaaaacctctagaaatgtctcataagaagagtttctttgataaaaaacgatcagaaaggaaatggagtcaccaagatacatttaaatgtgaagccgtgaataaacaaagtttccagacatcacaaccattccaagttttaaagaagaagatgaatgagaatttggaaatatcagagaattcagatgactgtcagatacttacctgtcctgtttgctttagggctcaagggtgcatcagtctggaagccttgaataaacatgtagatgaatgtcttgatggaccttcaatcagtgaaaactttaaaatgttctcgtgttcacatgtttctgctaccaaagttaacaagaaagaaaatgttcctgcttcttcactttgtgagaagcaagattatgaagcccatccaaaaattaaagaaatatcttcagtagattgtatagctttagtagatactatagataactcatctaaagcagaaagcatagatgctttaagtaataagcatagcaaggaagaatgttctagtctcccaagcaagtcttttaatattgaacactgtcatcagaattcttcttctactgtttcattggaaaacgaagatgttggatcatttagacaagaataccgccagccttacttatgtgaagtgaaaacaggccaagctctagtttgtcctgtttgtaacgtagaacaaaagacttcagatctaaccctgttcaatgtgcatgtggatgtttgcttaaataaaagttttatccaagaattaagaaaggataaatttaacccagttaatcaacccaaagaaagctccagaagtactggtagctcaagtggagtacagaaggctgtaacaagaacaaaaaggccaggattgatgacaaagtactcaacatcaaagaaaataaaaccaaacaatcccaaacatacccttgatatattttttaagtaaacattgaacattttatcattaatttttaattgaaactagttattttataatcaatgaatttgttctttctgattttaagtttgcagatttatttagtgaaggcaagtgcaataatccttcctcagatgatgtttgcttttctaagatacatatactgattctgtgtatcttttttataaccatgagaattttacttccattatacatcaattggaaatcaatcctgttaagagataattcttaaaagggaaattaggaatgggataagaaggtgatttttttattatttttatactgaatataaaaacatttgtaagggctctcaaagattcacacatgcctatattatcataagaatttttcagcacttaactactttgttggcattgatcctagtgtctttaaatacttcatgagcattcataattaaaatttatcttaagttctatgaagagtattaatgtaactagcataagtggttttcttcaggaaaataaatatcacagtattatctgtgttaaaatggtttttgcctaaaatataatttttaatttggcttttcttatttaaaattccattatcttatgaataagcacttgaatcagtttttaaaatatttagtctaagatgattcaaagtagttttattttaatacaggacttttaaatggcagtatttcatttcttgtcaattatgttggtactttccacaaatctataaagaaggataaattgtaccatcattttattataatcctcaagagaaaatgtgtaattcaaaagattaatgtgtattaaaacacattatgtatcttagttacatttctatcagtacttttattaatatttgtgaaagaagacagcttaatagtagttagcttaagtagtttctccaagtacttttgtgctatcaatgagttcttctcaaaaaataattagttaggccaggcacaatggctcacacctgtaatgccagccctttgggaggccgaatgggcagatcacttgaggtcaggagtttgagaccagcctcgccaacatggtgagaccctgtctctactaaaacgataaaaaaaaaaaaaaaattagccaggcttggtggcacacgcctgtaatcccagctactcagatggctgaggcaggagaactacttgaacctgggaggtcaaagctgcagtcagccaagatcttgccactgtactccagcctgaagagcgagactctgtctcaataatataataatagttattatttaattgcaacatgaagttggaagccattttctgttacttctttaaggagctaaatcttttatatttttgttttctctccccttgcgtttcatattttagcttatgatctaaatatatattttgtatattataatattttaggaatagcttaattaagaactcacagactttgacaaagtggtaactagacttttaattactagattcttcaaattaggcttaatgcctgctagcatgccaatccaatcccatgactgatgttattatacactatggcaaatacaaagttgtagtattatggttcttgatggtgtgatttacttatgtaaattatgtacaaatttaagttcaatgaaacactgatttaatgtactgaaaggtaaatagtaccatagtgaattattttctgtcttgccttaggtttatttttattatcttcaatattagaataaatgctaaattattttcatttaaggatttatgtagttgaatattatcatttagtaatatttaatcatttgaaataaaatttaaagctttaattgatctaatagagatggttttctacttttccactcttcctccctcttatgccttcacttttgttttctgtgcccagaattttcttcacattctttactacctgttttgtctattatatccaacccattttctttttattataattttgatttggggcatttgaagaaaatacagcaaaactacaagaactggtaataagcatgcataatctcacctacttagtgaacctaatataaacctaatataaagaaccaccgtatttgcaatatatataactggtgaaaaactagtgtccagaatatataaatgatccctatgaatcagtaagaaaaagacagtcaatagaaatttggacaaaagactttatatggcatttcaagtgaaaggaaatccagatgaccaagaaacatgaaaatattcccagccatattaatatttgagaagtaaaaaataaaactacaaggaggtattacatctttaccttatttgcaaaaatgaaatgatctaatgatactaagttttggtgatgatgtcagctcttacattgaaaacaatcactgtggaaaaatttgtccctcagtaaatttaaagataaacatgctcaaaacctagcaattgcactctgaagtatacatctttgcaggttatctttcattacagttatttttttccctgtcaggaccctaactaatacaatgccttgggaaaactaatgaacatgtatcctaggaagcatgtacaagaaagttcttcccagtcaggaaggtggccaagaaaaaaattttttaatgttcatagcagcactgcaatatccaaaagttagaaatgaaccaaatattcagcaatggtagaatggttaaattgtaccatggcatttatattgaaacagtagaattctacacagtggtgaaaatgaaggaaatagctaaccacaacatagatgaatatcacagacatagcatagagcaaaagaagcaaatcacagaaggatgccatcaacatgattccatttgtataaagtttaaaacagtataaactgaacaactatattgttttaagggtatatagttatatatatgagatacaactgtaaagaaaagcaagtgttttgctgtccccagaaccagaataatgatttcctctgtggagaagtacagcagtgtgattggggagtggcacctggtgcttctgggatgctggcaatgttctatttcttgtcttgggtggtgattgcatggatgttcacttttaaaatactctttatacatatatattttatatattcttgttcatatataacctttataataaagagaaaaaaatggcaaaaa

SEQ ID NO: 22976 - DNA, 3918 bp, Homo sapiens
  source 1..3918: mol_type = unassigned DNA
agctgtgctgcattctgggaagggcgttggtccgtcgctcgcgcagcctcctgggagttgtagtcgcgatcctgaggtaacggataagtttataccatggatagcacaaaggagaagtgtgacagttacaaagatgatcttctgcttaggatgggacttaatgataataaagcaggaatggaaggattagataaagagaaaattaacaaaattataatggaagccacgaaggggtccagattttatggaaatgagctcaagaaagaaaagcaagtcaaccaacgaattgaaaatatgatgcaacaaaaagctcaaatcaccagccaacagctaagaaaagcacaattacaggttgacagatttgcaatggaattagaacaaagccgaaatttgagcaataccatagtgcacattgacatggatgctttctatgcagctgtagaaatgagggacaatccagaattgaaggataaacccattgctgtaggatcaatgagtatgctgtctacttcaaattaccatgcaaggagatttggtgttcgtgcagccatgccaggatttattgctaagaggctgtgcccacaacttataatagtgccccccaactttgacaaataccgagctgtgagtaaagaggttaaggaaatacttgctgattatgatcccaattttatggccatgagtcttgatgaagcctacttgaatataacaaagcacttagaagaaagacaaaattggcctgaggataaaagaaggtatttcatcaaaatgggaagctctgtagaaaatgataatccaggaaaggaagttaataaactgagtgagcatgaacgatccatctctccactactttttgaagagagtccttctgatgtgcagcccccaggagatcctttccaagtgaactttgaagaacaaaacaatcctcaaatactccaaaactcagttgtttttggaacatcagcccaggaagtggtaaaggaaattcgtttcagaattgagcagaaaacaacactgacagccagtgcaggtgttcggatatctagttttcccaatgaagaggacaggaaacaccaacaaaggagcattattggctttttacaggctggaaaccaagccctgtcagccactgagtgtacattagagaaaactgacaaagataagtttgtaaaacctctagaaatgtctcataagaagagtttctttgataaaaaacgatcagaaaggaaatggagtcaccaagatacatttaaatgtgaagccgtgaataaacaaagtttccagacatcacaaccattccaagttttaaagaagaagatgaatgagaatttggaaatatcagagaattcagatgactgtcagatacttacctgtcctgtttgctttagggctcaagggtgcatcagtctggaagccttgaataaacatgtagatgaatgtcttgatggaccttcaatcagtgaaaactttaaaatgttctcgtgttcacatgtttctgctaccaaagttaacaagaaagaaaatgttcctgcttcttcactttgtgagaagcaagattatgaagcccatccaaaaattaaagaaatatcttcagtagattgtatagctttagtagatactatagataactcatctaaagcagaaagcatagatgctttaagtaataagcatagcaaggaagaatgttctagtctcccaagcaagtcttttaatattgaacactgtcatcagaattcttcttctactgtttcattggaaaacgaagatgttggatcatttagacaagaataccgccagccttacttatgtgaagtgaaaacaggccaagctctagtttgtcctgtttgtaacgtagaacaaaagacttcagatctaaccctgttcaatgtgcatgtggatgtttgcttaaataaaagttttatccaagaattaagaaaggataaatttaacccagttaatcaacccaaagaaagctccagaagtactggtagctcaagtggagtacagaaggctgtaacaagaacaaaaaggccaggattgatgacaaagtactcaacatcaaagaaaataaaaccaaacaatcccaaacatacccttgatatattttttaagtaaacattgaacattttatcattaatttttaattgaaactagttattttataatcaatgaatttgttctttctgattttaagtttgcagatttatttagtgaaggcaagtgcaataatccttcctcagatgatgtttgcttttctaagatacatatactgattctgtgtatcttttttataaccatgagaattttacttccattatacatcaattggaaatcaatcctgttaagagataattcttaaaagggaaattaggaatgggataagaaggtgatttttttattatttttatactgaatataaaaacatttgtaagggctctcaaagattcacacatgcctatattatcataagaatttttcagcacttaactactttgttggcattgatcctagtgtctttaaatacttcatgagcattcataattaaaatttatcttaagttctatgaagagtattaatgtaactagcataagtggttttcttcaggaaaataaatatcacagtattatctgtgttaaaatggtttttgcctaaaatataatttttaatttggcttttcttatttaaaattccattatcttatgaataagcacttgaatcagtttttaaaatatttagtctaagatgattcaaagtagttttattttaatacaggacttttaaatggcagtatttcatttcttgtcaattatgttggtactttccacaaatctataaagaaggataaattgtaccatcattttattataatcctcaagagaaaatgtgtaattcaaaagattaatgtgtattaaaacacattatgtatcttagttacatttctatcagtacttttattaatatttgtgaaagaagacagcttaatagtagttagcttaagtagtttctccaagtacttttgtgctatcaatgagttcttctcaaaaaataattagttaggccaggcacaatggctcacacctgtaatgccagccctttgggaggccgaatgggcagatcacttgaggtcaggagtttgagaccagcctcgccaacatggtgagaccctgtctctactaaaacgataaaaaaaaaaaaaaaattagccaggcttggtggcacacgcctgtaatcccagctactcagatggctgaggcaggagaactacttgaacctgggaggtcaaagctgcagtcagccaagatcttgccactgtactccagcctgaagagcgagactctgtctcaataatataataatagttattatttaattgcaacatgaagttggaagccattttctgttacttctttaaggagctaaatcttttatatttttgttttctctccccttgcgtttcatattttagcttatgatctaaatatatattttgtatattataatattttaggaatagcttaattaagaactcacagactttgacaaagtggtaactagacttttaattactagattcttcaaattaggcttaatgcctgctagcatgccaatccaatcccatgactgatgttattatacactatggcaaatacaaagttgtagtattatggttcttgatggtgtgatttacttatgtaaattatgtacaaatttaagttcaatgaaacactgatttaatgtactgaaaggtaaatagtaccatagtgaattattttctgtcttgccttaggtttatttttattatcttcaatattagaataaatgctaaattattttcatttaaggatttatgtagttgaatattatcatttagtaatatttaatcatttgaaataaaatttaaagctttaattgatctaa

SEQ ID NO: 22977 - DNA, 2727 bp, Homo sapiens
  source 1..2727: mol_type = unassigned DNA
atggatagcacaaaggagaagtgtgacagttacaaagatgatcttctgcttaggatgggacttaatgataataaagcaggaatggaaggattagataaagagaaaattaacaaaattataatggaagccacgaaggggtccagattttatggaaatgagctcaagaaagaaaagcaagtcaaccaacgaattgaaaatatgatgcaacaaaaagctcaaatcaccagccaacagctaagaaaagcacaattacagattaacatcaaattttaacattataaaagcaattctacagaggaacatttacattatgctacagtatcttcagttgtaccttcctgttcagcataaacatcatatgccaaagaggttgacagatttgcaatggaattagaacaaagccgaaatttgagcaataccatagtgcacattgacatggatgctttctatgcagctgtagaaatgagggacaatccagaattgaaggataaacccattgctgtaggatcaatgagtatgctgtctacttcaaattaccatgcaaggagatttggtgttcgtgcagccatgccaggatttattgctaagaggctgtgcccacaacttataatagtgccccccaactttgacaaataccgagctgtgagtaaagaggttaaggaaatacttgctgattatgatcccaattttatggccatgagtcttgatgaagcctacttgaatataacaaagcacttagaagaaagacaaaattggcctgaggataaaagaaggtatttcatcaaaatgggaagctctgtagaaaatgataatccaggaaaggaagttaataaactgagtgagcatgaacgatccatctctccactactttttgaagagagtccttctgatgtgcagcccccaggagatcctttccaagtgaactttgaagaacaaaacaatcctcaaatactccaaaactcagttgtttttggaacatcagcccaggaagtggtaaaggaaattcgtttcagaattgagcagaaaacaacactgacagccagtgcaggcattgccccaaatacaatgttagcaaaagtatgcagtgataagaataaaccaaatggacaataccaaattcttcccaatagacaagctgtgatggacttcatcaaggatttacccattagaaaggtttctggaataggaaaagttacagagaaaatgttaaaggcccttggaattattacatgtacagaactttaccaacagagggcattgctttctctccttttctctgaaacatcttggcattatttccttcatatctccttgggtctaggttcaacacacctgacgagggatggagagaggaaaagtatgagcgttgagaggacattcagtgagataaataaagcggaagagcaatacagcctatgtcaagaactttgcagtgagcttgctcaggatctacagaaagaaagacttaagggtagaactgttaccattaagttgaagaatgtgaattttgaagtaaaaactcgtgcatctacagtttcatctgttgtttctactgcagaagaaatatttgccattgctaaggaattgctaaaaacagaaattgatgctgattttccacatcccttgagattaaggcttatgggtgttcggatatctagttttcccaatgaagaggacaggaaacaccaacaaaggagcattattggctttttacaggctggaaaccaagccctgtcagccactgagtgtacattagagaaaactgacaaagataagtttgtaaaacctctagaaatgtctcataagaagagtttctttgataaaaaacgatcagaaaggaaatggagtcaccaagatacatttaaatgtgaagccgtgaataaacaaagtttccagacatcacaaccattccaagttttaaagaagaagatgaatgagaatttggaaatatcagagaattcagatgactgtcagatacttacctgtcctgtttgctttagggctcaagggtgcatcagtctggaagccttgaataaacatgtagatgaatgtcttgatggaccttcaatcagtgaaaactttaaaatgttctcgtgttcacatgtttctgctaccaaagttaacaagaaagaaaatgttcctgcttcttcactttgtgagaagcaagattatgaagcccatccaaaaattaaagaaatatcttcagtagattgtatagctttagtagatactatagataactcatctaaagcagaaagcatagatgctttaagtaataagcatagcaaggaagaatgttctagtctcccaagcaagtcttttaatattgaacactgtcatcagaattcttcttctactgtttcattggaaaacgaagatgttggatcatttagacaagaataccgccagccttacttatgtgaagtgaaaacaggccaagctctagtttgtcctgtttgtaacgtagaacaaaagacttcagatctaaccctgttcaatgtgcatgtggatgtttgcttaaataaaagttttatccaagaattaagaaaggataaatttaacccagttaatcaacccaaagaaagctccagaagtactggtagctcaagtggagtacagaaggctgtaacaagaacaaaaaggccaggattgatgacaaagtactcaacatcaaagaaaataaaaccaaacaatcccaaacatacccttgatatattttttaagtaa

SEQ ID NO: 22978 - DNA, 1484 bp, Homo sapiens
  source 1..1484: mol_type = unassigned DNA
atggatagcacaaaggagaagtgtgacagttacaaagatgatcttctgcttaggatgggacttaatgataataaagcaggaatggaaggattagataaagagaaaattaacaaaattataatggaagccacgaaggggtccagattttatggaaatgagctcaagaaagaaaagcaagtcaaccaacgaattgaaaatatgatgcaacaaaaagctcaaatcaccagccaacagctaagaaaagcacaattacaggttgacagatttgcaatggaattagaacaaagccgaaatttgagcaataccatagtgcacattgacatggatgctttctatgcagctgtagaaatgagggacaatccagaattgaaggataaacccattgctgtaggatcaatgagtatgctgtctacttcaaattaccatgcaaggagatttggtgttcgtgcagccatgccaggatttattgctaagaggctgtgcccacaacttataatagtgccccccaactttgacaaataccgagctgtgagtaaagaggttaaggaaatacttgctgattatgatcccaattttatggccatgagtcttgatgaagcctacttgaatataacaaagcacttagaagaaagacaaaattggcctgaggataaaagaaggtatttcatcaaaatgggaagctctgtagaaaatgataatccaggaaaggaagttaataaactgagtgagcatgaacgatccatctctccactactttttgaagagagtccttctgatgtgcagcccccaggagatcctttccaagtgaactttgaagaacaaaacaatcctcaaatactccaaaactcagttgtttttggaacatcagcccaggaagtggtaaaggaaattcgtttcagaattgagcagaaaacaacactgacagccagtgcaggcattgccccaaatacaatgttagcaaaagtatgcagtgataagaataaaccaaatggacaataccaaattcttcccaatagacaagctgtgatggacttcatcaaggatttacccattagaaaggtttctggaataggaaaagttacagagaaaatgttaaaggcccttggaattattacatgtacagaactttaccaacagagggcattgctttctctccttttctctgaaacatcttggcattatttccttcatatctccttgggtctaggttcaacacacctgacgagggatggagagaggaaaagtatgagcgttgagaggacattcagtgagataaataaagcggaagagcaatacagcctatgtcaagaactttgcagtgagcttgctcaggatctacagaaagaaagacttaaggtagctcaagtggagtacagaaggctgtaacaagaacaaaaaggccaggattgatgacaaagtactcaacatcaaagaaaataaaaccaaacaatcccaaacatacccttgatatattttttaagtaa

SEQ ID NO: 22979 - DNA, 2019 bp, Homo sapiens
  source 1..2019: mol_type = unassigned DNA
atggatagcacaaaggagaagtgtgacagttacaaagatgatcttctgcttaggatgggacttaatgataataaagcaggaatggaaggattagataaagagaaaattaacaaaattataatggaagccacgaaggggtccagattttatggaaatgagctcaagaaagaaaagcaagtcaaccaacgaattgaaaatatgatgcaacaaaaagctcaaatcaccagccaacagctaagaaaagcacaattacaggttgacagatttgcaatggaattagaacaaagccgaaatttgagcaataccatagtgcacattgacatggatgctttctatgcagctgtagaaatgagggacaatccagaattgaaggataaacccattgctgtaggatcaatgagtatgctgtctacttcaaattaccatgcaaggagatttggtgttcgtgcagccatgccaggatttattgctaagaggctgtgcccacaacttataatagtgccccccaactttgacaaataccgagctgtgagtaaagaggttaaggaaatacttgctgattatgatcccaattttatggccatgagtcttgatgaagcctacttgaatataacaaagcacttagaagaaagacaaaattggcctgaggataaaagaaggtatttcatcaaaatgggaagctctgtagaaaatgataatccaggaaaggaagttaataaactgagtgagcatgaacgatccatctctccactactttttgaagagagtccttctgatgtgcagcccccaggagatcctttccaagtgaactttgaagaacaaaacaatcctcaaatactccaaaactcagttgtttttggaacatcagcccaggaagtggtaaaggaaattcgtttcagaattgagcagaaaacaacactgacagccagtgcaggtgttcggatatctagttttcccaatgaagaggacaggaaacaccaacaaaggagcattattggctttttacaggctggaaaccaagccctgtcagccactgagtgtacattagagaaaactgacaaagataagtttgtaaaacctctagaaatgtctcataagaagagtttctttgataaaaaacgatcagaaaggaaatggagtcaccaagatacatttaaatgtgaagccgtgaataaacaaagtttccagacatcacaaccattccaagttttaaagaagaagatgaatgagaatttggaaatatcagagaattcagatgactgtcagatacttacctgtcctgtttgctttagggctcaagggtgcatcagtctggaagccttgaataaacatgtagatgaatgtcttgatggaccttcaatcagtgaaaactttaaaatgttctcgtgttcacatgtttctgctaccaaagttaacaagaaagaaaatgttcctgcttcttcactttgtgagaagcaagattatgaagcccatccaaaaattaaagaaatatcttcagtagattgtatagctttagtagatactatagataactcatctaaagcagaaagcatagatgctttaagtaataagcatagcaaggaagaatgttctagtctcccaagcaagtcttttaatattgaacactgtcatcagaattcttcttctactgtttcattggaaaacgaagatgttggatcatttagacaagaataccgccagccttacttatgtgaagtgaaaacaggccaagctctagtttgtcctgtttgtaacgtagaacaaaagacttcagatctaaccctgttcaatgtgcatgtggatgtttgcttaaataaaagttttatccaagaattaagaaaggataaatttaacccagttaatcaacccaaagaaagctccagaagtactggtagctcaagtggagtacagaaggctgtaacaagaacaaaaaggccaggattgatgacaaagtactcaacatcaaagaaaataaaaccaaacaatcccaaacatacccttgatatattttttaagtaa

SEQ ID NO: 22980 - DNA, 2441 bp, Homo sapiens
  source 1..2441: mol_type = unassigned DNA
atggatagcacaaaggagaagtgtgacagttacaaagatgatcttctgcttaggatgggacttaatgataataaagcaggaatggaaggattagataaagagaaaattaacaaaattataatggaagccacgaaggggtccagattttatggaaatgagctcaagaaagaaaagcaagtcaaccaacgaattgaaaatatgatgcaacaaaaagctcaaatcaccagccaacagctaagaaaagcacaattacaggttgacagatttgcaatggaattagaacaaagccgaaatttgagcaataccatagtgcacattgacatggatgctttctatgcagctgtagaaatgagggacaatccagaattgaaggataaacccattgctgtaggatcaatgagtatgctgtctacttcaaattaccatgcaaggagatttggtgttcgtgcagccatgccaggatttattgctaagaggctgtgcccacaacttataatagtgccccccaactttgacaaataccgagctgtgagtaaagaggttaaggaaatacttgctgattatgatcccaattttatggccatgagtcttgatgaagcctacttgaatataacaaagcacttagaagaaagacaaaattggcctgaggataaaagaaggtatttcatcaaaatgggaagctctgtagaaaatgataatccaggaaaggaagttaataaactgagtgagcatgaacgatccatctctccactactttttgaagagagtccttctgatgtgcagcccccaggagatcctttccaagtgaactttgaagaacaaaacaatcctcaaatactccaaaactcagttgtttttggaacatcagcccaggaagtggtaaaggaaattcgtttcagaattgagcagaaaacaacactgacagccagtgcaggcattgccccaaatacaatgttagcaaaagtatgcagtgataagaataaaccaaatggacaataccaaattcttcccaatagacaagctgtgatggacttcatcaaggatttacccattagaaaggtttctggaataggaaaagttacagagaaaatgttaaaggcccttggaattattacatgtacagaactttaccaacagagggcattgctttctctccttttctctgaaacatcttggcattatttccttcatatctccttgggtctaggttcaacacacctgacgagggatggagagaggaaaagtatgagcgttgagaggacattcagtgagataaataaagcggaagagcaatacagcctatgtcaagaactttgcagtgagcttgctcaggatctacagaaagaaagacttaaggtgttcggatatctagttttcccaatgaagaggacaggaaacaccaacaaaggagcattattggctttttacaggctggaaaccaagccctgtcagccactgagtgtacattagagaaaactgacaaagataagtttgtaaaacctctagaaatgtctcataagaagagtttctttgataaaaaacgatcagaaaggaaatggagtcaccaagatacatttaaatgtgaagccgtgaataaacaaagtttccagacatcacaaccattccaagttttaaagaagaagatgaatgagaatttggaaatatcagagaattcagatgactgtcagatacttacctgtcctgtttgctttagggctcaagggtgcatcagtctggaagccttgaataaacatgtagatgaatgtcttgatggaccttcaatcagtgaaaactttaaaatgttctcgtgttcacatgtttctgctaccaaagttaacaagaaagaaaatgttcctgcttcttcactttgtgagaagcaagattatgaagcccatccaaaaattaaagaaatatcttcagtagattgtatagctttagtagatactatagataactcatctaaagcagaaagcatagatgctttaagtaataagcatagcaaggaagaatgttctagtctcccaagcaagtcttttaatattgaacactgtcatcagaattcttcttctactgtttcattggaaaacgaagatgttggatcatttagacaagaataccgccagccttacttatgtgaagtgaaaacaggccaagctctagtttgtcctgtttgtaacgtagaacaaaagacttcagatctaaccctgttcaatgtgcatgtggatgtttgcttaaataaaagttttatccaagaattaagaaaggataaatttaacccagttaatcaacccaaagaaagctccagaagtactggtagctcaagtggagtacagaaggctgtaacaagaacaaaaaggccaggattgatgacaaagtactcaacatcaaagaaaataaaaccaaacaatcccaaacatacccttgatatattttttaagtaa

SEQ ID NO: 22981 - DNA, 1536 bp, Homo sapiens
  source 1..1536: mol_type = unassigned DNA
tgagagagctttccgctgaagatgacgggcctgctttccagggcggcttgtcgaaagcccgggagcatctggccgcttccgcctcaaccatgggctggggttttgtgagctactagtgccaagggttttctttccaccagaccaccgctgtaaatctcgagggtcttactcattagaagttagaattcacatttgacgtttaaaggaagaatttccttagtaccttctcacaagcacgcacttcgcatttttagatttctagagtttgctttgtagaaagtaattttgaggttgtcagagaataaatgacgttagaaaggtttttaaagtaaaacaagaatgtgagatgatagcctgggattttctcttggttgtaaatgaatatcttactgagaaccacgttaaccatgcctgcccctcaaagataggaaaggttggatatatagaaactttctcgtattagaaataccgaagtgcagtggttttgtgtgtacaagggattaggcaataggaggctatttttgttttaagactagggttgaattagcagaaagaccaatagaagatctaacaactcttgtcagttgtcaaggataactttgattatgagactttgactttgtagcttcagtaatttcctctcgttagctattttaatatagtcgatttccttgtaattgccaagagtaaaatttgttattaaaccttagaaagagtactttcttactacaaggatgggacgataggagcgaaatttcgagtctaagggaaaacgctggccgagtgtggtggctcacgcctgtaatcccagcacttcgggaggccgaggtgggtggatcacctgaggccgggagtttgagaccagcctgggcaacaagatttttcttcatccctttactttgagtctgtggatgtcattgcatgtgatatgggtctcctgaagacagcataccattggattttgcttctttatccaagttatcattctgtcttttaattggggtgtgcattcaagataagtttataccatggatagcacaaaggagaagtgtgacagttacaaagatgatcttctgcttaggatgggacttaatgataataaagcaggaatggaaggattagataaagagaaaattaacaaaattataatggaagccacgaaggggtccagattttatggaaatgagctcaagaaagaaaagcaagtcaaccaacgaattgaaaatatgatgcaacaaaaagctcaaatcaccagccaacagctaagaaaagcacaattacaggttgacagatttgcaatggaattagaacaaagccgaaatttgagcaataccatagtgcacattgacatggatgctttctatgcagctgtagaaatgagggacaatccagaattgaaggataaacccattgctgtaggatcaatgagtatgctgtctacttcaaattaccatgcaaggagatttggtgttcgtgcagccatgccaggatttattgctaagaggctgtgcccacaacttataatagtgcccccca

SEQ ID NO: 22982 - DNA, 1438 bp, Homo sapiens
  source 1..1438: mol_type = unassigned DNA
ataagtttataccatggatagcacaaaggagaagtgtgacagttacaaagatgatcttctgcttaggatgggacttaatgataataaagcaggaatggaaggattagataaagagaaaattaacaaaattataatggaagccacgaaggggtccagattttatggaaatgagctcaagaaagaaaagcaagtcaaccaacgaattgaaaatatgatgcaacaaaaagctcaaatcaccagccaacagctaagaaaagcacaattacaggttgacagatttgcaatggaattagaacaaagccgaaatttgagcaataccatagtgcacattgacatggatgctttctatgcagctgtagaaatgagggacaatccagaattgaaggataaacccattgctgtaggatcaatgagtatgctgtctacttcaaattaccatgcaaggagatttggtgttcgtgcagccatgccaggatttattgctaagaggctgtgcccacaacttataatagtgccccccaactttgacaaataccgagctgtgagtaaagaggttaaggaaatacttgctgattatgatcccaattttatggccatgagtcttgatgaagcctacttgaatataacaaagcacttagaagaaagacaaaattggcctgaggataaaagaaggtatttcatcaaaatgggaagctctgtagaaaatgataatccaggaaaggaagttaataaactgagtgagcatgaacgatccatctctccactactttttgaagagagtccttctgatgtgcagcccccaggagatcctttccaagtgaactttgaagaacaaaacaatcctcaaatactccaaaactcagttgtttttggaacatcagcccaggaagtggtaaaggaaattcgtttcagaattgagcagaaaacaacactgacagccagtgcaggcattgccccaaatacaatgttagcaaaagtatgcagtgataagaataaaccaaatggacaataccaaattcttcccaatagacaagctgtgatggacttcatcaaggatttacccattagaaaggtttctggaataggaaaagttacagagaaaatgttaaaggcccttggaattattacatgtacagaactttaccaacagagggcattgctttctctccttttctctgaaacatcttggcattatttccttcatatctccttgggtctaggttcaacacacctgacgagggatggagagaggaaaagtatgagcgttgagaggacattcagtgagataaataaagcggaagagcaatacagcctatgtcaagaactttgcagtgagcttgctcaggatctacagaaagaaagacttaaggtgctttattttgatatggtgtccttagtttttaagttttttaatagtaaaatgctaccttaaaagcta

SEQ ID NO: 22983 - DNA, 2835 bp, Homo sapiens
  source 1..2835: mol_type = unassigned DNA
atggaaaattatgaggcattggtaggctttgatctctgtaatacaccgctctccagtgttgctcagaagattatgtctgctatgcattcaggtgatttagtggattctaagacttggggaaagagtacagagactatggaagtgataaacaagtccagtgttaagtattcagtacaacttgaagacaggaagactcaatcaccagaaaaaaaggatcttaaatctttaagaagtcagacatcaagaggttctgccaagctgtctcctcagtccttcagtgtcaggctcacagatcagctgtctgctgaccaaaaacagaagagcatcagctcattgactctttcaagttgtttaattccacagtataatcaagaggcttcagttctacagaaaaaggggcataaaagaaagcatttcctaatggagaatataaataatgaaaataaaggaagcattaatcttaaaagaaaacatattacatataataatttgtcagagaaaacaagtaaacaaatggcattggaagaagatactgatgacgccgaaggctacctaaattctgggaactcaggagcattgaaaaaacatttttgtgatattaggcatttggatgattgggcaaaaagccagctgattgaaatgctcaaacaggcagcagccctggtgataactgtgatgtatactgatggttccacccagctaggagctgaccagacccccgtttcttctgttagaggaattgtggtgttagtaaaacgccaagcagagggtggccatggctgtccagatgccccggcctgtggtcctgttctggagggctttgtgtcagatgatccatgcatctacattcaaatagagcactctgctatctgggaccaagaacaggaggcacatcaacaatttgcccggaacgtgctatttcaaacaatgaaatgtaaatgtcctgttatttgttttaatgctaaggattttgtgagaatagtgctgcagttttttggcaatgatggcagttggaagcatgttgctgattttatagggctagatcccagaattgctgcatggcttatagatcctagtgatgccacaccctcttttgaagatttagtagaaaaatactgtgaaaaatccattacagttaaagtgaacagcacatatggaaattcctcaagaaatattgtgaatcagaatgtacgtgagaacctgaagacactctacagacttacaatggacctttgctctaaactgaaggattatggtttatggcaactatttcgtactttggagcttcctctgataccaattttggcagtgatggaaagccatgccattcaggtgaacaaagaggagatggagaagacgtcagcacttcttggggctcgtctcaaggaattggagcaagaagctcattttgttgcaggagaacggtttcttataacgagcaataaccagcttcgagagatcctctttggcaagttaaagctgcacctgctgagtcaaaggaacagtctccccagaacggggttgcagaaatacccgtctacatcagaagcagtgttaaatgctctgcgagaccttcatccattacccaagataattttggaatacaggcaggttcacaagatcaagtcaacctttgtagatggattactagcttgcatgaaaaagggctccatttcctctacatggaatcagactggaactgtgactggaagactttcagccaagcatcctaatatccaaggtatctccaagcacccaattcagattactacacctaagaattttaaaggtaaagaagacaagattctcacgatctccccgagggccatgtttgtttcatccaaaggccacacctttctagcagcagacttttcacagattgaattgcgcattcttacacatttatctggagatccggaacttctgaagttattccaggaatctgaaagagatgatgtattttctactctgacttcacagtggaaggatgtgcccgtggaacaggtgacacacgcagacagagagcaaaccaagaaggtggtgtacgcggtggtctatggagcagggaaggagcggctggctgcttgccttggagttcctattcaggaagctgcccagtttttggagagttttttgcagaagtacaagaaaatcaaggacttcgcccgagcagctattgcccagtgtcaccagacaggctgtgtggtgtccatcatgggcagaaggagacccctgccaaggattcacgctcatgaccagcaactccgggcacaagcagagcgacaggcagtgaacttcgtggtgcaaggctccgctgctgacctctgcaagctggccatgatccatgtcttcactgcagtggctgcttcccacaccttgacggccaggctggtggcccagatccatgatgagctgctgtttgaagtggaagatccgcagatcccggagtgtgcagctctcgtcaggaggaccatggagtccttggaacaggtacccctcaaggtgagcctgagtgccggccgctcatggggacacctggtgccactgcaggaggcctggctccgccaggcccatgtcgcactgagtctcccagcaacagcctggctgcccctgggtcccctgccagcacccagcccccacccctgcatttttcgccttcattttgtctgtagccccaggcaacagtgggaggagagaactggtttccagcagtccattgtgtggccttccccaaggtcaccagctctgtacgccccaggacgcattaaccctttggggctggggtggcccgccatcccctggagtaaatgcctgtgcaaagccctcctcatcctt

SEQ ID NO: 22984 - DNA, 3564 bp, Homo sapiens
  source 1..3564: mol_type = unassigned DNA
atggctgtggggagccaggattatggtttatggcaactatttcgtactttggagcttcctctgataccaattttggcagtgatggaaagccatgccattcaggtgaacaaagaggagatggagaagacgtcagcacttcttggggctcgtctcaaggaattggagcaagaagctcattttgttgcaggagaacggtttcttataacgagcaataaccagcttcgagagatcctctttggcaagttaaagctgcacctgctgagtcaaaggaacagtctccccagaacggggttgcagaaatacccgtctacatcagaagcagtgaatatccaaggtatctccaagcacccaattcagattactacacctaagaattttaaaggtaaagaagacaagattctcacgatctccccgagggccatgtttgtttcatccaaaggccacacctttctagcagcagacttttcacagattgaattgcgcattcttacacatttatctggagatccggaacttctgaagttattccaggaatctgaaagagatgatgtattttctactctgacttcacagtggaaggatgtgcccgtggaacaggtgacacacgcagacagagagcaaaccaagaaggtggtgtacgcggtggtctatggagcagggaaggagcggctggctgcttgccttggagttcctattcaggaagctgcccagtttttggagagttttttgcagaagtacaagaaaatcaaggacttcgcccgagcagctattgcccagtgtcaccagacaggctgtgtggtgtccatcatgggcagaaggagacccctgccaaggattcacgctcatgaccagcaactccgggcacaagcagagcgacaggcagtgaacttcgtggtgcaagctcagagccagcacctctgtgtggaggtaccgtgagagctgtggcgatggtgcagaatgctgagtgcaccatgaaccgtgtgccatgggacctcaagacagtaccacgcgccccataggctccgctgctgacctctgcaagctggccatgatccatgtcttcactgcagtggctgcttcccacaccttgacggccaggtcagtgggtggtggtctcccagggcttggatgggagggttagtattctgtgggaagaccccctcggggctcgtgattctgatgatcaccatctctgcttatcgggcccccgtcccctcctgaggctctcagcccatggaaggccctgggggctactcacagcaggcatgcagacaacaaccagccatccaccagcgtggggtgcagatgaggcctctccagacagaaatgctgtctcccccagacccctcctcctcggggtgtctgcacagcacaggggcaccccttgaggctgcccaccccagaggcaggcgaacccctcagccccttgagcaggaccctggggactccaaactgcccccacccctgcctgttgctgccaccaatgccaggcagtgtgccccacgcccagctctgcccccacccctacctgttgctgccaccagtgccaggcagtgtgccccacgcccagctctgcccccacccctacctgttgctgccaccagtgccaggcagtgtgccccacgcccagctctgcccccacccccgagcccagagccaacatgcagatgtgccttggtgggggggggctccgccctggctgccccccaggccacagctctctcaggcctctgtccctgcctcagttattcccccagggcacattcctcaagagtgtgggtggccaggggacaagcagccctcgcccagccacctcctccttgccagccaaggcctgggggtgctgcaagtggtgacccagacacctcctctcctcgttctccttgtgcgggatcccctcaggagtcccggagccccttctgggagctaacctgccccagccccccacagtgtcagtccccgaagggcccctcgccctctgacacaccatggacgttttcccacccccaccctaagagccctcaagctcttggcgacagtcccgtgggggtctaagcactgccccagggactctgcttgcagcttcactgggctgtgggctctcagtgctgctttctgcagtaactgaagtggtcagaaggcaggagtggggcattagaagattcactctcggctgggcacagtggctcacgcctgtaatcccagcactttgggaggccgagacgggtggatcacctgaggtcaggagtttgagaccaacctggccaacagggtaaaacatcgtcactactaaaaatacaaaaattagccaggtgtggtggcgcacacctgtaatcccagctactcaggaggctgaggcaggaggatcgcttgaacccaggaggtggaggttgcagtgtgccaagatcgcaccactgcactccagcctgggtgagagcaagactctgtctaacagaaaaaaaaataagattcactctcagtcctctcctgccccatctcactgccatctgcattcattcccaacacacacgtgcacacacacgcacacacaagcacatgcacccatacacgtgttcacccatgcatacaacccatgcacacacatatacgcatatacactgatgccaggcagcctctagtgccccacagtgttctcatggtgtcctgaaatccatgcatcccgctcacttccacagtttctgcaggtaaattatagcttctcccaggatatgagcagcttgtgctagtttccgtcttggcaggaactgaaagccaaatggtggtcctgcctctaagatactgcaagtctagaaaagttgattcaaggctgggcgcagtggctcacacctgtaatcccagcatttgggaggccgagtcgggtggatcacttgagctcagaagtttgtgaacaacatatgtgttgcctgggcaacataatgaaacctgtctctacaaaataaaagctggccatggtggtgcacacctgtagtcccagctactcaggaggctgaagtgggaggatcacctgagcctgggagttcaaggctgcagtgagccatgatcataccactgcactccagcctgggcaacagggcaagaacctgcctcaaaaaaagaaaaaatcggttcactttcagcccttgtggaattgataaaggaagttggcatgtgaggagctgaggtctctctctgttgctgactgagtccttctgaaagctggacacagacacttttactcaggaacgcagttactcgctggtcatccttctgtcatcagccattggctgtcacgaggaaatgcttctcatagcaaaatgcaaagcagactcgtgtggaatattgggcacatggtctgtgttttgtgaacgtgatttgttcttccaggagtaatgtgaaaggctgtggatggcgtctggaagggacgggtgcaggctcagtgtggccaggcatctctcgctgaagcagcaggcatgaaactcgatcactgggaggcacacggtgcccctagagtgagctgagatcgcaccacttcactccagcctgggcgagagcgagagtctgtct

SEQ ID NO: 22985 - DNA, 2899 bp, Homo sapiens
  source 1..2899: mol_type = unassigned DNA
atggaaaattatgaggcattggtaggctttgatctctgtaatacaccgctctccagtgttgctcagaagattatgtctgctatgcattcaggtgatttagtggattctaagacttggggaaagagtacagagactatggaagtgataaacaagtccagtgttaagtattcagtacaacttgaagacaggaagactcaatcaccagaaaaaaaggatcttaaatctttaagaagtcagacatcaagaggttctgccaagctgtctcctcagtccttcagtgtcaggctcacagatcagctgtctgctgaccaaaaacagaagagcatcagctcattgactctttcaagttgtttaattccacagtataatcaagaggcttcagttctacagaaaaaggggcataaaagaaagcatttcctaatggagaatataaataatgaaaataaaggaagcattaatcttaaaagaaaacatattacatataataatttgtcagagaaaacaagtaaacaaatggcattggaagaagatactgatgacgccgaaggctacctaaattctgggaactcaggagcattgaaaaaacatttttgtgatattaggcatttggatgattgggcaaaaagccagctgattgaaatgctcaaacaggcagcagccctggtgataactgtgatgtatactgatggttccacccagctaggagctgaccagacccccgtttcttctgttagaggaattgtggtgttagtaaaacgccaagcagagggtggccatggctgtccagatgccccggcctgtggtcctgttctggagggctttgtgtcagatgatccatgcatctacattcaaatagagcactctgctatctgggaccaagaacaggaggcacatcaacaatttgcccggaacgtgctatttcaaacaatgaaatgtaaatgtcctgttatttgttttaatgctaaggattttgtgagaatagtgctgcagttttttggcaatgatggcagttggaagcatgttgctgattttatagggctagatcccagaattgctgcatggcttatagatcctagtgatgccacaccctcttttgaagatttagtagaaaaatactgtgaaaaatccattacagttaaagtgaacagcacatatggaaattcctcaagaaatattgtgaatcagaatgtacgtgagaacctgaagacactctacagacttacaatggacctttgctctaaactgaaggattatggtttatggcaactatttcgtactttggagcttcctctgataccaattttggcagtgatggaaagccatgccattcaggtgaacaaagaggagatggagaagacgtcagcacttcttggggctcgtctcaaggaattggagcaagaagctcattttgttgcaggagaacggtttcttataacgagcaataaccagcttcgagagatcctctttggcaagttaaagctgcacctgctgagtcaaaggaacagtctccccagaacggggttgcagaaatacccgtctacatcagaagcagtgttaaatgctctgcgagaccttcatccattacccaagataattttggaatacaggcaggttcacaagatcaagtcaacctttgtagatggattactagcttgcatgaaaaagggctccatttcctctacatggaatcagactggaactgtgactggaagactttcagccaagcatcctaatatccaaggtatctccaagcacccaattcagattactacacctaagaattttaaaggtaaagaagacaagattctcacgatctccccgagggccatgtttgtttcatccaaaggccacacctttctagcagcagacttttcacagattgaattgcgcattcttacacatttatctggagatccggaacttctgaagttattccaggaatctgaaagagatgatgtattttctactctgacttcacagtggaaggatgtgcccgtggaacaggtgacacacgcagacagagagcaaaccaagaaggtggtgtacgcggtggtctatggagcagggaaggagcggctggctgcttgccttggagttcctattcaggaagctgcccagtttttggagagttttttgcagaagtacaagaaaatcaaggacttcgcccgagcagctattgcccagtgtcaccagacaggctgtgtggtgtccatcatgggcagaaggagacccctgccaaggattcacgctcatgaccagcaactccgggcacaagcagagcgacaggcagtgaacttcgtggtgcaaggctccgctgctgacctctgcaagctggccatgatccatgtcttcactgcagtggctgcttcccacaccttgacggccaggctggtggcccagatccatgatgagctgctgtttgaagtggaagatccgcagatcccggagtgtgcagctctcgtcaggaggaccatggagtccttggaacaggtgcaggcattggagctgcagcttcaggtacccctcaaggtgagcctgagtgccggccgctcatggggacacctggtgccactgcaggaggcctggggccctccgccaggcccatgtcgcactgagtctcccagcaacagcctggctgcccctgggtcccctgccagcacccagcccccacccctgcatttttcgccttcattttgtctgtagccccaggcaacagtgggaggagagaactggtttccagcagtccattgtgtggccttccccaaggtcaccagctctgtacgccccaggacgcattaaccctttggggctggggtggcccgccatcccctggagtaaatgcctgtgcaaagccctcctcatccttgtctgagtgaattcttcctgtgagtgggaagtg

SEQ ID NO: 22986 - DNA, 3253 bp, Homo sapiens
  source 1..3253: mol_type = unassigned DNA
agtgcgaggcgcgcggggcacggagggcggtggcggcgggctcctgcgagaagcaagcggaacttcctgagcgtgcttaggtgtcacagctgggtgaccctccgaaggaaggttttgccgctggcgcgtctggtgtatcgcggccttggggccgcggatccctggggcttgccgctgcctctggggttcgcgcggccctggcgtcggggctgcctcagcgctggctgaaggccggcccgaagcacccttaattgtggccgcgcgcttccctgctgctcctgctgttctccgcgtcgcggtggtggactctggaggtggagccttgcccggcgagacgttgaggattttgtgaaaatggaaaattatgaggcattggtaggctttgatctctgtaatacaccgctctccagtgttgctcagaagattatgtctgctatgcattcaggtgatttagtggattctaagacttggggaaagagtacagagactatggaagtgataaacaagtccagtgttaagtattcagtacaacttgaagacaggaagactcaatcaccagaaaaaaaggatcttaaatctttaagaagtcagacatcaagaggttctgccaagctgtctcctcagtccttcagtgtcaggctcacagatcagctgtctgctgaccaaaaacagaagagcatcagctcattgactctttcaagttgtttaattccacagtataatcaagaggcttcagttctacagaaaaaggggcataaaagaaagcatttcctaatggagaatataaataatgaaaataaaggaagcattaatcttaaaagaaaacatattacatataataatttgtcagagaaaacaagtaaacaaatggcattggaagaagatactgatgacgccgaaggctacctaaattctgggaactcaggagcattgaaaaaacatttttgtgatattaggcatttggatgattgggcaaaaagccagctgattgaaatgctcaaacaggcagcagccctggtgataactgtgatgtatactgatggttccacccagctaggagctgaccagacccccgtttcttctgttagaggaattgtggtgttagtaaaacgccaagcagagggtggccatggctgtccagatgccccggcctgtggtcctgttctggagggctttgtgtcagatgatccatgcatctacattcaaatagagcactctgctatctgggaccaagaacaggaggcacatcaacaatttgcccggaacgtgctatttcaaacaatgaaatgtaaatgtcctgttatttgttttaatgctaaggattttgtgagaatagtgctgcagttttttggcaatgatggcagttggaagcatgttgctgattttatagggctagatcccagaattgctgcatggcttatagatcctagtgatgccacaccctcttttgaagatttagtagaaaaatactgtgaaaaatccattacagttaaagtgaacagcacatatggaaattcctcaagaaatattgtgaatcagaatgtacgtgagaacctgaagacactctacagacttacaatggacctttgctctaaactgaaggattatggtttatggcaactatttcgtactttggagcttcctctgataccaattttggcagtgatggaaagccatgccattcaggtgaacaaagaggagatggagaagacgtcagcacttcttggggctcgtctcaaggaattggagcaagaagctcattttgttgcaggagaacggtttcttataacgagcaataaccagcttcgagagatcctctttggcaagttaaagctgcacctgctgagtcaaaggaacagtctccccagaacggggttgcagaaatacccgtctacatcagaagcagtgttaaatgctctgcgagaccttcatccattacccaagataattttggaatacaggcaggttcacaagatcaagtcaacctttgtagatggattactagcttgcatgaaaaagggctccatttcctctacatggaatcagactggaactgtgactggaagactttcagccaagcatcctaatatccaaggtatctccaagcacccaattcagattactacacctaagaattttaaaggtaaagaagacaagattctcacgatctccccgagggccatgtttgtttcatccaaaggccacacctttctagcagcagacttttcacagattgaattgcgcattcttacacatttatctggagatccggaacttctgaagttattccaggaatctgaaagagatgatgtattttctactctgacttcacagtggaaggatgtgcccgtggaacaggtgacacacgcagacagagagcaaaccaagaaggtggtgtacgcggtggtctatggagcagggaaggagcggctggctgcttgccttggagttcctattcaggaagctgcccagtttttggagagttttttgcagaagtacaagaaaatcaaggacttcgcccgagcagctattgcccagtgtcaccagacaggctgtgtggtgtccatcatgggcagaaggagacccctgccaaggattcacgctcatgaccagcaactccgggcacaagcagagcgacaggcagtgaacttcgtggtgcaaggctccgctgctgacctctgcaagctggccatgatccatgtcttcactgcagtggctgcttcccacaccttgacggccaggctggtggcccagatccatgatgagctgctgtttgaagtggaagatccgcagatcccggagtgtgcagctctcgtcaggaggaccatggagtccttggaacaggtgcaggcattggagctgcagcttcaggtacccctcaaggtgagcctgagtgccggccgctcatggggacacctggtgccactgcaggaggcctggggccctccgccaggcccatgtcgcactgagtctcccagcaacagcctggctgcccctgggtcccctgccagcacccagcccccacccctgcatttttcgccttcattttgtctgtagccccaggcaacagtgggaggagagaactggtttccagcagtccattgtgtggccttccccaaggtcaccagctctgtacgccccaggacgcattaaccctttggggctggggtggcccgccatcccctggagtaaatgcctgtgcaaagccctcctcatccttgtctgagtgaattcttcctgtgagtgggaagtg

SEQ ID NO: 22987 - DNA, 3331 bp, Homo sapiens
  source 1..3331: mol_type = unassigned DNA
cggcggcgtaggctgtggcgggaaacgctgtttgaagcggcaggatggatggcaagcggcggccaggcccagggcccggggtgcccccaaagcgggcccgtgggggcctctgggatgatgatgatgcacctcggccatcccaattcgaggaggacctggcactgatggaggagatggaggcagaacacaggctgcaggagcaggaggaggaggagctgcagtcagtcctggagggggttgcagacgggcaggtcccaccatcagccatagatcctcgctggcttcggcccacaccaccagcgctggacccccagacagagcccctcatcttccaacagttggagattgaccattatgtgggcccagcgcagcctgtgcctggggggcccccaccatcccgcggctccgtgcctgtgctccgcgccttcggggtcaccgatgaggggttctctgtctgctgccacatccacggcttcgctccctacttctacaccccagcgccccctggtttcgggcccgagcacatgggtgacctgcaacgggagctgaacttggccatcagccgggacagtcgcggggggagggagctgactgggccggccgtgctggctgtggaactgtgctcccgagagagcatgtttgggtaccacgggcacggcccctccccgttcctgcgcatcaccgtggcgctgccgcgcctcgtggccccggcccgccgtctcctggaacagggcatccgtgtggcaggcctgggcacgcccagcttcgcgccctacgaggccaacgtcgactttgagatccggttcatggtggacacggacatcgtcggctgcaactggctggagctcccagctgggaaatacgccctgaggctgaaggagaaggctacgcagtgccagctggaggcggacgtgctgtggtctgacgtggtcagtcacccaccggaagggccatggcagcgcattgcgcccttgcgcgtgctcagcttcgatatcgagtgcgccggccgcaaaggcatcttccctgagcctgagcgggaccctgtcatccagatctgctcgctgggcctgcgctggggggagccggagcccttcctacgcctggcgctcaccctgcggccctgtgcccccatcctgggtgccaaggtgcagagctacgagaaggaggaggacctgctgcaggcctggtccaccttcatccgtatcatggaccccgacgtgatcaccggttacaacatccagaacttcgaccttccgtacctcatctctcgggcccagaccctcaaggtacaaacattccctttcctgggccgtgtggccggcctttgctccaacatccgggactcttcattccagtccaagcagacgggccggcgggacaccaaggttgtcagcatggtgggccgcgtgcagatggacatgctgcaggtgctgctgcgggagtacaagctccgctcctacacgctcaatgccgtgagcttccacttcctgggcgagcagaaggaggacgtgcagcacagcatcatcaccgacctgcagaatgggaacgaccagacccgccgccgcctggctgtgtactgcctgaaggatgcctacctgccactgcggctgctggagcggctcatggtgctggtgaacgccgtggagatggcgagggtcactggcgtgcccctcagctacctgctcagtcgtggccagcaggtcaaggtcgtatcccagctgttgcggcaggccatgcacgaggggctgctgatgcccgtggtgaagtcagagggcggcgaggactacacgggagccactgtcatcgagcccctcaaagggtactacgacgtccccatcgccaccctggacttctcctcgctgtacccgtccatcatgatggcccacaacctgtgttacaccacgctccttcggcccgggactgcacagaaactgggcctgactgaggatcagttcatcaggacccccaccggggacgagtttgtgaagacctcagtgcggaaggggctgctgccccagatcctggagaacctgctcagtgcccggaagagggccaaggccgagctggccaaggagacagaccccctccggcgccaggtcctggatggacggcagctggcgctgaaggtgagcgccaactccgtatacggcttcactggcgcccaggtgggcaagttgccgtgcctggagatctcacagagcgtcacggggttcggacgtcagatgatcgagaaaaccaagcagctggtggagtctaagtacacagtggagaatggctacagcaccagtgccaaggtggtgtatggtgacactgactccgtcatgtgccgattcggcgtgtcctcggtggctgaggcgatggccctggggcgggaggccgcggactgggtgtcaggtcacttcccgtcgcccatccggctggagtttgagaaggtctacttcccatacctgcttatcagcaagaagcgctacgcgggcctgctcttctcctcccggcccgacgcccacgaccgcatggactgcaagggcctggaggccgtgcgcagggacaactgccccctcgtggccaacctggtcactgcctcactgcgccgcctgctcatcgaccgagaccctgagggcgcggtggctcacgcacaggacgtcatctcggacctgctgtgcaaccgcatcgatatctcccagctggtcatcaccaaggagctgacccgcgcggcctccgactatgccggcaagcaggcccacgtggagctggccgagaggacccgctgttcgtgctggagcacagcctgcccattgacacgcagtactacctggagcagcagctggccaagcccctcctgcgcatcttcgagcccatcctgggcgagggccgtgccgaggctgtgctactgcggggggaccacacgcgctgcaagacggtgctcacgggcaaggtgggcggcctcctggccttcgccaaacgccgcaactgctgcattggctgccgcacagtgctcagccaccagggagccgtgtgtgagttctgccagccccgggagtctgagctgtatcagaaggaggtatcccatctgaatgccctggaggagcgcttctcgcgcctctggacgcagtgccagcgctgccagggcagcctgcacgaggacgtcatctgcaccagccgggactgccccatcttctacatgcgcaagaaggtgcggaaggacctggaagaccaggagcagctcctgcggcgcttcggaccccctggacctgaggcctggtgaccttgcaagcatcccatggggcgggggcgggaccagggagaattaataaagttctggacttttgct

SEQ ID NO: 22988 - DNA, 3446 bp, Homo sapiens
  source 1..3446: mol_type = unassigned DNA
gggagtcaggggtcacggcggcgtaggctgtggcgggaaacgctgtttgaagcgggatggatggcaagcggcggccaggcccagggcccggggtgcccccaaagcgggcccgtgggggcctctgggatgatgatgatgcacctcggccatcccaattcgaggaggacctggcactgatggaggagatggaggcagaacacaggctgcaggagcaggaggaggaggagctgcagtcagtcctggagggggttgcagacgggcaggtcccaccatcagccatagatcctcgctggcttcggcccacaccaccagcgctggacccccagacagagcccctcatcttccaacagttggagattgaccattatgtgggcccagcgcagcctgtgcctggggggcccccaccatcccgcggctccgtgcctgtgctccgcgccttcggggtcaccgatgaggggttctctgtctgctgccacatccacggcttcgctccctacttctacaccccagcgccccctggtttcgggcccgagcacatgggtgacctgcaacgggagctgaacttggccatcagccgggacagtcgcggggggagggagctgactgggccggccgtgctggctgtggaactgtgctcccgagagagcatgtttgggtaccacgggcacggcccctccccgttcctgcgcatcaccgtggcgctgccgcgcctcgtggccccggcccgccgtctcctggaacagggcatccgtgtggcaggcctgggcacgcccagcttcgcgccctacgaggccaacgtcgactttgagatccggttcatggtggacacggacatcgtcggctgcaactggctggagctcccagctgggaaatacgccctgaggctgaaggagaaggctacgcagtgccagctggaggcggacgtgctgtggtctgacgtggtcagtcacccaccggaagggccatggcagcgcattgcgcccttgcgcgtgctcagcttcgatatcgagtgcgccggccgcaaaggcatcttccctgagcctgagcgggaccctgtcatccagatctgctcgctgggcctgcgctggggggagccggagcccttcctacgcctggcgctcaccctgcggccctgtgcccccatcctgggtgccaaggtgcagagctacgagaaggaggaggacctgctgcaggcctggtccaccttcatccgtatcatggaccccgacgtgatcaccggttacaacatccagaacttcgaccttccgtacctcatctctcgggcccagaccctcaaggtacaaacattccctttcctgggccgtgtggccggcctttgctccaacatccgggactcttcattccagtccaagcagacgggccggcgggacaccaaggttgtcagcatggtgggccgcgtgcagatggacatgctgcaggtgctgctgcgggagtacaagctccgctcctacacgctcaatgccgtgagcttccacttcctgggcgagcagaaggaggacgtgcagcacagcatcatcaccgacctgcagaatgggaacgaccagacccgccgccgcctggctgtgtactgcctgaaggatgcctacctgccactgcggctgctggagcggctcatggtgctggtgaacgccgtggagatggcgagggtcactggcgtgcccctcagctacctgctcagtcgtggccagcaggtcaaggtcgtatcccagctgttgcggcaggccatgcacgaggggctgctgatgcccgtggtgaagtcagagggcggcgaggactacacgggagccactgtcatcgagcccctcaaagggtactacgacgtccccatcgccaccctggacttctcctcgctgtacccgtccatcatgatggcccacaacctgtgttacaccacgctccttcggcccgggactgcacagaaactgggcctgactgaggatcagttcatcaggacccccaccggggacgagtttgtgaagacctcagtgcggaaggggctgctgccccagatcctggagaacctgctcagtgcccggaagagggccaaggccgagctggccaaggagacagaccccctccggcgccaggtcctggatggacggcagctggcgctgaaggtgagcgccaactccgtatacggcttcactggcgcccaggtgggcaagttgccgtgcctggagatctcacagagcgtcacggggttcggacgtcagatgatcgagaaaaccaagcagctggtggagtctaagtacacagtggagaatggctacagcaccagtgccaaggtggtgtatggtgacactgactccgtcatgtgccgattcggcgtgtcctcggtggctgaggcgatggccctggggcgggaggccgcggactgggtgtcaggtcacttcccgtcgcccatccggctggagtttgagaaggtctacttcccatacctgcttatcagcaagaagcgctacgcgggcctgctcttctcctcccggcccgacgcccacgaccgcatggactgcaagggcctggaggccgtgcgcagggacaactgccccctcgtggccaacctggtcactgcctcactgcgccgcctgctcatcgaccgagaccctgagggcgcggtggctcacgcacaggacgtcatctcggacctgctgtgcaaccgcatcgatatctcccagctggtcatcaccaaggagctgacccgcgcggcctccgactatgccggcaagcaggcccacgtggagctggccgagaggatgaggaagcgggaccccgggagtgcgcccagcctgggcgaccgcgtcccctacgtgatcatcagtgccgccaagggtgtggccgcctacatgaagtcggaggacccgctgttcgtgctggagcacagcctgcccattgacacgcagtactacctggagcagcagctggccaagcccctcctgcgcatcttcgagcccatcctgggcgagggccgtgccgaggctgtgctactgcggggggaccacacgcgctgcaagacggtgctcacgggcaaggtgggcggcctcctggccttcgccaaacgccgcaactgctgcattggctgccgcacagtgctcagccaccagggagccgtgtgtgagttctgccagccccgggagtctgagctgtatcagaaggaggtatcccatctgaatgccctggaggagcgcttctcgcgcctctggacgcagtgccagcgctgccagggcagcctgcacgaggacgtcatctgcaccagccgggactgccccatcttctacatgcgcaagaaggtgcggaaggacctggaagaccaggagcagctcctgcggcgcttcggaccccctggacctgaggcctggtgaccttgcaagcatcccatggggcgggggcgggaccagggagaattaataaagttctggacttttgct

SEQ ID NO: 22989 - DNA, 2158 bp, Homo sapiens
  source 1..2158: mol_type = unassigned DNA
gagtggggtccagggaaacggggtcagctgggggtggcagttccaggccgcgaggccgggctcctgggtcggtgggctggtgtcttggcggacgtcccgcagctgccgcgtggatccgagccggggcacccgccgtgactgggacagcccccagggcgctctcggccccatcccgagtagcgcggcctggctgctgccgccatcaagcacgttcgagccaaaagctcctaacgagtcactcgttagacacgtgtgcggagcctgtgtcccaggccagtgctgtcccgtggagatagattgcaagccgctagggaattttttaactttctagtgccggagagctggatggaggcagatcgggaattccatttggggcaaactgaacttgattgagaccctggtagttgtccagatggaacaggacacctgagtctagggttcgggaagaactccagatgggacaaacactcctagctttccttttctctttttggatgaccgctacaggtatcctttgggtgcagtgagacaccaggagagctgctgctttgggggatggacaggggcagcaggaatgcctttgtgttttcgcagtgaacctccttggcctgggcgaagctgtgtggaccaagcaagtcaggagtgtggccatgttttctgagcaggctgcccagagggcccacactctactgtccccaccatcagccaacaatgccacctttgcccgggtgccagtggcaacctacaccaactcctcacaacccttccggctaggagagcgcagctttagccggcagtatgcccacatttatgccacccgcctcatccaaatgagacccttcctggagaaccgggcccagcagcactggggcagtggagtgggagtgaagaagctgtgtgaactgcagcctgaggagaagtgctgtgtggtgggcactctgttcaaggccatgccgctgcagccctccatcctgcgggaggtcagcgaggagcacaacctgctcccccagcctcctcggagtaaatacatacacccagatgacgagctggtcttggaagatgaactgcagcgtatcaaactaaaaggcaccattgacgtgtcaaagctggttacggggactgtcctggctgtgtttggctccgtgagagacgacgggaagtttctggtggaggactattgctttgctgaccttgctccccagaagcccgcacccccacttgacacagataggtttgtgctactggtgtccggcctgggcctgggtggcggtggaggcgagagcctgctgggcacccagctgctggtggatgtggtgacggggcagcttggggacgaaggggagcagtgcagcgccgcccacgtctcccgggttatcctcgctggcaacctcctcagccacagcacccagagcagggattctatcaataaggccaaatacctcaccaagaaaacccaggcagccagcgtggaggctgttaagatgctggatgagatcctcctgcagctgagcgcctcagtgcccgtggacgtgatgccaggcgagtttgatcccaccaattacacgctcccccagcagcccctccacccctgcatgttcccgctggccactgcctactccacgctccagctggtcaccaacccctaccaggccaccattgatggagtcagatttttggggacatcaggacagaacgtgagtgacattttccgatacagcagcatggaggatcacttggagatcctggagtggaccctgcgggtccgtcacatcagccccacagcccctgacactctaggttgttaccccttctacaaaactgacccgttcatcttcccagagtgcccgcatgtctacttttgtggcaacacccccagctttggctccaaaatcatccgaggtcctgaggaccagacagtgctgttggtgactgtccctgacttcagtgccacgcagaccgcctgccttgtgaacctgcgcagcctggcctgccagcccatcagcttctcgggcttcggggcagaggacgatgacctgggaggcctggggctgggcccctgactcaaaaaagtggttttgaccagagaggcccagatggaggctgttcattccctgcagtgtcggcattgtaaataaagcctgagcacttgctgatgcga

SEQ ID NO: 22990 - DNA, 556 bp, Homo sapiens
  source 1..556: mol_type = unassigned DNA
agtggtcggcgggatgaggcgcctggtgacggacggggcgaggagggcagcgattgtgaacctccttggcctgggcgaagctgtgtggaccaagcaagtcaggagtgtggccatgttttctgagcaggctgcccagagggcccacactctactgtccccaccatcagccaacaatgccacctttgcccgggtgccagtggcaacctacaccaactcctcacaacccttccggctaggagagcgcagctttagccggcagtatgcccacatttatgccacccgcctcatccaaatgagacccttcctggagaaccgggcccagcagcactggggcagtggagtgggagtgaagaagctgtgtgaactgcagcctgaggagaagtgctgtgtggtgggcactctgttcaaggccatgccgctgcagccctccatcctgcgggaggtcagcgaggagcacaacctgctcccccagcctcctcggagtaaatacatacacccagatgacgagctggtcttggaagatgaactgcagcgtatcaaactaaaaggcaccatt

SEQ ID NO: 22991 - DNA, 765 bp, Homo sapiens
  source 1..765: mol_type = unassigned DNA
gcggcgggaagagcccgggaagcttagtggggaagcgtctcttgatgggtgaacctccttggcctgggcgaagctgtgtggaccaagcaagtcaggagtgtggccatgttttctgagcaggctgcccagagggcccacactctactgtccccaccatcagccaacaatgccacctttgcccgggtgccagtggcaacctacaccaactcctcacaacccttccggctaggagagcgcagctttagccggcagtatgcccacatttatgccacccgcctcatccaaatgagacccttcctggagaaccgggcccagcagcactggggcagtggagtgggagtgaagaagctgtgtgaactgcagcctgaggagaagtgctgtgtggtgggcactctgttcaaggccatgccgctgcagccctccatcctgcgggaggtcagcgaggagcacaacctgctcccccagcctcctcggagtaaatacatacacccagatgacgagctggtcttggaagatgaactgcagcgtatcaaactaaaaggcaccattgacgtgtcaaagctggttacggggactgtcctggctgtgtttggctccgtgagagacgacgggaagtttctggtggaggactattgctttgctgaccttgctccccagaagcccgcacccccacttgacacagataggtttgtgctactggtgtccggcctgggcctgggtggcggtggaggcgagagcctgctgggcacccagctgctggtggat

SEQ ID NO: 22992 - DNA, 1659 bp, Homo sapiens
  source 1..1659: mol_type = unassigned DNA
gggatgcggcgcgccgcgcgggtgagacatcggtatccaggcacgataaatttccaagtggacacaatgtctggtgtcaactacagctgttctccttcttttcccagtatcctttgggtgcagtgagacaccaggagagctgctgctttgggggatggacaggggcagcaggaatgcctttgtgttttcgcagtgaacctccttggcctgggcgaagctgtgtggaccaagcaagtcaggagtgtggccatgttttctgagcaggctgcccagagggcccacactctactgtccccaccatcagccaacaatgccacctttgcccgggtgccagtggcaacctacaccaactcctcacaacccttccggctaggagagcgcagctttagccggcagtatgcccacatttatgccacccgcctcatccaaatgagacccttcctggagaaccgggcccagcagcactggggcagtggagtgggagtgaagaagctgtgtgaactgcagcctgaggagaagtgctgtgtggtgggcactctgttcaaggccatgccgctgcagccctccatcctgcgggaggtcagcgaggagcacaacctgctcccccagcctcctcggagtaaatacatacacccagatgacgagctggtcttggaagatgaactgcagcgtatcaaactaaaaggcaccattgacgtgtcaaagctggttacggggactgtcctggctgtgtttggctccgtgagagacgacgggaagtttctggtggaggactattgctttgctgaccttgctccccagaagcccgcacccccacttgacacagataggtttgtgctactggtgtccggcctgggcctgggtggcggtggaggcgagagcctgctgggcacccagctgctggtggatgtggtgacggggcagcttggggacgaaggggagcagtgcagcgccgcccacgtctcccgggttatcctcgctggcaacctcctcagccacagcacccagagcagggattctatcaataaggccaaatacctcaccaagaaaacccaggcagccagcgtggaggctgttaagatgctggatgagatcctcctgcagctgagcgcctcagtgcccgtggacgtgatgccaggcgagtttgatcccaccaattacacgctcccccagcagcccctccacccctgcatgttcccgctggccactgcctactccacgctccagctggtcaccaacccctaccaggccaccattgatggagtcagatttttggggacatcaggacagaacgtgagtgacattttccgatacagcagcatggaggatcacttggagatcctggagtggaccctgcgggtccgtcacatcagccccacagcccctgacactctaggttgttaccccttctacaaaactgacccgttcatcttcccagagtgcccgcatgtctacttttgtggcaacacccccagctttggctccaaaatcatccgaggtcctgaggaccagacagtgctgttggtgactgtccctgacttcagtgccacgcagaccgcctgccttgtgaacctgcgcagcctggcctgccagcccatcagcttctcgggcttcggggcagaggacgatgacctgggaggcctggggctgggcccctga

SEQ ID NO: 22993 - DNA, 665 bp, Homo sapiens
  source 1..665: mol_type = unassigned DNA
cacagttggactcaccacatctcctgtacttcgtagccctaggtggctagtggcataagacacaaaaatctcagctctcctggagcttatggtctagttggagcaggcagacaatacatttaaaatatacagtttgttagaagtgaacctccttggcctgggcgaagctgtgtggaccaagcaagtcaggagtgtggccatgttttctgagcaggctgcccagagggcccacactctactgtccccaccatcagccaacaatgccacctttgcccgggtgccagtggcaacctacaccaactcctcacaacccttccggctaggagagcgcagctttagccggcagtatgcccacatttatgccacccgcctcatccaaatgagacccttcctggagaaccgggcccagcagcactggggcagtggagtgggagtgaagaagctgtgtgaactgcagcctgaggagaagtgctgtgtggtgggcactctgttcaaggccatgccgctgcagccctccatcctgcgggaggtcagcgaggagcacaacctgctcccccagcctcctcggagtaaatacatacacccagatgacgagctggtcttggaagatgaactgcagcgtatcaaactaaaaggcaccattgacgtgtcaaagctggttacgg

SEQ ID NO: 22994 - DNA, 5615 bp, Homo sapiens
  source 1..5615: mol_type = unassigned DNA
ttttttttttttttttttggtggttatatacaaataggaccagtacaaatgcctgcatggggttgatgaacaccagaataagggttgtctttacttctgtgtgaggagggaataggttggggtcacacagggcttcactctaatcgtctcacaaaggaagtcagagtggccaagtgttgaagcttgatggagccgagtggatcatagtgtgcgtgtcttctttaggtctccttatgtttgcagtattcaccacagatgtttcctccagtgaaagggaagcactgacggttgccagttgctttgctagtgacatgaaaacaggctcgttttttctagaaagcagcctgagtcttctgtgtgttactcagcaaggaacatgtagacatggttatgaacgtgcacgtttgcctgtatgcatgcacgtggttactcagaaacgcagacatgtttacgcacacacgcatgtctttgcctatacgcatgcgcgtggttactcagaaacgtagacatgtttacgcacgcatgcgtttatgtatgtgcatgcacatggttatgccgtgagaaacatgtagacatagttacgaacatgcacgtgtttgcctgtacgcatgcacgtggttactcaatgagaaacgcagacatgtctacgcacacgcatgtgtttatgtatatgcatgcccatggttacgctgtgaggaacatgtagacatgtttacgtgcacacacgcacgtgtttacacatacgcacgtgttactccccgaggaacctgtaggcatgtttgtgcatacatatgcacgcagatgtatacattgatgtttgtgaacagctgttacacgtccttatttccatgttcatttgataagagttaggatcagattttgggtgattttcactgttactgagctgtgtgcctgtcttccttacccagggccatcccacttgccattttccaagcagagcccacggtgaggaagcactttctccggaaatggctcaagagctcttcccttcaagactttgatattcgagcaattctggattgggactactacattgagcggctgggaagcgccatccagaagatcatcaccatccctgcggccctgcagcaggtaaagaacccagtgccacgtgtcaaacaccccgactggctgcacaaaaaactgctggagaagaatgatgtctacaagcagaagaagatcagtgagctcttcaccctggagggcaggagacaggtcacgatggccgaggcctcagaagacagtccgaggccaagtgctcctgacatggaggacttcggcctcgtaaagctgcctcacccagcagcccctgtcactgtgaagaggaagcgagttctttgggagagccaggaggagtcccaggacctcacgccgactgtgccctggcaggaaatcttggggcagcctcccgccctgggaaccagccaggaggaatggcttgtctggctccggttccacaagaagaagtggcagctgcaggcccggcagcgcctcgcccgcaggaagaggcagcgtctggagtcggcagagggtgtgctcaggcccggggccatccgggatggtcctgccacggggctggggagcttcttgcgaagaactgcccgcagcatcctggaccttccgtggcagattgtgcagatcagcgagaccagccaggccggcctgttcaggctgtgggcgctcgttggcagtgacttgcactgcatcaggctgagcatcccccgtgtgttctacgtgaaccagcgagtcgctaaagcggaggagggtgcttcgtatcgcaaggtaaatcgggtccttcctcgctccaacatggtctacaatctctatgagtattcagtgccagaggacatgtaccaggaacacatcaacgagatcaacgctgagctgtcagcgccagacatcgagggcgtatatgagactcaggttccgttactgttccgggccctggtgcacctgggctgtgtgtgtgtggtcaataaacagctggtgaggcacctttcaggctgggaagcagagacctttgctcttgagcacctggagatgcgctctctggcccagttcagctacctggaaccagggagtatccgccatatctacctgtaccaccacgcacaggcccacaaagcgctcttcgggatcttcatcccctcacagcgcagggcatccgtctttgtgctggacactgtgcgcagcaaccagatgcccagccttggcgccctgtactcagcagagcacggcctcctcctggagaaggtgggccctgagctcctgccaccccccaaacacaccttcgaagttcgggcagaaactgacctgaagaccatctgcagagccatccagcgattcctgctcgcctacaaggaggagcgccgggggcccacactcatcgctgttcagtccagctgggagctgaagaggctggccagtgaaattcctgtcttggaggaattcccactggtgcctatctgtgtggctgacaagatcaactatggggtcctggactggcagcgccatggagcccggcgcatgatccgtcactacctcaacctggacacctgcctgtcgcaggccttcgagatgagcaggtactttcacattcccattgggaacctaccagaggacatctccacattcggctccgacctcttctttgcccgccacctccagcgccacaaccacctgctctggctgtcccctacagcccgccctgacctgggtggaaaggaggctgatgacaactgtcttgtcatggagttcgatgaccaagccactgttgagatcaacagttcaggctgttactccacagtgtgtgtggagctggaccttcagaacctggccgtcaacaccattctccagtctcaccatgtcaacgacatggagggggccgacagcatggggatcagcttcgacgtgatccagcaggcctccctggaggacatgatcacgggtggtcaggctgccagtgccccggccagctacgatgagacagccctgtgctctaacaccttcaggatcctgaagagcatggtcgtgggctgggtgaaggagatcacccagtaccacaacatctatgcagacaaccaggtgatgcacttctaccgctggcttcggtcgccatcctctctgcttcatgaccctgccctgcaccgcacactccacaacatgatgaagaagctcttcctgcagctcatcgctgagttcaagcgcctggggtcatcagtcatctacgccaacttcaaccgcatcatcctctgtacaaagaagcgccgtgtggaagatgccatcgcttacgtggagtacatcaccagcagcatccattcaaaggagaccttccattctctgacaatttctttctctcgatgctgggaatttcttctctggatggatccatctaactatggcggaatcaaaggaaaagtttcatctcgtattcactgtggactgcaagactcccagaaagcagggggagcagaggatgagcaggaaaatgaggacgatgaggaggaaagagatggggaggaggaggaagaggcggaggaatccaacgtggaggatttactggaaaacaactggaacattttgcagtttttgccacaggcagcctcctgccagaactacttcctcatgattgtttcagcgtacatcgtggccgtgtaccactgcatgaaggacgggctgaggcgcagtgctccagggagcacccccgtgaggaggaggggggccagccagctctcccaggaggccgagggggcggtcggagcccttcccggaatgatcaccttctctcaggattatgtcgcaaatgagctcactcagagcttcttcaccatcactcagaagattcagaagaaagtcacaggctctcggaactccactgagctctcagagatgtttcctgtcctccccggttcccacttgctgctcaataaccctgccctggagttcatcaaatacgtgtgcaaggtgctgtccctggacaccaacatcacaaaccaggtgaataagctgaaccgagacctgcttcgcctggtggatgtcggcgagttctccgaggaggcccagttccgagacccctgccgctcctacgtgcttcctgaggtcatctgccgcagctgtaacttctgccgcgacctggacctgtgtaaagactcttccttctcagaggatggggcggtcctgcctcagtggctctgctccaactgtcaggcgccctacgactcctctgccatcgagatgacgctggtggaagttctacagaagaagctgatggccttcaccctgcaggacctgaaggaggcagacactcccaagtgtgaagagaaggaaaggaggaagagggagttgcacagctcggccacaggaaggtcttgccgaggggcatctgagcagaggctgggggacgcgccaagctgccgtgtggtggtgcacggcgttcaggcctgcaggatggagggagtctgcctgaagtgccgcggggtgaaggagaccagcatgcctgtgtactgcagctgcgcgggagacttcgccctcaccatccacacccaggtcttcatggaacagatcggaatattccggaacattgcccagcactacggcatgtcgtacctcctggagaccctggagtggctgctgcagaagaacccacagctgggccattagccagccccgggccccgggtgcctctgcgtccgtgccaggcctcctgatgccaaggccacatccccgtgcttccagtgaccagaccactgaccaccctgactgtccaaacctgtgaccccaggccagggaacggggaggaaaccaaagaaaaccattttcagggagctcagacgtcacaggagggagcgggagcaggatgtggccctggcctcgccagagcacctgaagaagcaggccgtgagcgaggctgcgagtgccctgggcgccgtttctcacgcagtgaatgcttttccaggcctctgttgcttcctgcaccacacctggtggggtgggagcgtcctctaggtgcccctagttctttgtcctgcctcccagagggaggaaaagcccctgggggcttctggctccctgagattgggctctgagacgagacgggttcccaaggccctggtggggctggagtctcacctgtttgcatggagaaatgggctggccccacagcctcacaggagcagtttgtgggctggtttccccaggaatccagaccctaacccgtgagaatctggattttggcttgtgagccctgcttatttggagccgggtctagagggaaccctctatcagcctcaggaaaacaagacctctgtgcacctcacttttggctcactgcagcccttgtccttcacctccacacaggaccagctggaagcagaaagaagaaaggccaatttcacagggcaccaaacaagtatgaaatgtaaatcagaaatgcagacaccccagacgagagcctcacaggagggagggggccccacaggctccccaggaggctcgtgtctttggcccagagccagccttagtttgtccctgccatctactgtctgaggccatcgctgctacactttgtttttatttgtatttcatactgaagtttc

SEQ ID NO: 22995 - DNA, 7840 bp, Homo sapiens
  source 1..7840: mol_type = unassigned DNA
cgccaaatttctcccctgaagcagaggtggtagccaacggctccatgtctctgaggagcggcgggcggcggcgcgcggacccaggcgcggatggcgaggccagcagggatgatggcgccacttcctcagtttcggcactcaagcgcctggaacggagtcagtggacggataagatggatttgcggtttggttttgagcggctgaaggagcctggtgagaagacaggctggctcattaacatgcatcctaccgagattttagatgaagataagcgcttaggcagtgcagtggattactactttattcaagatgacggaagcagatttaaggtggctttgccctataaaccgtatttctacattgcgaccagaaagggttgtgagcgagaagtttcatcttttctctccaagaagtttcagggcaaaattgcaaaagtggagactgtccccaaagaggatctggacttgccaaatcacttggtgggtttgaagcgaaattacatcaggctgtccttccacactgtggaggatcttgtcaaagtgaggaaggagatctcccctgccgtgaagaagaacagggagcaggatcacgccagcgacgcgtacacagctctgctttccagtgttctgcagaggggcggtgtcattactgatgaagaggaaacctctaagaagatagctgaccagttggacaacattgtggacatgcgcgagtacgatgttccctaccacatccgcctctccattgacctgaagatccacgtggctcattggtacaatgtcagataccgaggaaatgcttttccggtagaaatcacccgccgagatgaccttgttgaacgacctgaccctgtggttttggcatttgacattgagacgaccaaactgcccctcaagtttcctgatgctgagacagaccagattatgatgatttcctacatgatcgatggccagggctacctcatcaccaacagggagattgtttcagaagatattgaagattttgagttcacccccaagccagaatatgaaggccccttttgtgtcttcaatgaacccgatgaggctcatctgatccaaaggtggtttgaacacgtccaggagaccaaacccaccatcatggtcacctacaacggggacttttttgactggccatttgtggaggcccgggcagcagtccacggtctgagcatgcagcaggagataggcttccagaaggacagccagggggagtacaaggcgccccagtgcatccacatggactgcctcaggtgggtgaagagggacagttaccttcctgtgggcagtcataatctcaaggcggccgccaaggccaagctaggctatgatcccgtggagctagacccggaggacatgtgccggatggccacggagcagccccagactctggccacgtattctgtgtcagatgctgtcgccacttactacctgtacatgaagtacgtccacccattcatctttgctctgtgcaccattattcccatggagcccgacgaggtgctgcggaagggctctggcactctgtgtgaggccttgctgatggtgcaggccttccacgccaacatcatcttccccaacaagcaagagcaggagttcaataagctgacggacgacggacacgtgctggactctgagacctacgtcgggggccacgtggaggccctcgagtctggggttttccgcagcgatatcccttgccggtttaggatgaatcctgccgcctttgacttcctgctgcagcgggttgagaagaccttgcgccacgcccttgaggaagaggagaaagtgcctgtggagcaagtcaccaactttgaagaggtgtgtgatgagattaagagcaagcttgcctccctgaaggacgttcccagccgcatcgagtgtccactcatctaccacctggacgtgggggccatgtaccccaacatcatcctgaccaaccgcctgcagccctctgccatggtggacgaagccacctgtgctgcctgtgacttcaataagcctggagcaaactgccagcggaagatggcctggcagtggaggggcgagttcatgccagccagtcgcagcgaataccatcggatccagcaccagctggagtcagagaagttcccccccttgttcccagaggggccagctcgggcctttcatgaactgtcccgcgaggaacaggcgaaatacgagaagagaaggctggcggattactgccggaaagcctacaagaagatccacatcaccaaggtggaagagcgtctcaccaccatctgccagcgggaaaactccttctacgtggacaccgtgcgtgccttccgggacaggcgttacgagttcaaagggctccacaaggtgtggaaaaagaagctctcggcggccgtggaggtgggcgacgcggctgaggtgaagcgctgcaagaacatggaggtgctgtatgactcgctgcagctggcccacaagtgcatcctgaactccttctatggctatgtcatgcgcaagggggctcgctggtactccatggagatggctggcatcgtctgcttcacaggggccaacatcatcacccaggcacgggagctgatcgagcagattgggaggcccttagagctggacacagatggtatatggtgcgtcctgcccaacagcttcccagaaaattttgtcttcaagacgaccaatgtgaagaagcccaaagtgaccatctcctacccaggcgccatgttgaacatcatggtcaaggaaggcttcaccaatgaccagtaccaggagctggctgagccgtcctcactcacctacgtcacccgctcagagaacagcatcttttttgaggttgatgggccctaccttgccatgattcttccagcctccaaggaagaaggcaagaaattgaagaagaggtatgctgtgttcaatgaagacggttctctggctgagctcaagggctttgaggtcaaacgccgcggggaactgcagctgattaagatcttccaatcctcggtgtttgaggccttcctcaagggcagcacgctggaagaggtgtatggctctgtagccaaggtggctgactactggctggacgtgctgtacagcaaggcagccaacatgcctgactctgagctattcgagctcatctctgagaaccgttccatgtctcggaagctggaagattacggggagcagaagtctacgtccatcagcacagcaaagcgcctggccgagttcctgggagaccagatggtcaaggatgcagggctgagttgccgctacatcatctcccgcaagcccgagggctcccctgtcacggagagggccatcccacttgccattttccaagcagagcccacggtgaggaagcactttctccggaaatggctcaagagctcttcccttcaagactttgatattcgagcaattctggattgggactactacattgagcggctgggaagcgccatccagaagatcatcaccatccctgcggccctgcagcaggtaaagaacccagtgccacgtgtcaaacaccccgactggctgcacaaaaaactgctggagaagaatgatgtctacaagcagaagaagatcagtgagctcttcaccctggagggcaggagacaggtcacgatggccgaggcctcagaagacagtccgaggccaagtgctcctgacatggaggacttcggcctcgtaaagctgcctcacccagcagcccctgtcactgtgaagaggaagcgagttctttgggagagccaggaggagtcccaggacctcacgccgactgtgccctggcaggaaatcttggggcagcctcccgccctgggaaccagccaggaggaatggcttgtctggctccggttccacaagaagaagtggcagctgcaggcccggcagcgcctcgcccgcaggaagaggcagcgtctggagtcggcagagggtgtgctcaggcccggggccatccgggatggtcctgccacggggctggggagcttcttgcgaagaactgcccgcagcatcctggaccttccgtggcagattgtgcagatcagcgagaccagccaggccggcctgttcaggctgtgggcgctcgttggcagtgacttgcactgcatcaggctgagcatcccccgtgtgttctacgtgaaccagcgagtcgctaaagcggaggagggtgcttcgtatcgcaaggtaaatcgggtccttcctcgctccaacatggtctacaatctctatgagtattcagtgccagaggacatgtaccaggaacacatcaacgagatcaacgctgagctgtcagcgccagacatcgagggcgtatatgagactcaggttccgttactgttccgggccctggtgcacctgggctgtgtgtgtgtggtcaataaacagctggtgaggcacctttcaggctgggaagcagagacctttgctcttgagcacctggagatgcgctctctggcccagttcagctacctggaaccagggagtatccgccatatctacctgtaccaccacgcacaggcccacaaagcgctcttcgggatcttcatcccctcacagcgcagggcatccgtctttgtgctggacactgtgcgcagcaaccagatgcccagccttggcgccctgtactcagcagagcacggcctcctcctggagaaggtgggccctgagctcctgccaccccccaaacacaccttcgaagttcgggcagaaactgacctgaagaccatctgcagagccatccagcgattcctgctcgcctacaaggaggagcgccgggggcccacactcatcgctgttcagtccagctgggagctgaagaggctggccagtgaaattcctgtcttggaggaattcccactggtgcctatctgtgtggctgacaagatcaactatggggtcctggactggcagcgccatggagcccggcgcatgatccgtcactacctcaacctggacacctgcctgtcgcaggccttcgagatgagcaggtactttcacattcccattgggaacctaccagaggacatctccacattcggctccgacctcttctttgcccgccacctccagcgccacaaccacctgctctggctgtcccctacagcccgccctgacctgggtggaaaggaggctgatgacaactgtcttgtcatggagttcgatgaccaagccactgttgagatcaacagttcaggctgttactccacagtgtgtgtggagctggaccttcagaacctggccgtcaacaccattctccagtctcaccatgtcaacgacatggagggggccgacagcatggggatcagcttcgacgtgatccagcaggcctccctggaggacatgatcacgggtggtcaggctgccagtgccccggccagctacgatgagacagccctgtgctctaacaccttcaggatcctgaagagcatggtcgtgggctgggtgaaggagatcacccagtaccacaacatctatgcagacaaccaggtgatgcacttctaccgctggcttcggtcgccatcctctctgcttcatgaccctgccctgcaccgcacactccacaacatgatgaagaagctcttcctgcagctcatcgctgagttcaagcgcctggggtcatcagtcatctacgccaacttcaaccgcatcatcctctgtacaaagaagcgccgtgtggaagatgccatcgcttacgtggagtacatcaccagcagcatccattcaaaggagaccttccattctctgacaatttctttctctcgatgctgggaatttcttctctggatggatccatctaactatggcggaatcaaaggaaaagtttcatctcgtattcactgtggactgcaagactcccagaaagcagggggagcagaggatgagcaggaaaatgaggacgatgaggaggaaagagatggggaggaggaggaagaggcggaggaatccaacgtggaggatttactggaaaacaactggaacattttgcagtttttgccacaggcagcctcctgccagaactacttcctcatgattgtttcagcgtacatcgtggccgtgtaccactgcatgaaggacgggctgaggcgcagtgctccagggagcacccccgtgaggaggaggggggccagccagctctcccaggaggccgagggggcggtcggagcccttcccggaatgatcaccttctctcaggattatgtcgcaaatgagctcactcagagcttcttcaccatcactcagaagattcagaagaaagtcacaggctctcggaactccactgagctctcagagatgtttcctgtcctccccggttcccacttgctgctcaataaccctgccctggagttcatcaaatacgtgtgcaaggtgctgtccctggacaccaacatcacaaaccaggtgaataagctgaaccgagacctgcttcgcctggtggatgtcggcgagttctccgaggaggcccagttccgagacccctgccgctcctacgtgcttcctgaggtcatctgccgcagctgtaacttctgccgcgacctggacctgtgtaaagactcttccttctcagaggatggggcggtcctgcctcagtggctctgctccaactgtcaggcgccctacgactcctctgccatcgagatgacgctggtggaagttctacagaagaagctgatggccttcaccctgcaggacctggtctgcctgaagtgccgcggggtgaaggagaccagcatgcctgtgtactgcagctgcgcgggagacttcgccctcaccatccacacccaggtcttcatggaacagatcggaatattccggaacattgcccagcactacggcatgtcgtacctcctggagaccctggagtggctgctgcagaagaacccacagctgggccattagccagccccgggccccgggtgcctctgcgtccgtgccaggcctcctgatgccaaggccacatccccgtgcttccagtgaccagaccactgaccaccctgactgtccaaacctgtgaccccaggccagggaacggggaggaaaccaaagaaaaccattttcagggagctcagacgtcacaggagggagcgggagcaggatgtggccctggcctcgccagagcacctgaagaagcaggccgtgagcgaggctgcgagtgccctgggcgccgtttctcacgcagtgaatgcttttccaggcctctgttgcttcctgcaccacacctggtggggtgggagcgtcctctaggtgcccctagttctttgtcctgcctcccagagggaggaaaagcccctgggggcttctggctccctgagattgggctctgagacgagacgggttcccaaggccctggtggggctggagtctcacctgtttgcatggagaaatgggctggccccacagcctcacaggagcagtttgtgggctggtttccccaggaatccagaccctaacccgtgagaatctggattttggcttgtgagccctgcttatttggagccgggtctagagggaaccctctatcagcctcaggaaaacaagacctctgtgcacctcacttttggctcactgcagcccttgtccttcacctccacacaggaccagctggaagcagaaagaagaaaggccaatttcacagggcaccaaacaagtatgaaatgtaaatcagaaatgcagacaccccagacgagagcctcacaggagggagggggccccacaggctccccaggaggctcgtgtctttggcccagagccagccttagtttgtccctgccatctactgtctgaggccatcgctgctacactttgtttttatttgtatttcatactgaagtttc

SEQ ID NO: 22996 - DNA, 3569 bp, Homo sapiens
  source 1..3569: mol_type = unassigned DNA
cgccaaatttctcccctgaagcagaggtggtagccaacggctccatgtctctgaggagcggcgggcggcggcgcgcggacccaggcgcggatggcgaggccagcagggatgatggcgccacttcctcagtttcggcactcaagcgcctggaacggagtcagtggacggataagatggatttgcggtttggttttgagcggctgaaggagcctggtgagaagacaggctggctcattaacatgcatcctaccgagattttagatgaagataagcgcttaggcagtgcagtggattactactttattcaagatgacggaagcagatttaaggtggctttgccctataaaccgtatttctacattgcgaccagaaagggttgtgagcgagaagtttcatcttttctctccaagaagtttcagggcaaaattgcaaaagtggagactgtccccaaagaggatctggacttgccaaatcacttggtgggtttgaagcgaaattacatcaggctgtccttccacactgtggaggatcttgtcaaagtgaggaaggagatctcccctgccgtgaagaagaacagggagcaggatcacgccagcgacgcgtacacagctctgctttccagtgttctgcagaggggcggtgtcattactgatgaagaggaaacctctaagaagatagctgaccagttggacaacattgtggacatgcgcgagtacgatgttccctaccacatccgcctctccattgacctgaagatccacgtggctcattggtacaatgtcagataccgaggaaatgcttttccggtagaaatcacccgccgagatgaccttgttgaacgacctgaccctgtggttttggcatttgacattgagacgaccaaactgcccctcaagtttcctgatgctgagacagaccagattatgatgatttcctacatgatcgatggccagggctacctcatcaccaacagggagattgtttcagaagatattgaagattttgagttcacccccaagccagaatatgaaggccccttttgtgtcttcaatgaacccgatgaggctcatctgatccaaaggtggtttgaacacgtccaggagaccaaacccaccatcatggtcacctacaacggggacttttttgactggccatttgtggaggcccgggcagcagtccacggtctgagcatgcagcaggagataggcttccagaaggacagccagggggagtacaaggcgccccagtgcatccacatggactgcctcaggtgggtgaagagggacagttaccttcctgtgggcagtcataatctcaaggcggccgccaaggccaagctaggctatgatcccgtggagctagacccggaggacatgtgccggatggccacggagcagccccagactctggccacgtattctgtgtcagatgctgtcgccacttactacctgtacatgaagtacgtccacccattcatctttgctctgtgcaccattattcccatggagcccgacgaggtgctgcggaagggctctggcactctgtgtgaggccttgctgatggtgcaggccttccacgccaacatcatcttccccaacaagcaagagcaggagttcaataagctgacggacgacggacacgtgctggactctgagacctacgtcgggggccacgtggaggccctcgagtctggggttttccgcagcgatatcccttgccggtttaggatgaatcctgccgcctttgacttcctgctgcagcgggttgagaagaccttgcgccacgcccttgaggaagaggagaaagtgcctgtggagcaagtcaccaactttgaagaggtgtgtgatgagattaagagcaagcttgcctccctgaaggacgttcccagccgcatcgagtgtccactcatctaccacctggacgtgggggccatgtaccccaacatcatcctgaccaaccgcctgcagccctctgccatggtggacgaagccacctgtgctgcctgtgacttcaataagcctggagcaaactgccagcggaagatggcctggcagtggaggggcgagttcatgccagccagtcgcagcgaataccatcggatccagcaccagctggagtcagagaagttcccccccttgttcccagaggggccagctcgggcctttcatgaactgtcccgcgaggaacaggcgaaatacgagaagagaaggctggcggattactgccggaaagcctacaagaagatccacatcaccaaggtggaagagcgtctcaccaccatctgccagcgggaaaactccttctacgtggacaccgtgcgtgccttccgggacaggcgttacgagttcaaagggctccacaaggtgtggaaaaagaagctctcggcggccgtggaggtgggcgacgcggctgaggtgaagcgctgcaagaacatggaggtgctgtatgactcgctgcagctggcccacaagtgcatcctgaactccttctatggctatgtcatgcgcaagggggctcgctggtactccatggagatggctggcatcgtctgcttcacaggggccaacatcatcacccaggcacgggagctgatcgagcagattgggaggcccttagagctggacacagatggtatatggtgcgtcctgcccaacagcttcccagaaaattttgtcttcaagacgaccaatgtgaagaagcccaaagtgaccatctcctacccaggcgccatgttgaacatcatggtcaaggaaggcttcaccaatgaccagtaccaggagctggctgagccgtcctcactcacctacgtcacccgctcagagaacagcatcttttttgaggttgatgggccctaccttgccatgattcttccagcctccaaggaagaaggcaagaaattgaagaagaggtatgctgtgttcaatgaagacggttctctggctgagctcaagggctttgaggtcaaacgccgcggggaactgcagctgattaagatcttccaatcctcggtgtttgaggccttcctcaagggcagcacgctggaagaggtgtatggctctgtagccaaggtggctgactactggctggacgtgctgtacagcaaggcagccaacatgcctgactctgagctattcgagctcatctctgagaaccgttccatgtctcggaagctggaagattacggggagcagaagtctacgtccatcagcacagcaaagcgcctggccgagttcctgggagaccagatggtcaaggatgcagggctgagttgccgctacatcatctcccgcaagcccgagggctcccctgtcacggagagggccatcccacttgccattttccaagcagagcccacggtgaggaagcactttctccggaaatggctcaagagctcttcccttcaagactttgatattcgagcaattctggattgggactactacattgagcggctgggaagcgccatccagaagatcatcaccatccctgcggccctgcagcaggtaaagaacccagtgccacgtgtcaaacaccccgactggctgcacaaaactgctggagaagaatga

SEQ ID NO: 22997 - DNA, 3001 bp, Homo sapiens
  source 1..3001: mol_type = unassigned DNA
agtgttactaatagaagggtcttatcctttgcccttaatttggaaagctaaggtctaagacagggtccattgggcttcccttagtcttaatggcagagccagagaccactgtgtggcgagttttccatagtctattgtctttaccactgtgggggtccggcctggtccctggcgactgttcagtgtgctgcctctgacctccctgtggccagaggtacttcacacagagtctttctaaccagggccacttttcgatgtgaccaaaggtacatcacagggatctccagccagctctactgagtatgatgtgtgaggcatcagcacttaggtgtcaggagccgtcggtctgctgcagagggcgtggttgagggtcaggagccatcagtctgcggagagcatggttgagggcagctactcgcattacccaccagcggtggttcatgctgggcaatgcttgctgtgtaccaggaggtgggccgagcacttcgcattctgcctctgtccccacatcagcccagggacggggagcggttattgtctgtttttcagataaggaaactgaggtcagaggggctgcctttgtggtcataccacaaatgaatggaagggatcctgaagagcatggtcgtgggctgggtgaaggagatcacccagtaccacaacatctatgcagacaaccaggtgatgcacttctaccgctggcttcggtcgccatcctctctgcttcatgaccctgccctgcaccgcacactccacaacatgatgaagaagctcttcctgcagctcatcgctgagttcaagcgcctggggtcatcagtcatctacgccaacttcaaccgcatcatcctctgtacaaagaagcgccgtgtggaagatgccatcgcttacgtggagtacatcaccagcagcatccattcaaaggagaccttccattctctgacaatttctttctctcgatgctgggaatttcttctctggatggatccatctaactatggcggaatcaaaggaaaagtttcatctcgtattcactgtggactgcaagactcccagaaagcagggggagcagaggatgagcaggaaaatgaggacgatgaggaggaaagagatggggaggaggaggaagaggcggaggaatccaacgtggaggatttactggaaaacaactggaacattttgcagtttttgccacaggcagcctcctgccagaactacttcctcatgattgtttcagcgtacatcgtggccgtgtaccactgcatgaaggacgggctgaggcgcagtgctccagggagcacccccgtgaggaggaggggggccagccagctctcccaggaggccgagggggcggtcggagcccttcccggaatgatcaccttctctcaggattatgtcgcaaatgagctcactcagagcttcttcaccatcactcagaagattcagaagaaagtcacaggctctcggaactccactgagctctcagagatgtttcctgtcctccccggttcccacttgctgctcaataaccctgccctggagttcatcaaatacgtgtgcaaggtgctgtccctggacaccaacatcacaaaccaggtgaataagctgaaccgagacctgcttcgcctggtggatgtcggcgagttctccgaggaggcccagttccgagacccctgccgctcctacgtgcttcctgaggtcatctgccgcagctgtaacttctgccgcgacctggacctgtgtaaagactcttccttctcagaggatggggcggtcctgcctcagtggctctgctccaactgtcaggcgccctacgactcctctgccatcgagatgacgctggtggaagttctacagaagaagctgatggccttcaccctgcaggacctggtctgcctgaagtgccgcggggtgaaggagaccagcatgcctgtgtactgcagctgcgcgggagacttcgccctcaccatccacacccaggtcttcatggaacagatcggaatattccggaacattgcccagcactacggcatgtcgtacctcctggagaccctggagtggctgctgcagaagaacccacagctgggccattagccagccccgggcctcctgatgccaaggccacatccccgtgcttccagtgaccagaccactgaccaccctgactgtccaaacctgtgaccccaggccagggaacggggaggaaaccaaagaaaaccattttcagggagctcagacgtcacaggagggagcgggagcaggatgtggccctggcctcgccagagcacctgaagaagcaggccgtgagcgaggctgcgagtgccctgggcgccgtttctcacgcagtgaatgcttttccaggcctctgttgcttcctgcaccacacctggtggggtgggagcgtcctctaggtgcccctagttctttgtcctgcctcccagagggaggaaaagcccctgggggcttctggctccctgagattgggctctgagacgagacgggttcccaaggccctggtggggctggagtctcacctgtttgcatggagaaatgggctggccccacagcctcacaggagcagtttgtgggctggtttccccaggaatccagaccctaacccgtgagaatctggattttggcttgtgagccctgcttatttggagccgggtctagagggaaccctctatcagcctcaggaaaacaagacctctgtgcacctcacttttggctcactgcagcccttgtccttcacctccacacaggaccagctggaagcagaaagaagaaaggccaatttcacagggcaccaaacaagtatgaaatgtaaatcagaaatgcagacaccccagacgagagcctcacaggagggagggggccccacaggctccccaggaggctcgtgtctttggcccagagccagccttagtttgtccctgccatctactgtctgaggccatcgctgctacactttgtttttatttgtatttcatactgaagtttctct

SEQ ID NO: 22998 - DNA, 7829 bp, Homo sapiens
  source 1..7829: mol_type = unassigned DNA
atgagccgtcccctgggcttgaaatctttcccgcggcacaaacaggcgccccttcctctgtcgctcacttttcacggttgtctccttctgaggcgggatgatggcgccacttcctcagtttcggcactcaagcgcctggaacggagtcagtggacggataagatggatttgcggtttggttttgagcggctgaaggagcctggtgagaagacaggctggctcattaacatgcatcctaccgagattttagatgaagataagcgcttaggcagtgcagtggattactactttattcaagatgacggaagcagatttaaggtggctttgccctataaaccgtatttctacattgcgaccagaaagggttgtgagcgagaagtttcatcttttctctccaagaagtttcagggcaaaattgcaaaagtggagactgtccccaaagaggatctggacttgccaaatcacttggtgggtttgaagcgaaattacatcaggctgtccttccacactgtggaggatcttgtcaaagtgaggaaggagatctcccctgccgtgaagaagaacagggagcaggatcacgccagcgacgcgtacacagctctgctttccagtgttctgcagaggggcggtgtcattactgatgaagaggaaacctctaagaagatagctgaccagttggacaacattgtggacatgcgcgagtacgatgttccctaccacatccgcctctccattgacctgaagatccacgtggctcattggtacaatgtcagataccgaggaaatgcttttccggtagaaatcacccgccgagatgaccttgttgaacgacctgaccctgtggttttggcatttgacattgagacgaccaaactgcccctcaagtttcctgatgctgagacagaccagattatgatgatttcctacatgatcgatggccagggctacctcatcaccaacagggagattgtttcagaagatattgaagattttgagttcacccccaagccagaatatgaaggccccttttgtgtcttcaatgaacccgatgaggctcatctgatccaaaggtggtttgaacacgtccaggagaccaaacccaccatcatggtcacctacaacggggacttttttgactggccatttgtggaggcccgggcagcagtccacggtctgagcatgcagcaggagataggcttccagaaggacagccagggggagtacaaggcgccccagtgcatccacatggactgcctcaggtgggtgaagagggacagttaccttcctgtgggcagtcataatctcaaggcggccgccaaggccaagctaggctatgatcccgtggagctagacccggaggacatgtgccggatggccacggagcagccccagactctggccacgtattctgtgtcagatgctgtcgccacttactacctgtacatgaagtacgtccacccattcatctttgctctgtgcaccattattcccatggagcccgacgaggtgctgcggaagggctctggcactctgtgtgaggccttgctgatggtgcaggccttccacgccaacatcatcttccccaacaagcaagagcaggagttcaataagctgacggacgacggacacgtgctggactctgagacctacgtcgggggccacgtggaggccctcgagtctggggttttccgcagcgatatcccttgccggtttaggatgaatcctgccgcctttgacttcctgctgcagcgggttgagaagaccttgcgccacgcccttgaggaagaggagaaagtgcctgtggagcaagtcaccaactttgaagaggtgtgtgatgagattaagagcaagcttgcctccctgaaggacgttcccagccgcatcgagtgtccactcatctaccacctggacgtgggggccatgtaccccaacatcatcctgaccaaccgcctgcagccctctgccatggtggacgaagccacctgtgctgcctgtgacttcaataagcctggagcaaactgccagcggaagatggcctggcagtggaggggcgagttcatgccagccagtcgcagcgaataccatcggatccagcaccagctggagtcagagaagttcccccccttgttcccagaggggccagctcgggcctttcatgaactgtcccgcgaggaacaggcgaaatacgagaagagaaggctggcggattactgccggaaagcctacaagaagatccacatcaccaaggtggaagagcgtctcaccaccatctgccagcgggaaaactccttctacgtggacaccgtgcgtgccttccgggacaggcgttacgagttcaaagggctccacaaggtgtggaaaaagaagctctcggcggccgtggaggtgggcgacgcggctgaggtgaagcgctgcaagaacatggaggtgctgtatgactcgctgcagctggcccacaagtgcatcctgaactccttctatggctatgtcatgcgcaagggggctcgctggtactccatggagatggctggcatcgtctgcttcacaggggccaacatcatcacccaggcacgggagctgatcgagcagattgggaggcccttagagctggacacagatggtatatggtgcgtcctgcccaacagcttcccagaaaattttgtcttcaagacgaccaatgtgaagaagcccaaagtgaccatctcctacccaggcgccatgttgaacatcatggtcaaggaaggcttcaccaatgaccagtaccaggagctggctgagccgtcctcactcacctacgtcacccgctcagagaacagcatcttttttgaggttgatgggccctaccttgccatgattcttccagcctccaaggaagaaggcaagaaattgaagaagaggtatgctgtgttcaatgaagacggttctctggctgagctcaagggctttgaggtcaaacgccgcggggaactgcagctgattaagatcttccaatcctcggtgtttgaggccttcctcaagggcagcacgctggaagaggtgtatggctctgtagccaaggtggctgactactggctggacgtgctgtacagcaaggcagccaacatgcctgactctgagctattcgagctcatctctgagaaccgttccatgtctcggaagctggaagattacggggagcagaagtctacgtccatcagcacagcaaagcgcctggccgagttcctgggagaccagatggtcaaggatgcagggctgagttgccgctacatcatctcccgcaagcccgagggctcccctgtcacggagagggccatcccacttgccattttccaagcagagcccacggtgaggaagcactttctccggaaatggctcaagagctcttcccttcaagactttgatattcgagcaattctggattgggactactacattgagcggctgggaagcgccatccagaagatcatcaccatccctgcggccctgcagcaggtaaagaacccagtgccacgtgtcaaacaccccgactggctgcacaaaaaactgctggagaagaatgatgtctacaagcagaagaagatcagtgagctcttcaccctggagggcaggagacaggtcacgatggccgaggcctcagaagacagtccgaggccaagtgctcctgacatggaggacttcggcctcgtaaagctgcctcacccagcagcccctgtcactgtgaagaggaagcgagttctttgggagagccaggaggagtcccaggacctcacgccgactgtgccctggcaggaaatcttggggcagcctcccgccctgggaaccagccaggaggaatggcttgtctggctccggttccacaagaagaagtggcagctgcaggcccggcagcgcctcgcccgcaggaagaggcagcgtctggagtcggcagagggtgtgctcaggcccggggccatccgggatggtcctgccacggggctggggagcttcttgcgaagaactgcccgcagcatcctggaccttccgtggcagattgtgcagatcagcgagaccagccaggccggcctgttcaggctgtgggcgctcgttggcagtgacttgcactgcatcaggctgagcatcccccgtgtgttctacgtgaaccagcgagtcgctaaagcggaggagggtgcttcgtatcgcaaggtaaatcgggtccttcctcgctccaacatggtctacaatctctatgagtattcagtgccagaggacatgtaccaggaacacatcaacgagatcaacgctgagctgtcagcgccagacatcgagggcgtatatgagactcaggttccgttactgttccgggccctggtgcacctgggctgtgtgtgtgtggtcaataaacagctggtgaggcacctttcaggctgggaagcagagacctttgctcttgagcacctggagatgcgctctctggcccagttcagctacctggaaccagggagtatccgccatatctacctgtaccaccacgcacaggcccacaaagcgctcttcgggatcttcatcccctcacagcgcagggcatccgtctttgtgctggacactgtgcgcagcaaccagatgcccagccttggcgccctgtactcagcagagcacggcctcctcctggagaaggtgggccctgagctcctgccaccccccaaacacaccttcgaagttcgggcagaaactgacctgaagaccatctgcagagccatccagcgattcctgctcgcctacaaggaggagcgccgggggcccacactcatcgctgttcagtccagctgggagctgaagaggctggccagtgaaattcctgtcttggaggaattcccactggtgcctatctgtgtggctgacaagatcaactatggggtcctggactggcagcgccatggagcccggcgcatgatccgtcactacctcaacctggacacctgcctgtcgcaggccttcgagatgagcaggtactttcacattcccattgggaacctaccagaggacatctccacattcggctccgacctcttctttgcccgccacctccagcgccacaaccacctgctctggctgtcccctacagcccgccctgacctgggtggaaaggaggctgatgacaactgtcttgtcatggagttcgatgaccaagccactgttgagatcaacagttcaggctgttactccacagtgtgtgtggagctggaccttcagaacctggccgtcaacaccattctccagtctcaccatgtcaacgacatggagggggccgacagcatggggatcagcttcgacgtgatccagcaggcctccctggaggacatgatcacgggtggtcaggctgccagtgccccggccagctacgatgagacagccctgtgctctaacaccttcaggatcctgaagagcatggtcgtgggctgggtgaaggagatcacccagtaccacaacatctatgcagacaaccaggtgatgcacttctaccgctggcttcggtcgccatcctctctgcttcatgaccctgccctgcaccgcacactccacaacatgatgaagaagctcttcctgcagctcatcgctgagttcaagcgcctggggtcatcagtcatctacgccaacttcaaccgcatcatcctctgtacaaagaagcgccgtgtggaagatgccatcgcttacgtggagtacatcaccagcagcatccattcaaaggagaccttccattctctgacaatttctttctctcgatgctgggaatttcttctctggatggatccatctaactatggcggaatcaaaggaaaagtttcatctcgtattcactgtggactgcaagactcccagaaagcagggggagcagaggatgagcaggaaaatgaggacgatgaggaggaaagagatggggaggaggaggaagaggcggaggaatccaacgtggaggatttactggaaaacaactggaacattttgcagtttttgccacaggcagcctcctgccagaactacttcctcatgattgtttcagcgtacatcgtggccgtgtaccactgcatgaaggacgggctgaggcgcagtgctccagggagcacccccgtgaggaggaggggggccagccagctctcccaggaggccgagggggcggtcggagcccttcccggaatgatcaccttctctcaggattatgtcgcaaatgagctcactcagagcttcttcaccatcactcagaagattcagaagaaagtcacaggctctcggaactccactgagctctcagagatgtttcctgtcctccccggttcccacttgctgctcaataaccctgccctggagttcatcaaatacgtgtgcaaggtgctgtccctggacaccaacatcacaaaccaggtgaataagctgaaccgagacctgcttcgcctggtggatgtcggcgagttctccgaggaggcccagttccgagacccctgccgctcctacgtgcttcctgaggtcatctgccgcagctgtaacttctgccgcgacctggacctgtgtaaagactcttccttctcagaggatggggcggtcctgcctcagtggctctgctccaactgtcaggcgccctacgactcctctgccatcgagatgacgctggtggaagttctacagaagaagctgatggccttcaccctgcaggacctggtctgcctgaagtgccgcggggtgaaggagaccagcatgcctgtgtactgcagctgcgcgggagacttcgccctcaccatccacacccaggtcttcatggaacagatcggaatattccggaacattgcccagcactacggcatgtcgtacctcctggagaccctggagtggctgctgcagaagaacccacagctgggccattagccagccccgggccccgggtgcctctgcgtccgtgccaggcctcctgatgccaaggccacatccccgtgcttccagtgaccagaccactgaccaccctgactgtccaaacctgtgaccccaggccagggaacggggaggaaaccaaagaaaaccattttcagggagctcagacgtcacaggagggagcgggagcaggatgtggccctggcctcgccagagcacctgaagaagcaggccgtgagcgaggctgcgagtgccctgggcgccgtttctcacgcagtgaatgcttttccaggcctctgttgcttcctgcaccacacctggtggggtgggagcgtcctctaggtgcccctagttctttgtcctgcctcccagagggaggaaaagcccctgggggcttctggctccctgagattgggctctgagacgagacgggttcccaaggccctggtggggctggagtctcacctgtttgcatggagaaatgggctggccccacagcctcacaggagcagtttgtgggctggtttccccaggaatccagaccctaacccgtgagaatctggattttggcttgtgagccctgcttatttggagccgggtctagagggaaccctctatcagcctcaggaaaacaagacctctgtgcacctcacttttggctcactgcagcccttgtccttcacctccacacaggaccagctggaagcagaaagaagaaaggccaatttcacagggcaccaaacaagtatgaaatgtaaatcagaaatgcagacaccccagacgagagcctcacaggagggagggggccccacaggctccccaggaggctcgtgtctttggcccagagccagccttagtttgtccctgccatctactgtctgaggccatcgctgctacactttgtttttatttgtatttcatactgaagtttc

SEQ ID NO: 22999 - DNA, 6800 bp, Homo sapiens
  source 1..6800: mol_type = unassigned DNA
agccaacggctccatgtctctgaggagcggcgggcggcggcgcgcggacccaggcgcggatggcgaggccagcagggatgatggcgccacttcctcagtttcggcactcaagcgcctggaacggagtcagtggacggataagatggatttgcggtttggttttgagcggctgaaggagcctggtgagaagacaggctggctcattaacatgcatcctgtggctttgccctataaaccgtatttctacattgcgaccagaaagggttgtgagcgagaagtttcatcttttctctccaagaagtttcagggcaaaattgcaaaagtggagactgtccccaaagaggatctggacttgccaaatcacttggtgggtttgaagcgaaattacatcaggctgtccttccacactgtggaggatcttgtcaaagtgaggaaggagatctcccctgccgtgaagaagaacagggagcaggatcacgccagcgacgcgtacacagctctgctttccagtgttctgcagaggggcggtgtcattactgatgaagaggaaacctctaagaagatagctgaccagttggacaacattgtggacatgcgcgagtacgatgttccctaccacatccgcctctccattgacctgaagatccacgtggctcattggtacaatgtcagataccgaggaaatgcttttccggtagaaatcacccgccgagatgaccttgttgaacgacctgaccctgtggttttggcatttgacattgagacgaccaaactgcccctcaagtttcctgatgctgagacagaccagattatgatgatttcctacatgatcgatggccagggctacctcatcaccaacagggagattgtttcagaagatattgaagattttgagttcacccccaagccagaatatgaaggccccttttgtgtcttcaatgaacccgatgaggctcatctgatccaaaggtggtttgaacacgtccaggagaccaaacccaccatcatggtcacctacaacggggacttttttgactggccatttgtggaggcccgggcagcagtccacggtctgagcatgcagcaggagataggcttccagaaggacagccagggggagtacaaggcgccccagtgcatccacatggactgcctcaggtgggtgaagagggacagttaccttcctgtgggcagtcataatctcaaggcggccgccaaggccaagctaggctatgatcccgtggagctagacccggaggacatgtgccggatggccacggagcagccccagactctggccacgtattctgtgtcagatgctgtcgccacttactacctgtacatgaagtacgtccacccattcatctttgctctgtgcaccattattcccatggagcccgacgaggtgctgcggaagggctctggcactctgtgtgaggccttgctgatggtgcaggccttccacgccaacatcatcttccccaacaagcaagagcaggagttcaataagctgacggacgacggacacgtgctggactctgagacctacgtcgggggccacgtggaggccctcgagtctggggttttccgcagcgatatcccttgccggtttaggatgaatcctgccgcctttgacttcctgctgcagcgggttgagaagaccttgcgccacgcccttgaggaagaggagaaagtgcctgtggagcaagtcaccaactttgaagaggtgtgtgatgagattaagagcaagcttgcctccctgaaggacgttcccagccgcatcgagtgtccactcatctaccacctggacgtgggggccatgtaccccaacatcatcctgaccaaccgcctgcagccctctgccatggtggacgaagccacctgtgctgcctgtgacttcaataagcctggagcaaactgccagcggaagatggcctggcagtggaggggcgagttcatgccagccagtcgcagcgaataccatcggatccagcaccagctggagtcagagaagttcccccccttgttcccagaggggccagctcgggcctttcatgaactgtcccgcgaggaacaggcgaaatacgagaagagaaggctggcggattactgccggaaagcctacaagaagatccacatcaccaaggtggaagagcgtctcaccaccatctgccagcgggaaaactccttctacgtggacaccgtgcgtgccttccgggacaggcgttacgagttcaaagggctccacaaggtgtggaaaaagaagctctcggcggccgtggaggtgggcgacgcggctgaggtgaagcgctgcaagaacatggaggtgctgtatgactcgctgcagctggcccacaagtgcatcctgaactccttctatggctatgtcatgcgcaagggggctcgctggtactccatggagatggctggcatcgtctgcttcacaggggccaacatcatcacccaggcacgggagctgatcgagcagattgggaggcccttagagctggacacagatggtatatggtgcgtcctgcccaacagcttcccagaaaattttgtcttcaagacgaccaatgtgaagaagcccaaagtgaccatctcctacccaggcgccatgttgaacatcatggtcaaggaaggcttcaccaatgaccagtaccaggagctggctgagccgtcctcactcacctacgtcacccgctcagagaacagcatcttttttgaggttgatgggccctaccttgccatgattcttccagcctccaaggaagaaggcaagaaattgaagaagaggtatgctgtgttcaatgaagacggttctctggctgagctcaagggctttgaggtcaaacgccgcggggaactgcagctgattaagatcttccaatcctcggtgtttgaggccttcctcaagggcagcacgctggaagaggtgtatggctctgtagccaaggtggctgactactggctggacgtgctgtacagcaaggcagccaacatgcctgactctgagctattcgagctcatctctgagaaccgttccatgtctcggaagctggaagattacggggagcagaagtctacgtccatcagcacagcaaagcgcctggccgagttcctgggagaccagatggtcaaggatgcagggctgagttgccgctacatcatctcccgcaagcccgagggctcccctgtcacggagagggccatcccacttgccattttccaagcagagcccacggtgaggaagcactttctccggaaatggctcaagagctcttcccttcaagactttgatattcgagcaattctggattgggactactacattgagcggctgggaagcgccatccagaagatcatcaccatccctgcggccctgcagcaggtaaagaacccagtgccacgtgtcaaacaccccgactggctgcacaaaaaactgctggagaagaatgatgtctacaagcagaagaagatcagtgagctcttcaccctggagggcaggagacaggtcacgatggccgaggcctcagaagacagtccgaggccaagtgctcctgacatggaggacttcggcctcgtaaagctgcctcacccagcagcccctgtcactgtgaagaggaagcgagttctttgggagagccaggaggagtcccaggacctcacgccgactgtgccctggcaggaaatcttggggcagcctcccgccctgggaaccagccaggaggaatggcttgtctggctccggttccacaagaagaagtggcagctgcaggcccggcagcgcctcgcccgcaggaagaggcagcgtctggagtcggcagagggtgtgctcaggcccggggccatccgggatggtcctgccacggggctggggagcttcttgcgaagaactgcccgcagcatcctggaccttccgtggcagattgtgcagatcagcgagaccagccaggccggcctgttcaggctgtgggcgctcgttggcagtgacttgcactgcatcaggctgagcatcccccgtgtgttctacgtgaaccagcgagtcgctaaagcggaggagggtgcttcgtatcgcaaggtaaatcgggtccttcctcgctccaacatggtctacaatctctatgagtattcagtgccagaggacatgtaccaggaacacatcaacgagatcaacgctgagctgtcagcgccagacatcgagggcgtatatgagactcaggttccgttactgttccgggccctggtgcacctgggctgtgtgtgtgtggtcaataaacagctggtgaggcacctttcaggctgggaagcagagacctttgctcttgagcacctggagatgcgctctctggcccagttcagctacctggaaccagggagtatccgccatatctacctgtaccaccacgcacaggcccacaaagcgctcttcgggatcttcatcccctcacagcgcagggcatccgtctttgtgctggacactgtgcgcagcaaccagatgcccagccttggcgccctgtactcagcagagcacggcctcctcctggagaaggtgggccctgagctcctgccaccccccaaacacaccttcgaagttcgggcagaaactgacctgaagaccatctgcagagccatccagcgattcctgctcgcctacaaggaggagcgccgggggcccacactcatcgctgttcagtccagctgggagctgaagaggctggccagtgaaattcctgtcttggaggaattcccactggtgcctatctgtgtggctgacaagatcaactatggggtcctggactggcagcgccatggagcccggcgcatgatccgtcactacctcaacctggacacctgcctgtcgcaggccttcgagatgagcaggtactttcacattcccattgggaacctaccagaggacatctccacattcggctccgacctcttctttgcccgccacctccagcgccacaaccacctgctctggctgtcccctacagcccgccctgacctgggtggaaaggaggctgatgacaactgtcttgtcatggagttcgatgaccaagccactgttgagatcaacagttcaggctgttactccacagtgtgtgtggagctggaccttcagaacctggccgtcaacaccattctccagtctcaccatgtcaacgacatggagggggccgacagcatggggatcagcttcgacgtgatccagcaggcctccctggaggacatgatcacgggtggtcaggctgccagtgccccggccagctacgatgagacagccctgtgctctaacaccttcaggatcctgaagagcatggtcgtgggctgggtgaaggagatcacccagtaccacaacatctatgcagacaaccaggtgatgcacttctaccgctggcttcggtcgccatcctctctgcttcatgaccctgccctgcaccgcacactccacaacatgatgaagaagctcttcctgcagctcatcgctgagttcaagcgcctggggtcatcagtcatctacgccaacttcaaccgcatcatcctctgtacaaagaagcgccgtgtggaagatgccatcgcttacgtggagtacatcaccagcagcatccattcaaaggagaccttccattctctgacaatttctttctctcgatgctgggaatttcttctctggatggatccatctaactatggcggaatcaaaggaaaagtttcatctcgtattcactgtggactgcaagactcccagaaagcagggggagcagaggatgagcaggaaaatgaggacgatgaggaggaaagagatggggaggaggaggaagaggcggaggaatccaacgtggaggatttactggaaaacaactggaacattttgcagtttttgccacaggcagcctcctgccagaactacttcctcatgattgtttcagcgtacatcgtggccgtgtaccactgcatgaaggacgggctgaggcgcagtgctccagggagcacccccgtgaggaggaggggggccagccagctctcccaggaggccgagggggcggtcggagcccttcccggaatgatcaccttctctcaggattatgtcgcaaatgagctcactcagagcttcttcaccatcactcagaagattcagaagaaagtcacaggctctcggaactccactgagctctcagagatgtttcctgtcctccccggttcccacttgctgctcaataaccctgccctggagttcatcaaatacgtgtgcaaggtgctgtccctggacaccaacatcacaaaccaggtgaataagctgaaccgagacctgcttcgcctggtggatgtcggcgagttctccgaggaggcccagttccgagacccctgccgctcctacgtgcttcctgaggtcatctgccgcagctgtaacttctgccgcgacctggacctgtgtaaagactcttccttctcagaggatggggcggtcctgcctcagtggctctgctccaactgtcaggcgccctacgactcctctgccatcgagatgacgctggtggaagttctacagaagaagctgatggccttcaccctgcaggacctggtctgcctgaagtgccgcggggtgaaggagaccagcatgcctgtgtactgcagctgcgcgggagacttcgccctcaccatccacacccaggtcttcatggaacagatcggaatattccggaacattgcccagcactacggcatgtcgtacctcctggagaccctggagtggctgctgcagaagaacccacagctgggccattagccagccc

SEQ ID NO: 23000 - DNA, 1776 bp, Homo sapiens
  source 1..1776: mol_type = unassigned DNA
taacagggtttagcgccacgcgggccagggccgaggccggagctgggaggggcgcgcccgggaaggggcggagctgcggcggtggcgccaaatcgcaaatatggcgccggagcggctgcggagccgggcgctctccgccttcaagttgcggggcttgctgctccgtggtgaagctattaagtacctcacagaagctcttcagtctatcagtgaattagagcttgaagataaactggaaaagataattaatgcagttgagaagcaacccttgtcatcaaacatgattgaacgatctgtggtggaagcagcagtccaggaatgcagtcagtctgttgatgaaactatagagcacgttttcaatatcataggagcatttgatattccacgctttgtgtacaattcagaaagaaaaaaatttcttcctctgttaatgaccaaccaccctgcaccaaatttatttggaacaccaagagataaagcagagatgtttcgtgagcgatataccattttgcaccagaggacccacaggcatgaattatttactcctccggtgataggttctcaccctgatgaaagcggaagcaaattccagcttaaaacaatagaaaccttattgggtagtacaaccaaaatcggagatgcgattgttcttggaatgataacgcagttaaaagagggaaaattttttctggaagatcctactggaacagtccaactagaccttagtaaagctcagttccatagtggtttatacacagaggcatgctttgtcttagcagaaggttggtttgaagatcaagtgtttcatgtcaatgcctttggatttccacccactgagccctctagtactactagggcatactatggaaatattaatttttttggaggtccttctaatacatctgtgaagacttctgcaaaactaaaacagctagaagaggagaataaagatgctatgtttgtgtttttatctgatgtttggttggaccaggtggaagtattggaaaaacttcgcataatgtttgctggttattcaccagcacctccaacctgctttattctgtgtggtaatttttcatctgcaccatatggaaaaaatcaagttcaagctttgaaagattccctaaaaactttggcagatataatatgtgaatacccagatattcaccaaagtagtcgttttgtgtttgtacctggtccagaggatcctggatttggttccatcttaccaaggccaccacttgctgaaagcatcactaatgaattcagacaaagggtaccattttcagtttttactactaatccttgcagaattcagtactgtacacaggaaattactgtcttccgtgaagacttagtaaataaaatgtgcagaaactgcgtccgttttcctagcagcaatttggctattcctaatcactttgtaaagactatcttatcccaaggacatctgactcccctacctctttatgtctgcccagtgtattgggcatatgactatgctttgagagtgtatcctgtgcccgatctacttgtcattgcagacaaatatgatcctttcactacgacaaataccgaatgcctctgcataaaccctggctcttttccaagaagtggattttcattcaaagttttttatccttctaataagacagtagaagatagcaaacttcaaggcttttgagattcttaaagatcatctgaagaaaattcatcagttttctgcttaactctatatcttatgtgattctgatattacaataaaattatggtaaa

SEQ ID NO: 23001 - DNA, 1792 bp, Homo sapiens
  source 1..1792: mol_type = unassigned DNA
agtttcccggcagcaaaggagcgcgaggtggtctccactttcagcctactcggtccggggttgcgaactgtaaggtctgagttgctgcggcgcaggcagcggagaccaagcagggatcttaacagggtttagcgccacgcgggccagggccgaggccggagctgggaggggcgcgcccgggaaggggcggagctgcggcggtggcgccaaatcgcaaatatggcgccggagcggctgcggagccgggcgctctccgccttcaagttgcggggcttgctgctccgtggtgaagctattaagtacctcacagaagctcttcagtctatcagtgaattagagcttgaagataaactggaaaagataattaatgcagttgagaagcaacccttgtcatcaaacatgattgaacgatctgtggtggaagcagcagtccaggaatgcagtcagtctgttgatgaaactattctgttaatgaccaaccaccctgcaccaaatttatttggaacaccaagagataaagcagagatgtttcgtgagcgatataccattttgcaccagaggacccacaggcatgaattatttactcctccggtgataggttctcaccctgatgaaagcggaagcaaattccagcttaaaacaatagaaaccttattgggtagtacaaccaaaatcggagatgcgattgttcttggaatgataacgcagttaaaagagggaaaattttttctggaagatcctactggaacagtccaactagaccttagtaaagctcagttccatagtggtttatacacagaggcatgctttgtcttagcagaaggttggtttgaagatcaagtgtttcatgtcaatgcctttggatttccacccactgagccctctagtactactagggcatactatggaaatattaatttttttggaggtccttctaatacatctgtgaagacttctgcaaaactaaaacagctagaagaggagaataaagatgctatgtttgtgtttttatctgatgtttggttggaccaggtggaagtattggaaaaacttcgcataatgtttgctggttattcaccagcacctccaacctgctttattctgtgtggtaatttttcatctgcaccatatggaaaaaatcaagttcaagctttgaaagattccctaaaaactttggcagatataatatgtgaatacccagatattcaccaaagtagtcgttttgtgtttgtacctggtccagaggatcctggatttggttccatcttaccaaggccaccacttgctgaaagcatcactaatgaattcagacaaagggtaccattttcagtttttactactaatccttgcagaattcagtactgtacacaggaaattactgtcttccgtgaagacttagtaaataaaatgtgcagaaactgcgtccgttttcctagcagcaatttggctattcctaatcactttgtaaagactatcttatcccaaggacatctgactcccctacctctttatgtctgcccagtgtattgggcatatgactatgctttgagagtgtatcctgtgcccgatctacttgtcattgcagacaaatatgatcctttcactacgacaaataccgaatgcctctgcataaaccctggctcttttccaagaagtggattttcattcaaagttttttatccttctaataagacagtagaagatagcaaacttcaaggcttttgagattcttaaagatcatctgaagaaaattcatcagttttctgcttaactctatatcttatgtgattct

SEQ ID NO: 23002 - DNA, 1581 bp, Homo sapiens
  source 1..1581: mol_type = unassigned DNA
cgcaaatatggcgccggagcggctgcggagccgggcgctctccgccttcaagttgcggggcttgctgctccgtggtgaagctattaagtacctcacagaagctcttcagtctatcagtgaattagagcttgaagataaactggaaaagataattaatgcagttgagaagcaacccttgtcatcaaacatgattgaacgatctgtggtggaagcagcagtccaggaatgcagtcagtctgttgatgaaactatagagcacgttttcaatatcataggagcatttgatattccacgctttgtgtacaattcagaaagaaaaaaatttcttcctctgttaatgaccaaccaccctgcaccaaatttatttggaacaccaagagataaagcagagatgtttcgtgagcgatataccattttgcaccagaggacccacaggcatgaattatttactcctccggtgataggttctcaccctgatgaaagcggaagcaaattccagcttaaaacaatagaaaccttattgggtagtacaaccaaaatcggagatgcgattgttcttggaatgataacgcagttaaaagagggaaaattttttctggaagatcctactggaacagtccaactagaccttagtaaagctcagttccatagtggtttatacacagaggcatgctttgtcttagcagaaggttggtttgaagatcaagtgtttcatgtcaatgcctttggatttccacccactgagccctctagtactactagggcatactatggaaatattaatttttttggaggtccttctaatacatctgtgaagacttctgcaaaactaaaacagctagaagaggagaataaagatgctatgtttgtgtttttatctgatgtttggttggaccaggtggaagtattggaaaaacttcgcataatgtttgctggttattcaccagcacctccaacctgctttattctgtgtggtaatttttcatctgcaccatatggaaaaaatcaagttcaagctttgaaagattccctaaaaactttggcagatataatatgtgaatacccagatattcaccaaagtagtcgttttgtgtttgtacctggtccagaggatcctggatttggttccatcttaccaaggccaccacttgctgaaagcatcactaatgaattcagacaaagggtaccattttcagtttttactactaatccttgcagaattcagtactgtacacaggaaattactgtcttccgtgaagacttagtaaataaaatgtgcagaaactgcgtccgttttcctagcagcaatttggctattcctaatcactttgtaaagactatcttatcccaaggacatctgactcccctacctctttatgtctgcccagtgtattgggcatatgactatgctttgagagtgtatcctgtgcccgatctacttgtcattgcagacaaatatgatcctttcactacgacaaataccgaatgcctctgcataaaccctgtaagaatgtagttaatcttatatagtcattatttatcaagattagagtgcattttttaatttaaaaatatatattt

SEQ ID NO: 23003 - DNA, 2109 bp, Homo sapiens
  source 1..2109: mol_type = unassigned DNA
gcagggtcagaccgtagcgacgcgggaagtccggacgcagtagctccctgaagcggaggcgaaggggagtttaagccccagcggcggcaatggcggagaggcccgaggacctaaacctgcccaatgccgtgatcaccaggatcatcaaggaggcgctcccggacggtgtcaacatctccaaggaggcccggagcgccatctcccgcgccgccagcgtcttcgtgctgtacgccacatcctgtgctaacaactttgcaatgaaaggaaagcggaagacgctgaatgccagtgatgtgctctcagccatggaagagatggagttccagcggttcgttaccccattgaaagaagctctggaagcatataggcgggagcagaaaggcaagaaggaggcctcagagcaaaagaagaaggacaaagacaaaaaaacagactcggaagagcaagacaagagcagggatgaggacaatgatgaagacgaagaaaggctggaagaagaagaacagaatgaagaggaagaagtagacaactgaaaagggcgggagactgtggcaccttggaaggtaccacttgaaatgagacgtgctacgtgtttctgtgaagcttttccatgctgggcagagtagtctcaggcaaaagtgcctgaaaagatcagaataaaaactgactagaaataccgtcaaaaccagcacttaccaaactcagagcatctgagtagcagaatcctgttttgcttcatcaatctgaaggttatggccttttgacaagagggattctgaacgactaaattagtcagtttgctcgcttttgtttacttaaatgtatggttagatggtttttgatctgcagtcttccctagtcccccaaataagtaataataacttccatgctgcctgctgtgttccagatcacagaggcagccaaggctcaggaaaaactggggctttgcttatggtcagcctatgtttgattgcacagtctttgacaatagtagcttactaagactgctcagaatgagtaagctttaggaaactactaaaatgctgtgggagaataacaaaatccgttctctctcttcacttgacagaagcattaactgaattttgtttttcatagacccacttggcccaaaacctttctatattgcctgtagatgatcggcctgctggtgtggtagtaatctgatcacagatattcttaaatcagcagtgtggaatggtattagtcaaacatggtgccagtgtcttttacaaaaacagatggcatagtgtcagatgtaccttactctctgctactgtacagctttaggatttgtcatcacctcccggaaggtgtaaaaccccaggcttcctcttcttgtagtccatctcccagacttgtgactatggcttttcattcttcaattcatgacgagtgccaaacttgattttctctaggcacagctttctccctctgtgcctcctgcttcctttctctctcctgcctctcctctgctccccatcccactttctcatctgcctccttttctcacttctgtcagtctgtaagctttgataacctgcttaatactccaaagtgtgagttcctctgatctcttgattccttagttctaatctcacgttttgtttttaagagatggagtctctcactctgtggcccaggctggagtgcagtggcatgatcatagctcattgcatccttgaaatcctgggctcaggtgatcctcccgcctgagcctcctgagtatctgggactacagatgcgtgccaccaagcctggctaattttgtctcatgtcttctaaaaattattttgtgaagccccttcacaaaaaaccttaagggaaatctgatggtgctcaggaatctaactctccctaaaccatcctctttaactgcttctaaaatatctctgttggcctttcttagcctttttctgtttccattcagtgctccaagcgctttttgtttctaagttgagtgcttggggtttgacaggtagtgacgtgtagtttgacactgttaacttgttaaatacagtgaaaagtttgtgagtgaagaatgctgagaagattgtaatgctttgtacaaataaaagtcttgttaaaaaa

SEQ ID NO: 23004 - DNA, 2191 bp, Homo sapiens
  source 1..2191: mol_type = unassigned DNA
agcggcgcagggcaccatgggaaacggacggaagctccattgagccaaataagttggccacgtggggcggaacggaaacctcgcagggtcagaccgtagcgacgcgggaagtccggacgcagtagctccctgaagcggaggcgaaggggagtttaagccccagcggcggcaatggcggagaggcccgaggacctaaacctgcccaatgccgtgatcaccaggatcatcaaggaggcgctcccggacggtgtcaacatctccaaggaggcccggagcgccatctcccgcgccgccagcgtcttcgtgctgtacgccacatcctgtgctaacaactttgcaatgaaaggaaagcggaagacgctgaatgccagtgatgtgctctcagccatggaagagatggagttccagcggttcgttaccccattgaaagaagctctggaagcatataggcgggagcagaaaggcaagaaggaggcctcagagcaaaagaagaaggacaaagacaaaaaaacagactcggaagagcaagacaagagcagggatgaggacaatgatgaagacgaagaaaggctggaagaagaagaacagaatgaagaggaagaagtagacaactgaaaagggcgggagactgtggcaccttggaaggtaccacttgaaatgagacgtgctacgtgtttctgtgaagcttttccatgctgggcagagtagtctcaggcaaaagtgcctgaaaagatcagaataaaaactgactagaaataccgtcaaaaccagcacttaccaaactcagagcatctgagtagcagaatcctgttttgcttcatcaatctgaaggttatggccttttgacaagagggattctgaacgactaaattagtcagtttgctcgcttttgtttacttaaatgtatggttagatggtttttgatctgcagtcttccctagtcccccaaataagtaataataacttccatgctgcctgctgtgttccagatcacagaggcagccaaggctcaggaaaaactggggctttgcttatggtcagcctatgtttgattgcacagtctttgacaatagtagcttactaagactgctcagaatgagtaagctttaggaaactactaaaatgctgtgggagaataacaaaatccgttctctctcttcacttgacagaagcattaactgaattttgtttttcatagacccacttggcccaaaacctttctatattgcctgtagatgatcggcctgctggtgtggtagtaatctgatcacagatattcttaaatcagcagtgtggaatggtattagtcaaacatggtgccagtgtcttttacaaaaacagatggcatagtgtcagatgtaccttactctctgctactgtacagctttaggatttgtcatcacctcccggaaggtgtaaaaccccaggcttcctcttcttgtagtccatctcccagacttgtgactatggcttttcattcttcaattcatgacgagtgccaaacttgattttctctaggcacagctttctccctctgtgcctcctgcttcctttctctctcctgcctctcctctgctccccatcccactttctcatctgcctccttttctcacttctgtcagtctgtaagctttgataacctgcttaatactccaaagtgtgagttcctctgatctcttgattccttagttctaatctcacgttttgtttttaagagatggagtctctcactctgtggcccaggctggagtgcagtggcatgatcatagctcattgcatccttgaaatcctgggctcaggtgatcctcccgcctgagcctcctgagtatctgggactacagatgcgtgccaccaagcctggctaattttgtctcatgtcttctaaaaattattttgtgaagccccttcacaaaaaaccttaagggaaatctgatggtgctcaggaatctaactctccctaaaccatcctctttaactgcttctaaaatatctctgttggcctttcttagcctttttctgtttccattcagtgctccaagcgctttttgtttctaagttgagtgcttggggtttgacaggtagtgacgtgtagtttgacactgttaacttgttaaatacagtgaaaagtttgtgagtgaagaatgctgagaagattgtaatgctttgtacaaataaaagtcttgttaaaaaa

SEQ ID NO: 23005 - DNA, 3322 bp, Homo sapiens
  source 1..3322: mol_type = unassigned DNA
ataaatctcgctcgaaactcactggaccgctcctagaaaggcgaaaagatattcaggagcccttccattttccttccagtaggcaccgaacccagcattttcggcaaccgctgctggcagttttgccaggtgtttgttaccttgaaaaatggctactggacaggatcgagtggttgctctcgtggacatggactgtttttttgttcaagtggagcagcggcaaaatcctcatttgaggaataaaccttgtgcagttgtacagtacaaatcatggaagggtggtggaataattgcagtgagttatgaagctcgtgcatttggagtcactagaagtatgtgggcagatgatgctaagaagttatgtccagatcttctactggcacaagttcgtgagtcccgtgggaaagctaacctcaccaagtaccgggaagccagtgttgaagtgatggagataatgtctcgttttgctgtgattgaacgtgccagcattgatgaggcttacgtagatctgaccagtgctgtacaagagagactacaaaagctacaaggtcagcctatctcggcagacttgttgccaagcacttacattgaagggttgccccaaggccctacaacggcagaagagactgttcagaaagaggggatgcgaaaacaaggcttatttcaatggctcgattctcttcagattgataacctcacctctccagacctgcagctcaccgtgggagcagtgattgtggaggaaatgagagcagccatagagagggagactggttttcagtgttcagctggaatttcacacaataaggtcctggcaaaactggcctgtggactaaacaagcccaaccgccaaaccctggtttcacatgggtcagtcccacagctcttcagccaaatgcccattcgcaaaatccgtagtcttggaggaaagctaggggcctctgtcattgagatcctagggatagaatacatgggtgaactgacccagttcactgaatcccagctccagagtcattttggggagaagaatgggtcttggctatatgccatgtgccgagggattgaacatgatccagttaaacccaggcaactacccaaaaccattggctgtagtaagaacttcccaggaaaaacagctcttgctactcgggaacaggtacaatggtggctgttgcaattagcccaggaactagaggagagactgactaaagaccgaaatgataatgacagggtagccacccagctggttgtgagcattcgtgtacaaggagacaaacgcctcagcagcctgcgccgctgctgtgcccttacccgctatgatgctcacaagatgagccatgatgcatttactgtcatcaagaactgtaatacttctggaatccagacagaatgacatcaccagcttcttgagcagtgacccaagttctctgccaaaggtgccagttaccagctcagaagctaagacccagggaagtggcccagcggtgacagccactaagaaagcaaccacgtctctggaatcattcttccaaaaagctgcagaaaggcagaaagttaaagaagcttcgctttcatctcttactgctcccactcaggctcccatgagcaattcaccatccaagccctcattaccttttcaaaccagtcaaagtacaggaactgagcccttctttaagcagaaaagtctgcttctaaagcagaaacagcttaataattcttcagtttcttccccccaacaaaacccatggtccaactgtaaagcattaccaaactctttaccaacagagtatccagggtgtgtccctgtttgtgaaggggtgtcgaagctagaagaatcctctaaagcaactcctgcagagatggatttggcccacaacagccaaagcatgcacgcctcttcagcttccaaatctgtgctggaggtgactcagaaagcaaccccaaatccaagtcttctagctgctgaggaccaagtgccctgtgagaagtgtggctccctggtaccggtatgggatatgccagaacacatggactatcattttgcattggagttgcagaaatcctttttgcagccccactcttcaaacccccaggttgtttctgccgtatctcatcaaggcaaaagaaatcccaagagccctttggcctgcactaataaacgccccaggcctgagggcatgcaaacattggaatcattttttaagccattaacacattagtgctgccctcaggcttgcctgtaggatttaatattttttatctttacagatctttatctttaatattttatctttacagatttccctgagaaagggaattatgaaatttttaatacaaaaaataatccatttaggtgctgagttacggtcccatctcttcacaggcatggattctaatcccactgctgacagagatgtaaaaattcatcctaccagagtttttaatctttagcatttagggaggcagtgtcataaagtaaaaagtgtgtgggccttggagtctaagagacgtggttgcaaacttagctctggttattgcaatgagggccttgaacaagtcattttcttcacattctcatctgtaaaatggagataataccttacagattattgcagattaataacaatgtattcaaattatgtaactcggccgggtacaatggctcacgcctgtaatcctaacactttgggaggccgaggcagacagatcacctgaggtcaggagtttgagaccagcctggccaacatggcaaaaccatctctactaaaaatagaaaaattagccaggcacgttccaggcacctgtgatcccagctacttagaggctgaggcagaagaattgctttaaccttggaggcggaggttgcattgagctgagatcatgctagtgcgctccagcctgggcaacagagcgagacttcatctcagaaaataaaaaataggggccaggcacagtggctcatacctgtaatgccagcactttgggaggccaaggcgggcagatcacgaggtcaggagtttcagaccaatatggtgaaaccccatctctactaaaattacaaaaaaaattatccaggcgtggtggtgcacgcctgtaatcccagctactcaggaggctaaggcaggagaatcacttgaacccaggaggcagaggttggagtgagctgagatcgcgccaccgcactccagcctgggcaacagagcgagactccatctcaaacaaaaacaagaacaaaaacaaacataaagttggcacagaaaagggaccaagtttaaaaaagggttttaaatgtaatgagacttgcatagttaaaaaaaaaaaa

SEQ ID NO: 23006 - DNA, 3540 bp, Homo sapiens
  source 1..3540: mol_type = unassigned DNA
aacggcccttcgcagcgggcgcgctgtcagacctcagtctggcggctgcattgctgggcgcgccgctctcgtctgatccctgctggggacggttgcccgggcaggatcctttacgatcccttctcggtttctccgtcgtcacagggaataaatctcgctcgaaactcactggaccgctcctagaaaggcgaaaagatattcaggagcccttccattttccttccagtaggcaccgaacccagcattttcggcaaccgctgctggcagttttgccaggtgtttgttaccttgaaaaatggctactggacaggatcgagtggttgctctcgtggacatggactgtttttttgttcaagtggagcagcggcaaaatcctcatttgaggaataaaccttgtgcagttgtacagtacaaatcatggaagggtggtggaataattgcagtgagttatgaagctcgtgcatttggagtcactagaagtatgtgggcagatgatgctaagaagttatgtccagatcttctactggcacaagttcgtgagtcccgtgggaaagctaacctcaccaagtaccgggaagccagtgttgaagtgatggagataatgtctcgttttgctgtgattgaacgtgccagcattgatgaggcttacgtagatctgaccagtgctgtacaagagagactacaaaagctacaaggtcagcctatctcggcagacttgttgccaagcacttacattgaagggttgccccaaggccctacaacggcagaagagactgttcagaaagaggggatgcgaaaacaaggcttatttcaatggctcgattctcttcagattgataacctcacctctccagacctgcagctcaccgtgggagcagtgattgtggaggaaatgagagcagccatagagagggagactggttttcagtgttcagctggaatttcacacaataaggtcctggcaaaactggcctgtggactaaacaagcccaaccgccaaaccctggtttcacatgggtcagtcccacagctcttcagccaaatgcccattcgcaaaatccgtagtcttggaggaaagctaggggcctctgtcattgagatcctagggatagaatacatgggtgaactgacccagttcactgaatcccagctccagagtcattttggggagaagaatgggtcttggctatatgccatgtgccgagggattgaacatgatccagttaaacccaggcaactacccaaaaccattggctgtagtaagaacttcccaggaaaaacagctcttgctactcgggaacaggtacaatggtggctgttgcaattagcccaggaactagaggagagactgactaaagaccgaaatgataatgacagggtagccacccagctggttgtgagcattcgtgtacaaggagacaaacgcctcagcagcctgcgccgctgctgtgcccttacccgctatgatgctcacaagatgagccatgatgcatttactgtcatcaagaactgtaatacttctggaatccagacagaatggtctcctcctctcacaatgcttttcctctgtgctacaaaattttctgcctctgccccttcatcttctacagacatcaccagcttcttgagcagtgacccaagttctctgccaaaggtgccagttaccagctcagaagctaagacccagggaagtggcccagcggtgacagccactaagaaagcaaccacgtctctggaatcattcttccaaaaagctgcagaaaggcagaaagttaaagaagcttcgctttcatctcttactgctcccactcaggctcccatgagcaattcaccatccaagccctcattaccttttcaaaccagtcaaagtacaggaactgagcccttctttaagcagaaaagtctgcttctaaagcagaaacagcttaataattcttcagtttcttccccccaacaaaacccatggtccaactgtaaagcattaccaaactctttaccaacagagtatccagggtgtgtccctgtttgtgaaggggtgtcgaagctagaagaatcctctaaagcaactcctgcagagatggatttggcccacaacagccaaagcatgcacgcctcttcagcttccaaatctgtgctggaggtgactcagaaagcaaccccaaatccaagtcttctagctgctgaggaccaagtgccctgtgagaagtgtggctccctggtaccggtatgggatatgccagaacacatggactatcattttgcattggagttgcagaaatcctttttgcagccccactcttcaaacccccaggttgtttctgccgtatctcatcaaggcaaaagaaatcccaagagccctttggcctgcactaataaacgccccaggcctgagggcatgcaaacattggaatcattttttaagccattaacacattagtgctgccctcaggcttgcctgtaggatttaatattttttatctttacagatctttatctttaatattttatctttacagatttccctgagaaagggaattatgaaatttttaatacaaaaaataatccatttaggtgctgagttacggtcccatctcttcacaggcatggattctaatcccactgctgacagagatgtaaaaattcatcctaccagagtttttaatctttagcatttagggaggcagtgtcataaagtaaaaagtgtgtgggccttggagtctaagagacgtggttgcaaacttagctctggttattgcaatgagggccttgaacaagtcattttcttcacattctcatctgtaaaatggagataataccttacagattattgcagattaataacaatgtattcaaattatgtaactcggccgggtacaatggctcacgcctgtaatcctaacactttgggaggccgaggcagacagatcacctgaggtcaggagtttgagaccagcctggccaacatggcaaaaccatctctactaaaaatagaaaaattagccaggcacgttccaggcacctgtgatcccagctacttagaggctgaggcagaagaattgctttaaccttggaggcggaggttgcattgagctgagatcatgctagtgcgctccagcctgggcaacagagcgagacttcatctcagaaaataaaaaataggggccaggcacagtggctcatacctgtaatgccagcactttgggaggccaaggcgggcagatcacgaggtcaggagtttcagaccaatatggtgaaaccccatctctactaaaattacaaaaaaaattatccaggcgtggtggtgcacgcctgtaatcccagctactcaggaggctaaggcaggagaatcacttgaacccaggaggcagaggttggagtgagctgagatcgcgccaccgcactccagcctgggcaacagagcgagactccatctcaaacaaaaacaagaacaaaaacaaacataaagttggcacagaaaagggaccaagtttaaaaaagggttttaaatgtaatgagacttgcatagttaaaaaaaaaaaa

SEQ ID NO: 23007 - DNA, 331 bp, Homo sapiens
  source 1..331: mol_type = unassigned DNA
agtaggcaccgaacccagcattttcggcaaccgctgctggcagttttgccaggtgtttgttaccttgaataattgcagtgagttatgaagctcgtgcatttggagtcactagaagtatgtgggcagatgatgctaagaagttatgtccagatcttctactggcacaagttcgtgagtcccgtgggaaagctaacctcaccaagtaccgggaagccagtgttgaagtgatggagataatgtctcgttttgctgtgattgaacgtgccagcattgatgaggcttacgtagatctgaccagtgctgtacaagagagactacaaaagctacaagg

SEQ ID NO: 23008 - DNA, 2548 bp, Homo sapiens
  source 1..2548: mol_type = unassigned DNA
agtctggcggctgcattgctgggcgcgccgctctcgtctgatccctgctggggacggttgcccgggcaggatcctttacgatcccttctcggtttctccgtcgtcacagggaataaatctcgctcgaaactcactggaccgctcctagaaaggcgaaaagatattcaggagcccttccattttccttccagtaggcaccgaacccagcattttcggcaaccgctgctggcagttttgccaggtgtttgttaccttgaataattgcagtgagttatgaagctcgtgcatttggagtcactagaagtatgtgggcagatgatgctaagaagttatgtccagatcttctactggcacaagttcgtgagtcccgtgggaaagctaacctcaccaagtaccgggaagccagtgttgaagtgatggagataatgtctcgttttgctgtgattgaacgtgccagcattgatgaggcttacgtagatctgaccagtgctgtacaagagagactacaaaagctacaaggtcagcctatctcggcagacttgttgccaagcacttacattgaagggttgccccaaggccctacaacggcagaagagactgttcagaaagaggggatgcgaaaacaaggcttatttcaatggctcgattctcttcagattgataacctcacctctccagacctgcagctcaccgtgggagcagtgattgtggaggaaatgagagcagccatagagagggagactggttttcagtgttcagctggaatttcacacaataaggtcctggcaaaactggcctgtggactaaacaagcccaaccgccaaaccctggtttcacatgggtcagtcccacagctcttcagccaaatgcccattcgcaaaatccgtagtcttggaggaaagctaggggcctctgtcattgagatcctagggatagaatacatgggtgaactgacccagttcactgaatcccagctccagagtcattttggggagaagaatgggtcttggctatatgccatgtgccgagggattgaacatgatccagttaaacccaggcaactacccaaaaccattggctgtagtaagaacttcccaggaaaaacagctcttgctactcgggaacaggtacaatggtggctgttgcaattagcccaggaactagaggagagactgactaaagaccgaaatgataatgacagggtagccacccagctggttgtgagcattcgtgtacaaggagacaaacgcctcagcagcctgcgccgctgctgtgcccttacccgctatgatgctcacaagatgagccatgatgcatttactgtcatcaagaactgtaatacttctggaatccagacagaatggtctcctcctctcacaatgcttttcctctgtgctacaaaattttctgcctctgccccttcatcttctacagacatcaccagcttcttgagcagtgacccaagttctctgccaaaggtgccagttaccagctcagaagctaagacccagggaagtggcccagcggtgacagccactaagaaagcaaccacgtctctggaatcattcttccaaaaagctgcagaaaggcagaaagttaaagaagcttcgctttcatctcttactgctcccactcaggctcccatgagcaattcaccatccaagccctcattaccttttcaaaccagtcaaagtacaggaactgagcccttctttaagcagaaaagtctgcttctaaagcagaaacagcttaataattcttcagtttcttccccccaacaaaacccatggtccaactgtaaagcattaccaaactctttaccaacagagtatccagggtgtgtccctgtttgtgaaggggtgtcgaagctagaagaatcctctaaagcaactcctgcagagatggatttggcccacaacagccaaagcatgcacgcctcttcagcttccaaatctgtgctggaggtgactcagaaagcaaccccaaatccaagtcttctagctgctgaggaccaagtgccctgtgagaagtgtggctccctggtaccggtatgggatatgccagaacacatggactatcattttgcattggagttgcagaaatcctttttgcagccccactcttcaaacccccaggttgtttctgccgtatctcatcaaggcaaaagaaatcccaagagccctttggcctgcactaataaacgccccaggcctgagggcatgcaaacattggaatcattttttaagccattaacacattagtgctgccctcaggcttgcctgtaggatttaatattttttatctttacagatctttatctttaatattttatctttacagatttccctgagaaagggaattatgaaatttttaatacaaaaaataatccatttaggtgctgagttacggtcccatctcttcacaggctggtcttgaactcttgatctcaagtgatccacccgccctggcctcccaaagtgctgggattacaggcctgagccaccaggccagccccaacttctactttttattttatttataaattggg

SEQ ID NO: 23009 - DNA, 4502 bp, Homo sapiens
  source 1..4502: mol_type = unassigned DNA
gtagccgcgggacctagctgggtgcagacgggaagttgcggctgccagcgaagcggaccggccgggtggaggccacacgctaccccgaggctgcgtaggccgcgcgaagggggacgccgtgccgtgggcctggggtcgggggagcagcagaccgggaagcaccgtgaggaccgaggatttggggtggaaggcaggcatggtcaaacccatttcactgacaggagagcagagacaggacgtgtctctctccacgtcttccagccagtaaaagaagccaagctggagcccaaagccaggtgttctgactcccagcgtgggggtccctgcaccaaccatgagccgcctgctctggaggaaggtggccggcgccaccgtcgggccagggccggttccagctccggggcgctgggtctccagctccgtccccgcgtccgaccccagcgacgggcagcggcggcggcagcagcagcagcagcagcagcagcagcagcaacagcagcctcagcagccgcaagtgctatcctcggagggcgggcagctgcggcacaacccattggacatccagatgctctcgagagggctgcacgagcaaatcttcgggcaaggaggggagatgcctggcgaggccgcggtgcgccgcagcgtcgagcacctgcagaagcacgggctctgggggcagccagccgtgcccttgcccgacgtggagctgcgcctgccgcccctctacggggacaacctggaccagcacttccgcctcctggcccagaagcagagcctgccctacctggaggcggccaacttgctgttgcaggcccagctgcccccgaagcccccggcttgggcctgggcggagggctggacccggtacggccccgagggggaggccgtacccgtggccatccccgaggagcgggccctggtgttcgacgtggaggtctgcttggcagagggaacttgccccacattggcggtggccatatccccctcggcctggtattcctggtgcagccagcggctggtggaagagcgttactcttggaccagccagctgtcgccggctgacctcatccccctggaggtccctactggtgccagcagccccacccagagagactggcaggagcagttagtggtggggcacaatgtttcctttgaccgagctcatatcagggagcagtacctgatccagggttcccgcatgcgtttcctggacaccatgagcatgcacatggccatctcagggctaagcagcttccagcgcagtctgtggatagcagccaagcagggcaaacacaaggtccagccccccacaaagcaaggccagaagtcccagaggaaagccagaagaggcccagcgatctcatcctgggactggctggacatcagcagtgtcaacagtctggcagaggtgcacagactttatgtaggggggcctcccttagagaaggagcctcgagaactgtttgtgaagggcaccatgaaggacattcgtgagaacttccaggacctgatgcagtactgtgcccaggacgtgtgggccacccatgaggttttccagcagcagctaccgctcttcttggagaggtgtccccacccagtgactctggccggcatgctggagatgggtgtctcctacctgcctgtcaaccagaactgggagcgttacctggcagaggcacagggcacttatgaggagctccagcgggagatgaagaagtcgttgatggatctggccaatgatgcctgccagctgctctcaggagagaggtacaaagaagacccctggctctgggacctggagtgggacctgcaagaatttaagcagaagaaagctaagaaggtgaagaaggaaccagccacagccagcaagttgcccatcgagggggctggggcccctggtgatcccatggatcaggaagacctcggcccctgcagtgaggaggaggagtttcaacaagatgtcatggcccgcgcctgcttgcagaagctgaaggggaccacagagctcctgcccaagcggccccagcaccttcctggacaccctggatggtaccggaagctctgcccccggctagacgaccctgcatggaccccgggccccagcctcctcagcctgcagatgcgggtcacacctaaactcatggcacttacctgggatggcttccctctgcactactcagagcgtcatggctggggctacttggtgcctgggcggcgggacaacctggccaagctgccgacaggtaccaccctggagtcagctggggtggtctgcccctacagagccatcgagtccctgtacaggaagcactgtctcgaacaggggaagcagcagctgatgccccaggaggccggcctggcggaggagttcctgctcactgacaatagtgccatatggcaaacggtagaagaactggattacttagaagtggaggctgaggccaagatggagaacttgcgagctgcagtgccaggtcaacccctagctctgactgcccgtggtggccccaaggacacccagcccagctatcaccatggcaatggaccttacaacgacgtggacatccctggctgctggtttttcaagctgcctcacaaggatggtaatagctgtaatgtgggaagcccctttgccaaggacttcctgcccaagatggaggatggcaccctgcaggctggcccaggaggtgccagtgggccccgtgctctggaaatcaacaaaatgatttctttctggaggaacgcccataaacgtatcagctcccagatggtggtgtggctgcccaggtcagctctgccccgtgctgtgatcaggcaccccgactatgatgaggaaggcctctatggggccatcctgccccaagtggtgactgccggcaccatcactcgccgggctgtggagcccacatggctcaccgccagcaatgcccggcctgaccgagtaggcagtgagttgaaagccatggtgcaggccccacctggctacacccttgtgggtgctgatgtggactcccaagagctgtggattgcagctgtgcttggagacgcccactttgccggcatgcatggctgcacagcctttgggtggatgacactgcagggcaggaagagcaggggcactgatctacacagtaagacagccactactgtgggcatcagccgtgagcatgccaaaatcttcaactacggccgcatctatggtgctgggcagccctttgctgagcgcttactaatgcagtttaaccaccggctcacacagcaggaggcagctgagaaggcccagcagatgtacgctgccaccaagggcctccgctggtatcggctgtcggatgagggcgagtggctggtgagggagttgaacctcccagtggacaggactgagggtggctggatttccctgcaggatctgcgcaaggtccagagagaaactgcaaggaagtcacagtggaagaagtgggaggtggttgctgaacgggcatggaaggggggcacagagtcagaaatgttcaataagcttgagagcattgctacgtctgacataccacgtaccccggtgctgggctgctgcatcagccgagccctggagccctcggctgtccaggaagagtttatgaccagccgtgtgaattgggtggtacagagctctgctgttgactacttacacctcatgcttgtggccatgaagtggctgtttgaagagtttgccatagatgggcgcttctgcatcagcatccatgacgaggttcgctacctggtgcgggaggaggaccgctaccgcgctgccctggccttgcagatcaccaacctcttgaccaggtgcatgtttgcctacaagctgggtctgaatgacttgccccagtcagtcgcctttttcagtgcagtcgatattgaccggtgcctcaggaaggaagtgaccatggattgtaaaaccccttccaacccaactgggatggaaaggagatacgggattccccagggtgaagcgctggatatttaccagataattgaactcaccaaaggctccttggaaaaacgaagccagcctggaccatagcactgcctggaggctctgtatttgctcccgtggagcttcatcggggtggtgcaggctcccaaactcaggctttcagctgtgctttttgcaaaagggcttgcctaaggccagccatttttcagtagcaggacctgccaagaagattccttctaactgaaggtgcagttgaattcagtgggttcagaaccaagatgccaacatcggtgtggactacaggacaaggggcattgttgcttgttgggtaaaaatgaagcagaagccccaaagttcacattaactcaggcatttcatttattttttccttttcttcttggctggttctttgttctgtcccccatgctctgatgcagtgccctagaaggggaaagaattaatgctctaacgtgataaacctgctccaaggcagtggaaataaaaagaaggaaaaaaaagactctatcttctcatc

SEQ ID NO: 23010 - DNA, 4487 bp, Homo sapiens
  source 1..4487: mol_type = unassigned DNA
cgcttgcctctcgggtagccgcgggacctagctgggtgcagacgggaagttgcggctgccagcgaagcggaccggccgggtggaggccacacgctaccccgaggctgcgtaggccgcgcgaagggggacgccgtgccgtgggcctggggtcgggggagcagcagaccgggaagcaccgatttggggtggaaggcaggcatggtcaaacccatttcactgacaggagagcagagacaggacgtgtctctctccacgtcttccagccagtaaaagaagccaagctggagcccaaagccaggtgttctgactcccagcgtgggggtccctgcaccaaccatgagccgcctgctctggaggaaggtggccggcgccaccgtcgggccagggccggttccagctccggggcgctgggtctccagctccgtccccgcgtccgaccccagcgacgggcagcggcggcggcagcagcagcagcagcagcagcagcagcagcaacagcagcctcagcagccgcaagtgctatcctcggagggcgggcagctgcggcacaacccattggacatccagatgctctcgagagggctgcacgagcaaatcttcgggcaaggaggggagatgcctggcgaggccgcggtgcgccgcagcgtcgagcacctgcagaagcacgggctctgggggcagccagccgtgcccttgcccgacgtggagctgcgcctgccgcccctctacggggacaacctggaccagcacttccgcctcctggcccagaagcagagcctgccctacctggaggcggccaacttgctgttgcaggcccagctgcccccgaagcccccggcttgggcctgggcggagggctggacccggtacggccccgagggggaggccgtacccgtggccatccccgaggagcgggccctggtgttcgacgtggaggtctgcttggcagagggaacttgccccacattggcggtggccatatccccctcggcctggtattcctggtgcagccagcggctggtggaagagcgttactcttggaccagccagctgtcgccggctgacctcatccccctggaggtccctactggtgccagcagccccacccagagagactggcaggagcagttagtggtggggcacaatgtttcctttgaccgagctcatatcagggagcagtacctgatccagggttcccgcatgcgtttcctggacaccatgagcatgcacatggccatctcagggctaagcagcttccagcgcagtctgtggatagcagccaagcagggcaaacacaaggtccagccccccacaaagcaaggccagaagtcccagaggaaagccagaagaggcccagcgatctcatcctgggactggctggacatcagcagtgtcaacagtctggcagaggtgcacagactttatgtaggggggcctcccttagagaaggagcctcgagaactgtttgtgaagggcaccatgaaggacattcgtgagaacttccaggacctgatgcagtactgtgcccaggacgtgtgggccacccatgaggttttccagcagcagctaccgctcttcttggagaggtgtccccacccagtgactctggccggcatgctggagatgggtgtctcctacctgcctgtcaaccagaactgggagcgttacctggcagaggcacagggcacttatgaggagctccagcgggagatgaagaagtcgttgatggatctggccaatgatgcctgccagctgctctcaggagagaggtacaaagaagacccctggctctgggacctggagtgggacctgcaagaatttaagcagaagaaagctaagaaggtgaagaaggaaccagccacagccagcaagttgcccatcgagggggctggggcccctggtgatcccatggatcaggaagacctcggcccctgcagtgaggaggaggagtttcaacaagatgtcatggcccgcgcctgcttgcagaagctgaaggggaccacagagctcctgcccaagcggccccagcaccttcctggacaccctggatggtaccggaagctctgcccccggctagacgaccctgcatggaccccgggccccagcctcctcagcctgcagatgcgggtcacacctaaactcatggcacttacctgggatggcttccctctgcactactcagagcgtcatggctggggctacttggtgcctgggcggcgggacaacctggccaagctgccgacaggtaccaccctggagtcagctggggtggtctgcccctacagagccatcgagtccctgtacaggaagcactgtctcgaacaggggaagcagcagctgatgccccaggaggccggcctggcggaggagttcctgctcactgacaatagtgccatatggcaaacggtagaagaactggattacttagaagtggaggctgaggccaagatggagaacttgcgagctgcagtgccaggtcaacccctagctctgactgcccgtggtggccccaaggacacccagcccagctatcaccatggcaatggaccttacaacgacgtggacatccctggctgctggtttttcaagctgcctcacaaggatggtaatagctgtaatgtgggaagcccctttgccaaggacttcctgcccaagatggaggatggcaccctgcaggctggcccaggaggtgccagtgggccccgtgctctggaaatcaacaaaatgatttctttctggaggaacgcccataaacgtatcagctcccagatggtggtgtggctgcccaggtcagctctgccccgtgctgtgatcaggcaccccgactatgatgaggaaggcctctatggggccatcctgccccaagtggtgactgccggcaccatcactcgccgggctgtggagcccacatggctcaccgccagcaatgcccggcctgaccgagtaggcagtgagttgaaagccatggtgcaggccccacctggctacacccttgtgggtgctgatgtggactcccaagagctgtggattgcagctgtgcttggagacgcccactttgccggcatgcatggctgcacagcctttgggtggatgacactgcagggcaggaagagcaggggcactgatctacacagtaagacagccactactgtgggcatcagccgtgagcatgccaaaatcttcaactacggccgcatctatggtgctgggcagccctttgctgagcgcttactaatgcagtttaaccaccggctcacacagcaggaggcagctgagaaggcccagcagatgtacgctgccaccaagggcctccgctggtatcggctgtcggatgagggcgagtggctggtgagggagttgaacctcccagtggacaggactgagggtggctggatttccctgcaggatctgcgcaaggtccagagagaaactgcaaggaagtcacagtggaagaagtgggaggtggttgctgaacgggcatggaaggggggcacagagtcagaaatgttcaataagcttgagagcattgctacgtctgacataccacgtaccccggtgctgggctgctgcatcagccgagccctggagccctcggctgtccaggaagagtttatgaccagccgtgtgaattgggtggtacagagctctgctgttgactacttacacctcatgcttgtggccatgaagtggctgtttgaagagtttgccatagatgggcgcttctgcatcagcatccatgacgaggttcgctacctggtgcgggaggaggaccgctaccgcgctgccctggccttgcagatcaccaacctcttgaccaggtgcatgtttgcctacaagctgggtctgaatgacttgccccagtcagtcgcctttttcagtgcagtcgatattgaccggtgcctcaggaaggaagtgaccatggattgtaaaaccccttccaacccaactgggatggaaaggagatacgggattccccagggtgaagcgctggatatttaccagataattgaactcaccaaaggctccttggaaaaacgaagccagcctggaccatagcactgcctggaggctctgtatttgctcccgtggagcttcatcggggtggtgcaggctcccaaactcaggctttcagctgtgctttttgcaaaagggcttgcctaaggccagccatttttcagtagcaggacctgccaagaagattccttctaactgaaggtgcagttgaattcagtgggttcagaaccaagatgccaacatcggtgtggactacaggacaaggggcattgttgcttgttgggtaaaaatgaagcagaagccccaaagttcacattaactcaggcatttcatttattttttccttttcttcttggctggttctttgttctgtcccccatgctctgatgcagtgccctagaaggggaaagaattaatgctctaacgtgataaacctgctccaaggcagtggaaataaaaagaaggaaaaaaaa

SEQ ID NO: 23011 - DNA, 1592 bp, Homo sapiens
  source 1..1592: mol_type = unassigned DNA
gcctgcgccgtggcctctccggattctgttaacggtagtggtggcttgttgggatccgttgagtgatgggagagtgtgctctttaacttcggagagagatgcgctctcgtgtagccgtcagggcctgccataaggtctgcaggtgcctgttgtctgggtttgggggtcgagtagatgcggggcagccggagctgttgacggaaaggagtagccccaaaggagggcatgtgaagtcgcacgcggagctcgaggggaacggcgagcacccagaagcccccgggtctggagagggaagcgaggcgctgttagagatctgtcagagaaggcatttcctaagtggaagcaagcagcagcttagccgggattctcttctgagtgggtgccaccccggcttcggacccttgggcgtagagttgcggaagaacctggccgcagaatggtggacctcggtggtggtgttcagggagcaggtattcccggtggacgccctccaccacaaaccaggccctttgctacccggggacagtgccttcaggttagtttctgcagaaactctacgcgaaatcttgcaagacaaagagctgagtaaggaacagctagtagcatttcttgagaacgtattaaaaacttctgggaaactacgggagaaccttcttcacggtgccttggaacactatgttaattgcctggatctggtaaacaagaggctaccttatggccttgctcagattggagtgtgttttcatcctgtttttgacactaagcagatacgaaatggtgttaaaagtattggtgagaagactgaagcttcgttagtatggtttactcctccgagaacttcaaaccagtggcttgatttctggttacgtcatcgactccagtggtggagaaagtttgccatgagtccatctaacttcagcagcagtgactgtcaggatgaagaaggccggaaaggaaacaaactttactacaattttccctggggaaaggagttaatagaaaccctgtggaacctaggagatcacgaacttttacacatgtatcctggcaatgtgtctaaattacatggccgagatggacgaaaaaatgtggttccttgtgttctctctgtaaatggggacctagaccgaggcatgctggcctacctctatgattctttccagctgacagagaactcctttacaagaaagaaaaatcttcatagaaaggtacttaaacttcacccttgtttagcccctattaaggttgctttggatgtaggaagaggccccacattggaactaagacaggtttgtcaagggctatttaatgagttactagaaaatgggatttctgtgtggcctggttatttggaaactatgcagtcctcattggaacaactttattcgaagtatgatgaaatgagtattctcttcacagttttggttactgaaactactttggagaatggattaatacatctgagaagcagagacaccacaatgaaggaaatgatgcatatatccaaattaaaagactttttgattaagtatatatcatcagctaagaatgtatagatttttatatttgtataataaatattcttctctcct

SEQ ID NO: 23012 - DNA, 8775 bp, Homo sapiens
  source 1..8775: mol_type = unassigned DNA
gggcgggccgggaggtttgagtttgaagactggcgggaagatgtccgcagctgttgccaggccagggttctcccgagagggaggacgctgggactgtggcttgccctgatcggccgagaagagtttgccatgaatcttctgcgtcggagtgggaaacggcggcgttcagaatcaggctcagattcgttctcgggaagcggcggtgacagcagtgccagcccccagttcctctccgggtccgtgctgagcccgccgcccggccttggtcgctgcctgaaggccgcagctgcaggagaatgcaagcctacagttcctgactacgaaagagacaagctactattggcaaactggggacttcctaaagcagttctggaaaaataccacagttttggtgtaaaaaagatgtttgaatggcaggcagagtgccttttgcttggacaagtcctggaaggaaagaatttagtttattcagctcctacaagtgctgggaagactcttgtggcagaattacttattttgaagcgggttttggaaatgcggaagaaagctttgtttattcttccctttgtttctgtggctaaagagaagaaatactacctccagagtctgtttcaggaagtaggaataaaagtagacggttatatgggcagcacctctccatcaaggcatttctcttcattggatattgcagtctgcacaattgagagagccaatggtctgatcaatcgcctcatagaggaaaataagatggatctgttaggaatggtggttgtggatgaattacatatgctgggagactctcaccgagggtatctgctggaacttttgctgaccaagatttgctatattactcggaaatcagcatcttgtcaggcagatctagccagttctctgtctaatgctgtgcaaatcgttggcatgagtgctacccttcctaatttggagcttgtggcttcctggttgaatgctgaactctaccataccgactttcgccctgtaccgcttttggagtcagtaaaagttggaaattccatatatgactcttcaatgaaacttgtgagggaatttgagcccatgctacaagtgaagggagatgaggaccatgttgttagtttatgttatgagacgatttgtgataaccattcagtattacttttttgtccatcaaagaaatggtgtgagaagctggcagatatcattgctcgagagttttataatctacatcatcaagctgagggattggtgaaaccctctgaatgcccaccagtaattctggaacaaaaagaactcctggaagtgatggatcagttaagacgtttgccttcaggactggactctgtattacagaaaactgtaccatggggagtagcatttcatcatgcaggtcttacttttgaggagagggatatcattgaaggagcctttcgtcaaggtctcattcgggtcttggcggcaacttctactctttcttctggggtgaatttacctgcacgtcgtgtgattattcgaacccctatttttggtggtcgacctctagatattcttacttataagcagatggttggccgtgctggcaggaaaggagtggacacagtaggcgagagtatcttaatttgtaagaactctgagaaatcaaaaggcatagctctccttcagggttctctaaagcctgttcgcagctgtctgcaaagacgagaaggagaagaagtaactggcagcatgatacgagctattctggagataatagttggtggagtggcaagtacatcacaagatatgcatacttatgctgcctgcacatttttggctgcaagtatgaaagaagggaagcaaggaattcagagaaatcaagagtctgttcagcttggagcgattgaggcctgtgtgatgtggctactagaaaatgaattcatccagagtacagaagccagtgatggaacagaaggaaaggtgtatcatccaacacatcttggttcggccactctttcttcttcactttctccagctgatactttagatatttttgctgacctgcaaagagcaatgaagggctttgttttagagaatgatcttcatattctctatctggttacacctatgtttgaggattggactactattgattggtatcgatttttctgtttatgggagaagttgccaacttcaatgaaaagggtggcagagctagtgggagttgaagaggggttcttggcccgttgtgtgaaaggaaaagtagtagccagaactgagagacagcatcgacaaatggccatccataaaaggtttttcaccagtcttgtgctattagatttaatcagtgaagttcccttaagggaaataaatcagaaatatggatgcaatcgtgggcagattcaatctttgcaacagtcagctgctgtttatgcagggatgattacagtattttccaaccgtctgggctggcacaacatggaactactactttcccaatttcagaagcgtcttacgtttggcatccagagggagctgtgtgacctggttcgggtatccttactaaatgctcagagagccagggttctctatgcttctggctttcatactgtggcagaccttgctagagcaaatattgtggaggtggaggtgattctgaaaaatgctgtgcctttcaaaagtgcccggaaggcagtggatgaggaagaggaagcagttgaagaacgtcgcaatatgcgaactatctgggtgactggcagaaaaggtttaactgaaagggaagcagcagcccttatagtggaagaagccagaatgattctgcagcaggacttagttgaaatgggagtgcaatggaatccatgtgccctgttacattctagtacatgctcattgactcatagtgagtccgaagtaaaggaacacacatttatatcccaaactaagagttcttataaaaaattaacatcaaagaacaaaagtaacacaatatttagtgattcttatattaagcattcaccaaatatagtgcaagacttaaataaaagtagagagcatacaagttcctttaattgtaatttccagaatgggaatcaagaacatcagacatgttccattttcagagcaagaaaacgggcctctttagatataaataaagagaagccaggagcctctcagaatgaggggaaaacaagtgataagaaagttgttcagactttttcacagaaaacaaaaaaggcacctttgaatttcaattcagaaaagatgagcagaagttttcgatcttggaaacgtagaaagcatctaaagcgatctagggacagcagccccctgaaagactctggagcgtgtagaatccatttacaaggacagactctgtctaatcctagtctttgtgaagacccgtttaccttagatgagaagaaaacggaatttagaaattcagggccatttgctaaaaatgtatctttgagtggtaaggaaaaagataataaaacatcattcccattacaaataaagcaaaattgttcatggaacataacactaactaatgataattttgtggagcatattgtcacaggatctcagagtaaaaatgtgacttgtcaggccactagtgtggttagtgaaaagggcagaggagtagctgttgaggcagaaaaaataaatgaagtgctgatacaaaatggttcaaaaaaccagaatgtttatatgaaacaccatgacatccatccaattaaccagtacctgcgaaagcaatctcatgaacagacaagcactattaccaaacagaaaaatataatagagagacaaatgccctgtgaagcagtcagtagttacataaatagagactcaaatgttactatcaattgtgaaaggataaagcttaatacagaggaaaataaaccaagtcattttcaggcattaggagatgatataagcagaactgtgatacccagtgaagtacttccatcagctggagcatttagcaaatcagaaggccagcatgagaattttctaaatatttctagactacaagaaaaaacaggtacttatacaacaaacaaaactaaaaataatcatgtttctgacttaggtttagtcctctgtgattttgaagatagtttctatctggatactcagtcagagaaaataatacaacagatggcaactgaaaatgccaaactaggagcaaaggacaccaacctggcagcagggataatgcagaagagcttagtccaacagaactcaatgaactcttttcagaaggagtgtcacattccttttcctgctgaacagcaccctctaggagcgactaagatagatcatttggaccttaagactgtaggtactatgaaacaaagcagtgattcacatggggttgatatcctgactccagaaagcccgattttccattctccaatactattggaggaaaatggtctttttttaaaaaagaatgaagtttctgttactgattcacaattaaatagttttcttcaaggttatcaaacacaagaaactgtgaaaccagttatacttctgattcctcaaaagagaactcccactggtgtagaaggagaatgtcttccagttcctgaaacaagtttgaatatgagtgatagtttactatttgatagcttcagtgatgactatctagtaaaagaacaattacctgatatgcaaatgaaagaaccccttccttcagaagtaacatcaaaccattttagtgattctctgtgtctacaagaagacctaattaaaaaatcaaatgtaaatgagaatcaagatacccaccagcagttgacttgttccaatgatgaatctattatattttcagaaatggattctgttcagatggttgaagctttggacaatgtggatatatttcctgtccaagagaagaatcatactgtagtatctcctagagcattagaactaagtgatccagtacttgatgagcaccaccaaggtgatcaagatggaggagatcaagatgaaagggctgaaaaatcaaaattaactgggaccaggcaaaatcattcattcatatggtcaggggcatcatttgatctaagtccaggactgcaaaggattttagataaagtatccagtcctctagaaaatgaaaagctaaaatcaatgactataaacttttccagtttgaatagaaaaaatacagagttaaatgaagaacaagaagttatttcaaacttggagacaaaacaagtgcagggaatttcattttcttctaataatgaagtaaaaagcaagattgagatgctagaaaacaatgccaatcatgatgaaacctcatccctcttacctcgtaaagaaagtaatatagttgatgataatggtctcattcctcctacacccattccaacatctgcttctaagctgacatttccagggattcttgaaacacctgtaaacccttggaaaactaataatgttttacaacctggtgaaagttatttatttggctcaccttcagatattaaaaaccacgatttaagtccagggagtagaaatgggttcaaagacaacagccctattagtgacacaagcttttcacttcagttatcacaggatggattacagttaactccagcctcaagcagttcagaaagtttgtccataattgatgtagcaagtgaccaaaatcttttccaaacattcattaaggagtggcggtgcaaaaagcgattttccatctcactggcttgtgaaaagattagaagtttgacatcttctaaaactgctactattggcagtaggtttaagcaagctagctcacctcaggaaattcctattagagatgatggatttcccattaaaggttgtgatgacaccttggtggttggactggcagtatgctggggtggaagggatgcctattatttttcactgcagaaggaacaaaagcattctgaaattagtgccagtttggttccaccttctttagatccaagcctgactttgaaagacaggatgtggtaccttcaatcttgcttgcgaaaggaatctgataaagaatgttctgttgtcatctatgacttcatccagagctataaaattcttcttctttcttgtggcatctccttggagcaaagttatgaagatcctaaggtggcatgctggttactagatccagattctcaggagccgactcttcatagcatagttaccagttttcttcctcatgagcttccactcctagaagggatggagaccagccaagggattcaaagcctggggctaaatgctggcagtgagcattctgggcgatacagagcatctgtggagtccattctcatcttcaactctatgaatcagctcaactctttgttgcagaaggaaaaccttcaagatgttttccgtaaggtggaaatgccctctcagtactgcttggccttgctagaactaaatggaattggctttagtactgcagaatgtgaaagtcagaaacatataatgcaagccaagctggatgcaattgagacccaggcctatcaactagctggccacagtttttctttcaccagttcagatgacatcgctgaggttttatttttggaattgaagttgcccccaaatagagagatgaaaaaccaaggcagcaagaaaactctgggttctaccagaagagggattgacaatggacgcaagctaaggctgggaagacagttcagcactagtaaggacgttttaaataaattaaaggcattacatcctttaccaggcttgatattagaatggagaagaatcactaatgctattaccaaagtggtctttccccttcagcgggaaaagtgtcttaatccttttcttggaatggaaagaatctatcctgtatcacagtcgcacactgctacaggacgaataacctttacagaaccaaatattcagaatgtgccaagagattttgaaatcaaaatgccaacactagtaggagaaagcccaccttctcaagctgtaggcaaaggcctacttcccatgggcagaggaaaatataagaagggtttcagcgtgaatcctagatgccaggcacagatggaggagagagctgcagacagaggaatgccattttcaattagcatgcgacatgcctttgtgcctttcccaggtggttcaatactggctgctgactactctcagcttgaactgaggatcttggctcatttatcccatgatcgtcgtctcattcaagtgttaaacactggagctgatgttttcaggagcattgcagcagagtggaagatgattgagccagagtctgttggggatgatctgaggcagcaggcaaaacagatttgctatgggatcatttatggaatgggagctaaatctttgggagagcagatgggcattaaagaaaatgatgctgcatgctatattgactccttcaaatccagatacacagggattaatcaattcatgacagagacagtgaagaattgtaaaagagacggatttgttcagaccattttgggaaggcgtagatatttgccaggaatcaaagacaacaacccttatcgtaaagctcacgctgagcgtcaagctatcaacacaatagtccaaggatcagcagctgatattgtcaaaatagccacagttaacattcagaagcaattagagaccttccactcaaccttcaaatcccatggtcatcgagagggtatgctccaaagtgaccaaacaggattgtcacgaaagagaaaactgcaagggatgttctgcccaatcagaggaggcttcttcatccttcaactccatgatgaactcctatatgaagtggcagaagaagatgttgttcaggtagctcagattgtcaagaatgaaatggaaagtgctgtaaaactgtctgtgaaattgaaagtgaaagtgaaaataggcgccagctggggagagctaaaggactttgatgtgtaactgtgctgttgatgaagtcctcccagggaagcctgtgcagatgcagtcacctggaaagaacagagattaccctttcacctacctcagcaaaacaaactttcaagtcttgatagacttagcctagtaattttatagtgagagtttcaaactatatatcagtgtctatagcatcaaaaacttctgggggcgtgggggaagtagaataccaagtataatagttacattcactttcaaagagcatctatgaatttgccttttgtaacttactgtggctttaaacatattcagaacagatgcttgaaatatgcacttagcactttggttccacatctgtctgggtaaaccatgaagaaaatgaagctgctgcctcaatcgacccagacagcagccataggcagataaagatttggtttcaccctggtggtggtaggcatcgtgtgtgactttttttcctctaatatcaattttacagtacggaaatagtattttaaaatagtattggctaataaattatgaattctataaagtagtaagacttggtatggttggagtgtaggaatgaatattcatgaaatgtttcttattgcttttccttccctaattcatacaatgaatgtatttggaatacttacatattataaaataaactatacctcttcaagaggtatcctgttctgtaagatcagatgtttttattgcaggtcaatataatactgccagagacagaaaatacccccttatcagtcccttagtgcctctttctgtttgtggcatggtgagaaaacccatgctgaaaagattgtactttgtgatcccaatcagagggatggagctaatctttttgctgttgaaataaaatgaatttatgagaaa

SEQ ID NO: 23013 - DNA, 9049 bp, Homo sapiens
  source 1..9049: mol_type = unassigned DNA
atgaatggtcaccgttttacgttcagaactcgttcgcttctacctttacaaaagggacaacacagatgcattactaagctcttggctcataacgatccctggggtatattcagagccccttcctcgcggcgttcatatagtgtctcaggggtctgtcagccagcaatccccaattcctcattacatattcctcacaatgcatgctggctaaaatggaaattgtgttcagaaatagccctgccctaccatcatatactaggagaaaggaggaaattatgctctattaggaggtttgagtttgaagactggcgggaagatgtccgcagctgttgccaggccagggttctcccgagagggaggacgctgggactgtggcttgccctgatcggccgagaagagtttgccatgaatcttctgcgtcggagtgggaaacggcggcgttcagaatcaggctcagattcgttctcgggaagcggcggtgacagcagtgccagcccccagttcctctccgggtccgtgctgagcccgccgcccggccttggtcgctgcctgaaggccgcagctgcaggagaatgcaagcctacagttcctgactacgaaagagacaagctactattggcaaactggggacttcctaaagcagttctggaaaaataccacagttttggtgtaaaaaagatgtttgaatggcaggcagagtgccttttgcttggacaagtcctggaaggaaagaatttagtttattcagctcctacaagtgctgggaagactcttgtggcagaattacttattttgaagcgggttttggaaatgcggaagaaagctttgtttattcttccctttgtttctgtggctaaagagaagaaatactacctccagagtctgtttcaggaagtaggaataaaagtagacggttatatgggcagcacctctccatcaaggcatttctcttcattggatattgcagtctgcacaattgagagagccaatggtctgatcaatcgcctcatagaggaaaataagatggatctgttaggaatggtggttgtggatgaattacatatgctgggagactctcaccgagggtatctgctggaacttttgctgaccaagatttgctatattactcggaaatcagcatcttgtcaggcagatctagccagttctctgtctaatgctgtgcaaatcgttggcatgagtgctacccttcctaatttggagcttgtggcttcctggttgaatgctgaactctaccataccgactttcgccctgtaccgcttttggagtcagtaaaagttggaaattccatatatgactcttcaatgaaacttgtgagggaatttgagcccatgctacaagtgaagggagatgaggaccatgttgttagtttatgttatgagacgatttgtgataaccattcagtattacttttttgtccatcaaagaaatggtgtgagaagctggcagatatcattgctcgagagttttataatctacatcatcaagctgagggtgagggattggtgaaaccctctgaatgcccaccagtaattctggaacaaaaagaactcctggaagtgatggatcagttaagacgtttgccttcaggactggactctgtattacagaaaactgtaccatggggagtagcatttcatcatgcaggtcttacttttgaggagagggatatcattgaaggagcctttcgtcaaggtctcattcgggtcttggcggcaacttctactctttcttctggggtgaatttacctgcacgtcgtgtgattattcgaacccctatttttggtggtcgacctctagatattcttacttataagcagatggttggccgtgctggcaggaaaggagtggacacagtagagagtatcttaatttgtaagaactctgagaaatcaaaaggcatagctctccttcagggttctctaaagcctgttcgcagctgtctgcaaagacgagaaggagaagaagtaactggcagcatgatacgagctattctggagataatagttggtggagtggcaagtacatcacaagatatgcatacttatgctgcctgcacatttttggctgcaagtatgaaagaagggaagcaaggaattcagagaaatcaagagtctgttcagcttggagcgattgaggcctgtgtgatgtggctactagaaaatgaattcatccagagtacagaagccagtgatggaacagaaggaaaggtgtatcatccaacacatcttggttcggccactctttcttcttcactttctccagctgatactttagatatttttgctgacctgcaaagagcaatgaagggctttgttttagagaatgatcttcatattctctatctggttacacctatgtttgaggattggactactattgattggtatcgatttttctgtttatgggagaagttgccaacttcaatgaaaagggtggcagagctagtgggagttgaagaggggttcttggcccgttgtgtgaaaggaaaagtagtagccagaactgagagacagcatcgacaaatggccatccataaaaggtttttcaccagtcttgtgctattagatttaatcagtgaagttcccttaagggaaataaatcagaaatatggatgcaatcgtgggcagattcaatctttgcaacagtcagctgctgtttatgcagggatgattacagtattttccaaccgtctgggctggcacaacatggaactactactttcccaatttcagaagcgtcttacgtttggcatccagagggagctgtgtgacctggttcgggtatccttactaaatgctcagagagccagggttctctatgcttctggctttcatactgtggcagaccttgctagagcaaatattgtggaggtggaggtgattctgaaaaatgctgtgcctttcaaaagtgcccggaaggcagtggatgaggaagaggaagcagttgaagaacgtcgcaatatgcgaactatctgggtgactggcagaaaaggtttaactgaaagggaagcagcagcccttatagtggaagaagccagaatgattctgcagcaggacttagttgaaatgggagtgcaatggaatccatgtgccctgttacattctagtacatgctcattgactcatagtgagtccgaagtaaaggaacacacatttatatcccaaactaagagttcttataaaaaattaacatcaaagaacaaaagtaacacaatatttagtgattcttatattaagcattcaccaaatatagtgcaagacttaaataaaagtagagagcatacaagttcctttaattgtaatttccagaatgggaatcaagaacatcagacatgttccattttcagagcaagaaaacgggcctctttagatataaataaagagaagccaggagcctctcagaatgaggggaaaacaagtgataagaaagttgttcagactttttcacagaaaacaaaaaaggcacctttgaatttcaattcagaaaagatgagcagaagttttcgatcttggaaacgtagaaagcatctaaagcgatctagggacagcagccccctgaaagactctggagcgtgtagaatccatttacaaggacagactctgtctaatcctagtctttgtgaagacccgtttaccttagatgagaagaaaacggaatttagaaattcagggccatttgctaaaaatgtatctttgagtggtaaggaaaaagataataaaacatcattcccattacaaataaagcaaaattgttcatggaacataacactaactaatgataattttgtggagcatattgtcacaggatctcagagtaaaaatgtgacttgtcaggccactagtgtggttagtgaaaagggcagaggagtagctgttgaggcagaaaaaataaatgaagtgctgatacaaaatggttcaaaaaaccagaatgtttatatgaaacaccatgacatccatccaattaaccagtacctgcgaaagcaatctcatgaacagacaagcactattaccaaacagaaaaatataatagagagacaaatgccctgtgaagcagtcagtagttacataaatagagactcaaatgttactatcaattgtgaaaggataaagcttaatacagaggaaaataaaccaagtcattttcaggcattaggagatgatataagcagaactgtgatacccagtgaagtacttccatcagctggagcatttagcaaatcagaaggccagcatgagaattttctaaatatttctagactacaagaaaaaacaggtacttatacaacaaacaaaactaaaaataatcatgtttctgacttaggtttagtcctctgtgattttgaagatagtttctatctggatactcagtcagagaaaataatacaacagatggcaactgaaaatgccaaactaggagcaaaggacaccaacctggcagcagggataatgcagaagagcttagtccaacagaactcaatgaactcttttcagaaggagtgtcacattccttttcctgctgaacagcaccctctaggagcgactaagatagatcatttggaccttaagactgtaggtactatgaaacaaagcagtgattcacatggggttgatatcctgactccagaaagcccgattttccattctccaatactattggaggaaaatggtctttttttaaaaaagaatgaagtttctgttactgattcacaattaaatagttttcttcaaggttatcaaacacaagaaactgtgaaaccagttatacttctgattcctcaaaagagaactcccactggtgtagaaggagaatgtcttccagttcctgaaacaagtttgaatatgagtgatagtttactatttgatagcttcagtgatgactatctagtaaaagaacaattacctgatatgcaaatgaaagaaccccttccttcagaagtaacatcaaaccattttagtgattctctgtgtctacaagaagacctaattaaaaaatcaaatgtaaatgagaatcaagatacccaccagcagttgacttgttccaatgatgaatctattatattttcagaaatggattctgttcagatggttgaagctttggacaatgtggatatatttcctgtccaagagaagaatcatactgtagtatctcctagagcattagaactaagtgatccagtacttgatgagcaccaccaaggtgatcaagatggaggagatcaagatgaaagggctgaaaaatcaaaattaactgggaccaggcaaaatcattcattcatatggtcaggggcatcatttgatctaagtccaggactgcaaaggattttagataaagtatccagtcctctagaaaatgaaaagctaaaatcaatgactataaacttttccagtttgaatagaaaaaatacagagttaaatgaagaacaagaagttatttcaaacttggagacaaaacaagtgcagggaatttcattttcttctaataatgaagtaaaaagcaagattgagatgctagaaaacaatgccaatcatgatgaaacctcatccctcttacctcgtaaagaaagtaatatagttgatgataatggtctcattcctcctacacccattccaacatctgcttctaagctgacatttccagggattcttgaaacacctgtaaacccttggaaaactaataatgttttacaacctggtgaaagttatttatttggctcaccttcagatattaaaaaccacgatttaagtccagggagtagaaatgggttcaaagacaacagccctattagtgacacaagcttttcacttcagttatcacaggatggattacagttaactccagcctcaagcagttcagaaagtttgtccataattgatgtagcaagtgaccaaaatcttttccaaacattcattaaggagtggcggtgcaaaaagcgattttccatctcactggcttgtgaaaagattagaagtttgacatcttctaaaactgctactattggcagtaggtttaagcaagctagctcacctcaggaaattcctattagagatgatggatttcccattaaaggttgtgatgacaccttggtggttggactggcagtatgctggggtggaagggatgcctattatttttcactgcagaaggaacaaaagcattctgaaattagtgccagtttggttccaccttctttagatccaagcctgactttgaaagacaggatgtggtaccttcaatcttgcttgcgaaaggaatctgataaagaatgttctgttgtcatctatgacttcatccagagctataaaattcttcttctttcttgtggcatctccttggagcaaagttatgaagatcctaaggtggcatgctggttactagatccagattctcaggagccgactcttcatagcatagttaccagttttcttcctcatgagcttccactcctagaagggatggagaccagccaagggattcaaagcctggggctaaatgctggcagtgagcattctgggcgatacagagcatctgtggagtccattctcatcttcaactctatgaatcagctcaactctttgttgcagaaggaaaaccttcaagatgttttccgtaaggtggaaatgccctctcagtactgcttggccttgctagaactaaatggaattggctttagtactgcagaatgtgaaagtcagaaacatataatgcaagccaagctggatgcaattgagacccaggcctatcaactagctggccacagtttttctttcaccagttcagatgacatcgctgaggttttatttttggaattgaagttgcccccaaatagagagatgaaaaaccaaggcagcaagaaaactctgggttctaccagaagagggattgacaatggacgcaagctaaggctgggaagacagttcagcactagtaaggacgttttaaataaattaaaggcattacatcctttaccaggcttgatattagaatggagaagaatcactaatgctattaccaaagtggtctttccccttcagcgggaaaagtgtcttaatccttttcttggaatggaaagaatctatcctgtatcacagtcgcacactgctacaggacgaataacctttacagaaccaaatattcagaatgtgccaagagattttgaaatcaaaatgccaacactagtaggagaaagcccaccttctcaagctgtaggcaaaggcctacttcccatgggcagaggaaaatataagaagggtttcagcgtgaatcctagatgccaggcacagatggaggagagagctgcagacagaggaatgccattttcaattagcatgcgacatgcctttgtgcctttcccaggtggttcaatactggctgctgactactctcagcttgaactgaggatcttggctcatttatcccatgatcgtcgtctcattcaagtgttaaacactggagctgatgttttcaggagcattgcagcagagtggaagatgattgagccagagtctgttggggatgatctgaggcagcaggcaaaacagatttgctatgggatcatttatggaatgggagctaaatctttgggagagcagatgggcattaaagaaaatgatgctgcatgctatattgactccttcaaatccagatacacagggattaatcaattcatgacagagacagtgaagaattgtaaaagagacggatttgttcagaccattttgggaaggcgtagatatttgccaggaatcaaagacaacaacccttatcgtaaagctcacgctgagcgtcaagctatcaacacaatagtccaaggatcagcagctgatattgtcaaaatagccacagttaacattcagaagcaattagagaccttccactcaaccttcaaatcccatggtcatcgagagggtatgctccaaagtgaccaaacaggattgtcacgaaagagaaaactgcaagggatgttctgcccaatcagaggaggcttcttcatccttcaactccatgatgaactcctatatgaagtggcagaagaagatgttgttcaggtagctcagattgtcaagaatgaaatggaaagtgctgtaaaactgtctgtgaaattgaaagtgaaagtgaaaataggcgccagctggggagagctaaaggactttgatgtgtaactgtgctgttgatgaagtcctcccagggaagcctgtgcagatgcagtcacctggaaagaacagagattaccctttcacctacctcagcaaaacaaactttcaagtcttgatagacttagcctagtaattttatagtgagagtttcaaactatatatcagtgtctatagcatcaaaaacttctgggggcgtgggggaagtagaataccaagtataatagttacattcactttcaaagagcatctatgaatttgccttttgtaacttactgtggctttaaacatattcagaacagatgcttgaaatatgcacttagcactttggttccacatctgtctgggtaaaccatgaagaaaatgaagctgctgcctcaatcgacccagacagcagccataggcagataaagatttggtttcaccctggtggtggtaggcatcgtgtgtgactttttttcctctaatatcaattttacagtacggaaatagtattttaaaatagtattggctaataaattatgaattctataaagtagtaagacttggtatggttggagtgtaggaatgaatattcatgaaatgtttcttattgcttttccttccctaattcatacaatgaatgtatttggaatacttacatattataaaataaactatacctcttcaagaggtatcctgttctgtaagatcagatgtttttattgcaggtcaatataatactgccagagacagaaaatacccccttatcagtcccttagtgcctctttctgtttgtggcatggtgagaaaacccatgctgaaaagattgtactttgtgatcccaatcagagggatggagctaatctttttgctgttgaaataaaatgaatttatg

SEQ ID NO: 23014 - DNA, 7519 bp, Homo sapiens
  source 1..7519: mol_type = unassigned DNA
atgcccaccagtaattctcaaaaagaactcctggaagtgatggatcagttaagacgtttgccttcaggactggactctgtattacagaaaactgtaccatggggagtagcatttcatcatgcaggtcttacttttgaggagagggatatcattgaaggagcctttcgtcaaggtctcattcgggtcttggcggcaacttctactctttcttctggggtgaatttacctgcacgtcgtgtgattattcgaacccctatttttggtggtcgacctctagatattcttacttataagcagatggttggccgtgctggcaggaaaggagtggacacagtaggcgagagtatcttaatttgtaagaactctgagaaatcaaaaggcatagctctccttcagggttctctaaagcctgttcgcagctgtctgcaaagacgagaaggagaagaagtaactggcagcatgatacgagctattctggagataatagttggtggagtggcaagtacatcacaagatatgcatacttatgctgcctgcacatttttggctgcaagtatgaaagaagggaagcaaggaattcagagaaatcaagagtctgttcagcttggagcgattgaggcctgtgtgatgtggctactagaaaatgaattcatccagagtacagaagccagtgatggaacagaaggaaaggtgtatcatccaacacatcttggttcggccactctttcttcttcactttctccagctgatactttagatatttttgctgacctgcaaagagcaatgaagggctttgttttagagaatgatcttcatattctctatctggttacacctatgtttgaggattggactactattgattggtatcgatttttctgtttatgggagaagttgccaacttcaatgaaaagggtggcagagctagtgggagttgaagaggggttcttggcccgttgtgtgaaaggaaaagtagtagccagaactgagagacagcatcgacaaatggccatccataaaaggtttttcaccagtcttgtgctattagatttaatcagtgaagttcccttaagggaaataaatcagaaatatggatgcaatcgtgggcagattcaatctttgcaacagtcagctgctgtttatgcagggatgattacagtattttccaaccgtctgggctggcacaacatggaactactactttcccaatttcagaagcgtcttacgtttggcatccagagggagctgtgtgacctggttcgggtatccttactaaatgctcagagagccagggttctctatgcttctggctttcatactgtggcagaccttgctagagcaaatattgtggaggtggaggtgattctgaaaaatgctgtgcctttcaaaagtgcccggaaggcagtggatgaggaagaggaagcagttgaagaacgtcgcaatatgcgaactatctgggtgactggcagaaaaggtttaactgaaagggaagcagcagcccttatagtggaagaagccagaatgattctgcagcaggacttagttgaaatgggagtgcaatggaatccatgtgccctgttacattctagtacatgctcattgactcatagtgagtccgaagtaaaggaacacacatttatatcccaaactaagagttcttataaaaaattaacatcaaagaacaaaagtaacacaatatttagtgattcttatattaagcattcaccaaatatagtgcaagacttaaataaaagtagagagcatacaagttcctttaattgtaatttccagaatgggaatcaagaacatcagacatgttccattttcagagcaagaaaacgggcctctttagatataaataaagagaagccaggagcctctcagaatgaggggaaaacaagtgataagaaagttgttcagactttttcacagaaaacaaaaaaggcacctttgaatttcaattcagaaaagatgagcagaagttttcgatcttggaaacgtagaaagcatctaaagcgatctagggacagcagccccctgaaagactctggagcgtgtagaatccatttacaaggacagactctgtctaatcctagtctttgtgaagacccgtttaccttagatgagaagaaaacggaatttagaaattcagggccatttgctaaaaatgtatctttgagtggtaaggaaaaagataataaaacatcattcccattacaaataaagcaaaattgttcatggaacataacactaactaatgataattttgtggagcatattgtcacaggatctcagagtaaaaatgtgacttgtcaggccactagtgtggttagtgaaaagggcagaggagtagctgttgaggcagaaaaaataaatgaagtgctgatacaaaatggttcaaaaaaccagaatgtttatatgaaacaccatgacatccatccaattaaccagtacctgcgaaagcaatctcatgaacagacaagcactattaccaaacagaaaaatataatagagagacaaatgccctgtgaagcagtcagtagttacataaatagagactcaaatgttactatcaattgtgaaaggataaagcttaatacagaggaaaataaaccaagtcattttcaggcattaggagatgatataagcagaactgtgatacccagtgaagtacttccatcagctggagcatttagcaaatcagaaggccagcatgagaattttctaaatatttctagactacaagaaaaaacaggtacttatacaacaaacaaaactaaaaataatcatgtttctgacttaggtttagtcctctgtgattttgaagatagtttctatctggatactcagtcagagaaaataatacaacagatggcaactgaaaatgccaaactaggagcaaaggacaccaacctggcagcagggataatgcagaagagcttagtccaacagaactcaatgaactcttttcagaaggagtgtcacattccttttcctgctgaacagcaccctctaggagcgactaagatagatcatttggaccttaagactgtaggtactatgaaacaaagcagtgattcacatggggttgatatcctgactccagaaagcccgattttccattctccaatactattggaggaaaatggtctttttttaaaaaagaatgaagtttctgttactgattcacaattaaatagttttcttcaaggttatcaaacacaagaaactgtgaaaccagttatacttctgattcctcaaaagagaactcccactggtgtagaaggagaatgtcttccagttcctgaaacaagtttgaatatgagtgatagtttactatttgatagcttcagtgatgactatctagtaaaagaacaattacctgatatgcaaatgaaagaaccccttccttcagaagtaacatcaaaccattttagtgattctctgtgtctacaagaagacctaattaaaaaatcaaatgtaaatgagaatcaagatacccaccagcagttgacttgttccaatgatgaatctattatattttcagaaatggattctgttcagatggttgaagctttggacaatgtggatatatttcctgtccaagagaagaatcatactgtagtatctcctagagcattagaactaagtgatccagtacttgatgagcaccaccaaggtgatcaagatggaggagatcaagatgaaagggctgaaaaatcaaaattaactgggaccaggcaaaatcattcattcatatggtcaggggcatcatttgatctaagtccaggactgcaaaggattttagataaagtatccagtcctctagaaaatgaaaagctaaaatcaatgactataaacttttccagtttgaatagaaaaaatacagagttaaatgaagaacaagaagttatttcaaacttggagacaaaacaagtgcagggaatttcattttcttctaataatgaagtaaaaagcaagattgagatgctagaaaacaatgccaatcatgatgaaacctcatccctcttacctcgtaaagaaagtaatatagttgatgataatggtctcattcctcctacacccattccaacatctgcttctaagctgacatttccagggattcttgaaacacctgtaaacccttggaaaactaataatgttttacaacctggtgaaagttatttatttggctcaccttcagatattaaaaaccacgatttaagtccagggagtagaaatgggttcaaagacaacagccctattagtgacacaagcttttcacttcagttatcacaggatggattacagttaactccagcctcaagcagttcagaaagtttgtccataattgatgtagcaagtgaccaaaatcttttccaaacattcattaaggagtggcggtgcaaaaagcgattttccatctcactggcttgtgaaaagattagaagtttgacatcttctaaaactgctactattggcagtaggtttaagcaagctagctcacctcaggaaattcctattagagatgatggatttcccattaaaggttgtgatgacaccttggtggttggactggcagtatgctggggtggaagggatgcctattatttttcactgcagaaggaacaaaagcattctgaaattagtgccagtttggttccaccttctttagatccaagcctgactttgaaagacaggatgtggtaccttcaatcttgcttgcgaaaggaatctgataaagaatgttctgttgtcatctatgacttcatccagagctataaaattcttcttctttcttgtggcatctccttggagcaaagttatgaagatcctaaggtggcatgctggttactagatccagattctcaggagccgactcttcatagcatagttaccagttttcttcctcatgagcttccactcctagaagggatggagaccagccaagggattcaaagcctggggctaaatgctggcagtgagcattctgggcgatacagagcatctgtggagtccattctcatcttcaactctatgaatcagctcaactctttgttgcagaaggaaaaccttcaagatgttttccgtaaggtggaaatgccctctcagtactgcttggccttgctagaactaaatggaattggctttagtactgcagaatgtgaaagtcagaaacatataatgcaagccaagctggatgcaattgagacccaggcctatcaactagctggccacagtttttctttcaccagttcagatgacatcgctgaggttttatttttggaattgaagttgcccccaaatagagagatgaaaaaccaaggcagcaagaaaactctgggttctaccagaagagggattgacaatggacgcaagctaaggctgggaagacagttcagcactagtaaggacgttttaaataaattaaaggcattacatcctttaccaggcttgatattagaatggagaagaatcactaatgctattaccaaagtggtctttccccttcagcgggaaaagtgtcttaatccttttcttggaatggaaagaatctatcctgtatcacagtcgcacactgctacaggacgaataacctttacagaaccaaatattcagaatgtgccaagagattttgaaatcaaaatgccaacactagtaggagaaagcccaccttctcaagctgtaggcaaaggcctacttcccatgggcagaggaaaatataagaagggtttcagcgtgaatcctagatgccaggcacagatggaggagagagctgcagacagaggaatgccattttcaattagcatgcgacatgcctttgtgcctttcccaggtggttcaatactggctgctgactactctcagcttgaactgaggatcttggctcatttatcccatgatcgtcgtctcattcaagtgttaaacactggagctgatgttttcaggagcattgcagcagagtggaagatgattgagccagagtctgttggggatgatctgaggcagcaggcaaaacagatttgctatgggatcatttatggaatgggagctaaatctttgggagagcagatgggcattaaagaaaatgatgctgcatgctatattgactccttcaaatccagatacacagggattaatcaattcatgacagagacagtgaagaattgtaaaagagacggatttgttcagaccattttgggaaggcgtagatatttgccaggaatcaaagacaacaacccttatcgtaaagctcacgctgagcgtcaagctatcaacacaatagtccaaggatcagcagctgatattgtcaaaatagccacagttaacattcagaagcaattagagaccttccactcaaccttcaaatcccatggtcatcgagagggtatgctccaaagtgaccaaacaggattgtcacgaaagagaaaactgcaagggatgttctgcccaatcagaggaggcttcttcatccttcaactccatgatgaactcctatatgaagtggcagaagaagatgttgttcaggtagctcagattgtcaagaatgaaatggaaagtgctgtaaaactgtctgtgaaattgaaagtgaaagtgaaaataggcgccagctggggagagctaaaggactttgatgtgtaactgtgctgttgatgaagtcctcccagggaagcctgtgcagatgcagtcacctggaaagaacagagattaccctttcacctacctcagcaaaacaaactttcaagtcttgatagacttagcctagtaattttatagtgagagtttcaaactatatatcagtgtctatagcatcaaaaacttctgggggcgtgggggaagtagaataccaagtataatagttacattcactttcaaagagcatctatgaatttgccttttgtaacttactgtggctttaaacatattcagaacagatgcttgaaatatgcacttagcactttggttccacatctgtctgggtaaaccatgaagaaaatgaagctgctgcctcaatcgacccagacagcagccataggcagataaagatttggtttcaccctggtggtggtaggcatcgtgtgtgactttttttcctctaatatcaattttacagtacggaaatagtattttaaaatagtattggctaataaattatgaattctataaagtagtaagacttggtatggttggagtgtaggaatgaatattcatgaaatgtttcttattgcttttccttccctaattcatacaatgaatgtatttggaatacttacatattataaaataaactatacctcttcaagaggtatcctgttctgtaagatcagatgtttttattgcaggtcaatataatactgccagagacagaaaatacccccttatcagtcccttagtgcctctttctgtttgtggcatggtgagaaaacccatgctgaaaagattgtactttgtgatcccaatcagagggatggagctaatctttttgctgttgaaataaaatgaatttatgagaaacttt

SEQ ID NO: 23015 - DNA, 714 bp, Homo sapiens
  source 1..714: mol_type = unassigned DNA
ccgccgctggcctggccccgtctgtctctctcagcagctgtctttctcgcgcccactggccggtctctcctcttccccgcagttgcctccttctctgcctgcctgggtggccgccatgggccggaagcggctcatcactgattcctacccggttgtgaagaggagggaggggcccgctgggcacagcaagggggagctggcacccgagctaggggaggagccccagccccgcgacgaggaggaagcggagctggagctgctgaggcagtttgacctggcctggcagtacgggccctgcaccgtctctggcatctctatcccctatgaggcaccacgtaagacctcctgcccttagctctcttgctcaccacccaagaacctcaggacagaagcgagagcccattgctcctgctcagctcagcccggctgcggaggaacccttggcaggcagaacctggaggtgtcagaggctcaactcctccatctaaccagcaggctcccagagtccccggaagagcctgcgcagctgaagcagagtgcttctagatggagagtggtcactggggaaaaggacctggccatcaccttccaatacctgctgcctgtctccctgacccatgatctggcaagttaggcacagtcagacatggacagttgatccatgaggaaaagatgctctcccacctaaggccaggaatctgagagcaggactgg

SEQ ID NO: 23016 - DNA, 918 bp, Homo sapiens
  source 1..918: mol_type = unassigned DNA
ctctctcggtttgtctgggtcatcttgtctgcccgccgctggcctggccccgtctgtctctctcagcagctgtctttctcgcgcccactggccggtctctcctcttccccgcagttgcctccttctctgcctgcctgggtggccgccatgggccggaagcggctcatcactgattcctacccggttgtgaagaggagggaggggcccgctgggcacagcaagggggagctggcacccgagctaggggaggagccccagccccgcgacgaggaggaagcggagctggagctgctgaggcagtttgacctggcctggcagtacgggccctgcaccgggatcacacggctgcagcgctggtgtcgggccaagcagatgggcttggagcctcccccagaggtgtggcaggtgctgaagacccaccccggagacccccgcttccagtgcagtctctggcatctctatcccctatgaggcaccacgtaagacctcctgcccttagctctcttgctcaccacccaagaacctcaggacagaagcgagagcccattgctcctgctcagctcagcccggctgcggaggaacccttggcaggcagaacctggaggtgtcagaggctcaactcctccatctaaccagcaggctcccagagtccccggaagagcctgcgcagctgaagcagagtgcttctagatggagagtggtcactggggaaaaggacctggccatcaccttccaatacctgctgcctgtctccctgacccatgatctggcaagttaggcacagtcagacatggacagttgatccatgaggaaaagatgctctcccacctaaggccaggaatctgagagcaggactggctgagctcccagggcaaggggttcactaatgcttatcaataaagaatattgagcctggaa

SEQ ID NO: 23017 - DNA, 899 bp, Homo sapiens
  source 1..899: mol_type = unassigned DNA
ctgcccgccgctggcctggccccgtctgtctctctcagcagctgtctttctcgcgcccactggccggtctctcctcttccccgcagttgcctccttctctgcctgcctgggtggccgccatgggccggaagcggctcatcactgattcctacccggttgtgaagaggagggaggggcccgctgggcacagcaagggggagctggcacccgagctaggtctctgaggggaggagccccagccccgcgacgaggaggaagcggagctggagctgctgaggcagtttgacctggcctggcagtacgggccctgcaccgggatcacacggctgcagcgctggtgtcgggccaagcagatgggcttggagcctcccccagaggtgtggcaggtgctgaagacccaccccggagacccccgcttccagtgcagtctctggcatctctatcccctatgaggcaccacgtaagacctcctgcccttagctctcttgctcaccacccaagaacctcaggacagaagcgagagcccattgctcctgctcagctcagcccggctgcggaggaacccttggcaggcagaacctggaggtgtcagaggctcaactcctccatctaaccagcaggctcccagagtccccggaagagcctgcgcagctgaagcagagtgcttctagatggagagtggtcactggggaaaaggacctggccatcaccttccaatacctgctgcctgtctccctgacccatgatctggcaagttaggcacagtcagacatggacagttgatccatgaggaaaagatgctctcccacctaaggccaggaatctgagagcaggactggctgagctcccagggcaaggggttcactaatgcttatcaataaagaatattgagcctggaa

SEQ ID NO: 23018 - DNA, 3441 bp, Homo sapiens
  source 1..3441: mol_type = unassigned DNA
gcgagagttggtccgcggacgccggaagtagttcgtcgctccctagcggccgaaggggcgggctcgcggggtctcgactgctttcggcttgctcggcggagcaagatggcggacatctccctggacgaactcatcaggaagcgcggggcggcggcgaaaggacggcttaatgccagaccgggagttggaggtgtccgatctcgagttgggatccagcaaggccttctcagccagtcaacacgcacagccaccttccagcagagatttgatgcccggcagaagattggcctctcagatgcccggctcaaactgggagtcaaggatgcccgggagaagcttttgcagaaagatgcccgatttcgaatcaaagggaaagtgcaggatgccagagagatgttgaactctcgcaagcagcagaccacggtgccccagaagccccgccaggttgctgatgcccgggagaagatcagcttgaagaggagttcccctgctgccttcataaacccacccattgggacagtgacccctgctctgaagctcaccaaaaccatccaggttccacagcagaaagccatggcaccacttcatccccatcctgccggaatgagaatcaatgttgtcaataaccaccaggccaaacagaatttatatgacctggatgaagatgatgatggtatagcttccgttcctactaaacagatgaagtttgcagcctcaggcggctttctccaccacatggctgggctaagcagttccaagctttccatgtccaaggccctccctctcaccaaagtggttcagaatgatgcatacacagctcctgctctcccttcctctattcgaacaaaagccttgaccaacatgtcccggacactggtgaacaaggaagaaccccccaaagagctgccagctgctgagcctgttctcagcccattggaaggcaccaagatgactgtgaataatctgcaccctcgagtcactgaggaggacattgttgagcttttctgtgtgtgtggggccctcaagcgagctcgactggtccatcctggggtagcggaggtggtgtttgtgaaaaaggacgatgccatcaccgcatataagaagtacaacaaccggtgtctggacgggcagccgatgaagtgcaaccttcacatgaatgggaatgttatcacctcagaccagcccatcctgctgcggctgagtgacagcccatcaatgaaaaaggagagcgagctgcctcgcagggtgaactctgcctcctcctccaacccccctgccgaagtggaccctgacaccatcctgaaggcactcttcaagtcctcaggggcctctgtgaccacgcagcccacagaattcaaaatcaagctttgagcaggggagtgaggcagccagaagtgggggcagaggagggtggctctgtttccccaaggcaaagcttatgaccaatgggccatcggactggagacccctgattgtgggaagggttgccagggataaagagcttcctcactggatgggacccgcctttctgtgttgtgttctgccctgtgctcttctctctacgttaacgtttcctgtagtatgtttcttcatctcatcgccaaggtaggcttgtgtttttcagtgtgtgcctccccgagcctcagccccaagctgatttcttatctggaaatggtacactgaattctctgggtggctttcttgtggccccatgggatgcagcgtgggggctgtctgaaggaccctgctttttccaggggccgaggggctgcctttcctttgtgtgtattaagcttttcaaacaatggaggggatggagagccctggtgtcctgacgggagccaggtcggcctgagagctgtgccgctcctctgtcttgtcagtggaggtgcctgggtggggagcaggtctcaggcctcttgtcctctccccagtggctccaggcctcactagtggcaagggcaggatgaggctgcaccgctgggaagagtctatctaagctcttggcttggagtcccgtgtcgtctccacccagaggaagttctccagagttcacctttcccttttccttgagttgtgctgaatgccccaccccagctctctttcccttctgggtgtctttgctgggagggggctgtgttgtgagccctcccggttctcacctcgcctggcacttaaccacaccctggttttgtgtagccgccagctctcttctggttgggcctttgaaaggctcagcctcccattgtgcagtgcttgggtttggagcttatttgaatggaagaggtcagtttgttcctggctctccatttctggcctcagttgtctacaggacagtggtcagggatgcctggaggcatatatccagctgccaccaaggggcactgtttgttcccacttatgtgagtgaccccatccatccatgaccagaggattattttcctgccttggcagaggaggaggagtcaagggagcagggcagctctaccaggcaaggtgtttccccagcataggcgcagacagttgggacgaaacttcagagcccaggcagtccctgaatgaccaggccagtgttgtcactgagtggtcccctgctggttgggagtgaagagaatccaggctggcagagctggagccagttggggagcacggttctgggagctctgcaaaatcagtagcaagtgctggaaaaggcacatgccgaagatactcaagagctcccaagatttgcttgaggctagcccagtgaaaaaaaccagagactcatgtttccaggggtcagtctgtcaggcaggaaggacccaggatttgaacccagcttcagtgtgcaggctctgaggctgcccaggacgggaaagtccaaggaaggggcctggtggtgctccacttgcagttctttaaagaatgctgctttttattctcctaaccctttcaagtgggtgcagacttctcgttagcagctggaagacattcctcccacacttttcccttcctggcccaagagagcatccagaaggcagtaggacctggtttttcaggtactgggagccgggggctcactgcttgcactgtgcttagggtagggatggtaaatatcctccctgcatggctttatcctccctctcatcccaaagcaggtatcttctggttgtcacagagtttcattgagtccagctgcagccacgtggccatctggagctggtgctataggtgaccatctggtacattgaggggacctgtttgcctcctccactctataagcagtcatcttgggagaccgggaggagaaggtggtgggctagtcctgtgtcctcctccacttcccatgcctctatgttacccatctgtgtctcctgtgcagaaggagaggaaggggcattaagagatgaagggtgattatgtattacttatccatttctgaataaacatttgttattccta

SEQ ID NO: 23019 - DNA, 783 bp, Homo sapiens
  source 1..783: mol_type = unassigned DNA
atggcggacatctccctggacgaactcatcaggaagcgcggggcggcggcgaaaggacggcttaatgccagaccgggagttggaggtgtccgatctcgagttgggatccagcaaggccttctcagccagtcaacacgcacagccaccttccagcagagatttgatgcccggcagaagattggcctctcagatgcccggctcaaactgggagtcaaggatgcccgggagaagcttttgcagaaagatgcccgatttcgaatcaaagggaaagtgcaggatgccagagagatgttgaactctcgcaagcagcagaccacggtgccccagaagccccgccaggttgctgatgcccgggagaagatcagcttgaagaggagttcccctgctgccttcataaacccacccattgggacagtgacccctgctctgaagctcaccaaaaccatccaggtcggcctgagagctgtgccgctcctctgtcttgtcagtggaggtgcctgggtggggagcaggtctcaggcctcttgtcctctccccagtggctccaggcctcactagtggcaagggcaggatgaggctgcaccgctgggaagagtctatctaagctcttggcttggagtcccgtgtcgtctccacccagaggaagttctccagagttcacctttcccttttccttgagttgtgctgaatgccccaccccagctctctttcccttctgggtgtctttgctgggagggggctgtgttgtgagccctcccggttctcacctcgcctggcacttaa

SEQ ID NO: 23020 - DNA, 3323 bp, Homo sapiens
  source 1..3323: mol_type = unassigned DNA
ttcgtcgctccctagcggccgaaggggcgggctcgcggggtctcgactgctttcggcttgctcggcggagcaagatggcggacatctccctggacgaactcatcaggaagcgcggggcggcggcgaaaggacggcttaatgccagaccgggagttggaggtgtccgatctcgagttgggatccagcaaggccttctcagccagtcaacacgcacagccaccttccagcagagatttgatgcccggcagaagattggcctctcagatgcccggctcaaactgggagtcaaggatgcccgggagaagcttttgcagaaagatgcccgatttcgaatcaaagggaaagtgcaggatgccagagagatgttgaactctcgcaagcagcagaccacggtgccccagaagccccgccaggttgctgatgcccgggagaagatcagcttgaagaggagttcccctgctgccttcataaacccacccattgggacagtgacccctgctctgaagctcaccaaaaccatccagaatttatatgacctggatgaagatgatgatggtatagcttccgttcctactaaacagatgaagtttgcagcctcaggcggctttctccaccacatggctgggctaagcagttccaagctttccatgtccaaggccctccctctcaccaaagtggttcagaatgatgcatacacagctcctgctctcccttcctctattcgaacaaaagccttgaccaacatgtcccggacactggtgaacaaggaagaaccccccaaagagctgccagctgctgagcctgttctcagcccattggaaggcaccaagatgactgtgaataatctgcaccctcgagtcactgaggaggacattgttgagcttttctgtgtgtgtggggccctcaagcgagctcgactggtccatcctggggtagcggaggtggtgtttgtgaaaaaggacgatgccatcaccgcatataagaagtacaacaaccggtgtctggacgggcagccgatgaagtgcaaccttcacatgaatgggaatgttatcacctcagaccagcccatcctgctgcggctgagtgacagcccatcaatgaaaaaggagagcgagctgcctcgcagggtgaactctgcctcctcctccaacccccctgccgaagtggaccctgacaccatcctgaaggcactcttcaagtcctcaggggcctctgtgaccacgcagcccacagaattcaaaatcaagctttgagcaggggagtgaggcagccagaagtgggggcagaggagggtggctctgtttccccaaggcaaagcttatgaccaatgggccatcggactggagacccctgattgtgggaagggttgccagggataaagagcttcctcactggatgggacccgcctttctgtgttgtgttctgccctgtgctcttctctctacgttaacgtttcctgtagtatgtttcttcatctcatcgccaaggtaggcttgtgtttttcagtgtgtgcctccccgagcctcagccccaagctgatttcttatctggaaatggtacactgaattctctgggtggctttcttgtggccccatgggatgcagcgtgggggctgtctgaaggaccctgctttttccaggggccgaggggctgcctttcctttgtgtgtattaagcttttcaaacaatggaggggatggagagccctggtgtcctgacgggagccaggtcggcctgagagctgtgccgctcctctgtcttgtcagtggaggtgcctgggtggggagcaggtctcaggcctcttgtcctctccccagtggctccaggcctcactagtggcaagggcaggatgaggctgcaccgctgggaagagtctatctaagctcttggcttggagtcccgtgtcgtctccacccagaggaagttctccagagttcacctttcccttttccttgagttgtgctgaatgccccaccccagctctctttcccttctgggtgtctttgctgggagggggctgtgttgtgagccctcccggttctcacctcgcctggcacttaaccacaccctggttttgtgtagccgccagctctcttctggttgggcctttgaaaggctcagcctcccattgtgcagtgcttgggtttggagcttatttgaatggaagaggtcagtttgttcctggctctccatttctggcctcagttgtctacaggacagtggtcagggatgcctggaggcatatatccagctgccaccaaggggcactgtttgttcccacttatgtgagtgaccccatccatccatgaccagaggattattttcctgccttggcagaggaggaggagtcaagggagcagggcagctctaccaggcaaggtgtttccccagcataggcgcagacagttgggacgaaacttcagagcccaggcagtccctgaatgaccaggccagtgttgtcactgagtggtcccctgctggttgggagtgaagagaatccaggctggcagagctggagccagttggggagcacggttctgggagctctgcaaaatcagtagcaagtgctggaaaaggcacatgccgaagatactcaagagctcccaagatttgcttgaggctagcccagtgaaaaaaaccagagactcatgtttccaggggtcagtctgtcaggcaggaaggacccaggatttgaacccagcttcagtgtgcaggctctgaggctgcccaggacgggaaagtccaaggaaggggcctggtggtgctccacttgcagttctttaaagaatgctgctttttattctcctaaccctttcaagtgggtgcagacttctcgttagcagctggaagacattcctcccacacttttcccttcctggcccaagagagcatccagaaggcagtaggacctggtttttcaggtactgggagccgggggctcactgcttgcactgtgcttagggtagggatggtaaatatcctccctgcatggctttatcctccctctcatcccaaagcaggtatcttctggttgtcacagagtttcattgagtccagctgcagccacgtggccatctggagctggtgctataggtgaccatctggtacattgaggggacctgtttgcctcctccactctataagcagtcatcttgggagaccgggaggagaaggtggtgggctagtcctgtgtcctcctccacttcccatgcctctatgttacccatctgtgtctcctgtgcagaaggagaggaaggggcattaagagatgaagggtgattatgtattacttatccatttctgaataaacatttgttattccta

SEQ ID NO: 23021 - DNA, 2006 bp, Homo sapiens
  source 1..2006: mol_type = unassigned DNA
gaaggggcgggctcgcggggtctcgactgctttcggcttgctcggcggagcaagatggcggacatctccctggacgaactcatcaggaagcgcggggcggcggcgaaaggacggcttaatgccagaccgggagttggaggtgtccgatctcgagttgggatccagcaaggccttctcagccagtcaacacgcacagccaccttccagcagagatttgatgcccggcagaagattggcctctcagatgcccggctcaaactgggagtcaaggatgcccgggagaagcttttgcagaaagatgcccgatttcgaatcaaagggaaagtgcaggatgccagagagatgttgaactctcgcaagcagcagaccacggtgccccagaagccccgccaggttgctgatgcccgggagaagatcagcttgaagaggagttcccctgctgccttcataaacccacccattgggacagtgacccctgctctgaagctcaccaaaaccatccagaatttatatgacctggatgaagatgatgatggtatagcttccgttcctactaaacagatgaagtttgcagcctcaggcggctttctccaccacatggctgggctaagcagttccaagctttccatgtccaaggccctccctctcaccaaagtggttcagaatgatgcatacacagctcctgctctcccttcctctattcgaacaaaagccctcccggttctcacctcgcctggcacttaaccacaccctggttttgtgtagccgccagctctcttctggttgggcctttgaaaggctcagcctcccattgtgcagtgcttgggtttggagcttatttgaatggaagaggtcagtttgttcctggctctccatttctggcctcagttgtctacaggacagtggtcagggatgcctggaggcatatatccagctgccaccaaggggcactgtttgttcccacttatgtgagtgaccccatccatccatgaccagaggattattttcctgccttggcagaggaggaggagtcaagggagcagggcagctctaccaggcaaggtgtttccccagcataggcgcagacagttgggacgaaacttcagagcccaggcagtccctgaatgaccaggccagtgttgtcactgagtggtcccctgctggttgggagtgaagagaatccaggctggcagagctggagccagttggggagcacggttctgggagctctgcaaaatcagtagcaagtgctggaaaaggcacatgccgaagatactcaagagctcccaagatttgcttgaggctagcccagtgaaaaaaaccagagactcatgtttccaggggtcagtctgtcaggcaggaaggacccaggatttgaacccagcttcagtgtgcaggctctgaggctgcccaggacgggaaagtccaaggaaggggcctggtggtgctccacttgcagttctttaaagaatgctgctttttattctcctaaccctttcaagtgggtgcagacttctcgttagcagctggaagacattcctcccacacttttcccttcctggcccaagagagcatccagaaggcagtaggacctggtttttcaggtactgggagccgggggctcactgcttgcactgtgcttagggtagggatggtaaatatcctccctgcatggctttatcctccctctcatcccaaagcaggtatcttctggttgtcacagagtttcattgagtccagctgcagccacgtggccatctggagctggtgctataggtgaccatctggtacattgaggggacctgtttgcctcctccactctataagcagtcatcttgggagaccgggaggagaaggtggtgggctagtcctgtgtcctcctccacttcccatgcctctatgttacccatctgtgtctcctgtgcagaaggagaggaaggggcattaagagatgaagggtgattatgtattacttatccatttctgaataaacatttgttattcct

SEQ ID NO: 23022 - DNA, 1351 bp, Homo sapiens
  source 1..1351: mol_type = unassigned DNA
ttcgaatcaaagggaaagtgcaggatgccagagagatgttgaactctcgcaagcagcagaccacggtgccccagaagccccgccaggttgctgatgcccgggagaagatcagcttgaagaggagttcccctgctgccttcataaacccacccattgggacagtgacccctgctctgaagctcaccaaaaccatccagagaatgcatgtggaccctgtggggtggattctgaccactgagtgtttccaggttccacagcagaaagccatggcaccacttcatccccatcctgccggaatgagaatcaatgttgtcaataaccaccaggccaaacagaatttatatgacctggatgaagatgatgatggtatagcttccgttcctactaaacagatgaagtttgcagcctcaggcggctttctccaccacatggctgggctaagcagttccaagctttccatgtccaaggccctccctctcaccaaagtggttcagaatgatgcatacacagctcctgctctcccttcctctattcgaacaaaagccttgaccaacatgtcccggacactggtgaacaaggaagaaccccccaaagagctgccagctgctgagcctgttctcagcccattggaaggcaccaagatgactgtgaataatctgcaccctcgagtcactgaggaggacattgttgagcttttctgtgtgtgtggggccctcaagcgagctcgactggtccatcctggggtagcggaggtggtgtttgtgaaaaaggacgatgccatcaccgcatataagaagtacaacaaccggtgtctggacggcggctgagtgacagcccatcaatgaaaaaggagagcgagctgcctcgcagggtgaactctgcctcctcctccaacccccctgccgaagtggaccctgacaccatcctgaaggcactcttcaagtcctcaggggcctctgtgaccacgcagcccacagaattcaaaatcaagctttgagcaggggagtgaggcagccagaagtgggggcagaggagggtggctctgtttccccaaggcaaagcttatgaccaatgggccatcggactggagacccctgattgtgggaagggttgccagggataaagagcttcctcactggatgggacccgcctttctgtgttgtgttctgccctgtgctcttctctctacgttaacgtttcctgtagtatgtttcttcatctcatcgccaaggtaggcttgtgtttttcagtgtgtgcctccccgagcctcagccccaagctgatttcttatctggaaatggtacactgaattctctgggtggctttcttgtggccccatgggatgcagcgt

SEQ ID NO: 23023 - DNA, 1340 bp, Homo sapiens
  source 1..1340: mol_type = unassigned DNA
gtctcgactgctttcggcttgctcggcggagcaagatggcggacatctccctggacgaactcatcaggaagcgcggggcggcggcgaaaggacggcttaatgccagaccgggagttggaggtgtccgatctcgagttgggatccagcaaggccttctcagccagtcaacacgcacagccaccttccagcagagatttgatgcccggcagaagattggcctctcagatgcccggctcaaactgggagtcaaggatgcccgggagaagcttttgcagaaagatgcccgatttcgaatcaaagggaaagtgcaggatgccagagagatgttgaactctcgcaagcagcagaccacggtgccccagaagccccgccaggttgctgatgcccgggagaagatcagcttgaagaggagttcccctgctgccttcataaacccacccattgggacagtgacccctgctctgaagctcaccaaaaccatccaggttccaagctttccatgtccaaggccctccctctcaccaaagtggttcagaatgatgcatacacagctcctgctctcccttcctctattcgaacaaaagccttgaccaacatgtcccggacactggtgaacaaggaagaaccccccaaagagctgccagctgctgagcctgttctcagcccattggaaggcaccaagatgactgtgaataatctgcaccctcgagtcactgaggaggacattgttgagcttttctgtgtgtgtggggccctcaagcgagctcgactggtccatcctggggtagcggaggtggtgtttgtgaaaaaggacgatgccatcaccgcatataagaagtacaacaaccggtgtctggacggcggctgagtgacagcccatcaatgaaaaaggagagcgagctgcctcgcagggtgaactctgcctcctcctccaacccccctgccgaagtggaccctgacaccatcctgaaggcactcttcaagtcctcaggggcctctgtgaccacgcagcccacagaattcaaaatcaagctttgagcaggggagtgaggcagccagaagtgggggcagaggagggtggctctgtttccccaaggcaaagcttatgaccaatgggccatcggactggagacccctgattgtgggaagggttgccagggataaagagcttcctcactggatgggacccgcctttctgtgttgtgttctgccctgtgctcttctctctacgttaacgtttcctgtagtatgtttcttcatctcatcgccaaggtaggcttgtgtttttcagtgtgtgcctccccgagcctcagccccaagctgatttcttatctggaaat

SEQ ID NO: 23024 - DNA, 1248 bp, Homo sapiens
  source 1..1248: mol_type = unassigned DNA
cgggtggctaggcgcgtgggaagagccggagcccgacccccgcccacccggtttcctggcagcgcactgccgcgtaggggcggagccgcgcgcctacacagggtgtggcctccagcccgcgcgggaaagggcctgcgccgcatgcgcgcgcacagtcggcggccgcgcgcagcacgctcaaggccgggatggcggcggcggcggcggcaggaagcgggacgccccgagaggaggagggacctgctggggaggcagcggcctcgcagccccaggccccaacgagtgtgcctggggctcgtctctcgaggttgcctctggcgcgagtgaaggccttggtgaaggcagatcccgacgtgacgctagcgggacaggaagccatcttcattctggcacgagccgcggaactgtttgtggagaccattgcaaaagatgcctactgttgcgctcagcagggaaaaaggaaaacccttcagaggagagacttggataatgcaatagaagctgtggatgaatttgcttttctggaaggtactttagattgattgccgagcggggcagttttgtgagccttcatctgaagccttcagttcacccctctgcacaggcctcagctttgaagaacggagtctttgcacttacacacactcttcctgttctgccttcacctatgccgggataagcagagatctcatcaattagctcttctctgcaaggtcttccactatttctgtctgtcttccatatcaagcctggatgcagctgctgctgcttagagcagagatgaagaaagtgttctgcataagtggcttcctgaatgatgaggaccagaataaaggtttttgatcaacctcagtccagtgtgttttataatctcgcctttgttcctaccctgtgactggagagtcaccatacctggtcacagaccttcctgatcttccctgccagccattctaacatacagtcctttcattaattttgttcttttatttttccagcacatcaccagaaagtggttccagaatttatggaacaccacttgccctcaggagttcaaataaatatggtcctagattgaaagccagttaaattttttttaagttttatttattgacatatccacatactctatatttcaccaatttaaagtgtacaattcagtggtatttagtatattcacaaatatgtacaccagtcatcacagtcgattttagaacattttatttatttatttattattattatacttta

SEQ ID NO: 23025 - DNA, 1280 bp, Homo sapiens
  source 1..1280: mol_type = unassigned DNA
agtctcgtggagagattgaagatggcggcttctcaggcggtggaggaaatgcggagccgcgtggttctgggggagtttggggttcgcaatgtccatactactgactttcccggtaactattccggttatgatgatgcctgggaccaggaccgcttcgagaagaatttccgtgtggatgtagtacacatggatgaaaactcactggagtttgacatggtgggaattgacgcagccattgccaatgcttttcgacgaattctgctagctgaggtgccaactatggctgtggagaaggtcctggtgtacaataatacatccattgttcaggatgagattcttgctcaccgtctggggctcattcccattcatgctgatccccgtctttttgagtatcggaaccaaggagatgaagaaggcacagagatagatactctacagtttcgtctccaggtcagatgcactcggaacccccatgctgctaaagattcctctgaccccaacgaactgtacgtgaaccacaaagtgtataccaggcatatgacatggatccccctggggaaccaggctgatctctttccagagggcactatccgaccagtgcatgatgatatcctcatcgctcagctgcggcctggccaagaaattgacctgctcatgcactgtgtcaagggcattggcaaagatcatgccaagttttcaccagtggcaacagccagttacaggctcctgccagacatcaccctgcttgagcccgtggaaggggaggcagctgaggagttgagcaggtgcttctcacctggtgttattgaggtgcaggaagtccaaggtaaaaaggtggccagagttgccaacccccggctggataccttcagcagagaaatcttccggaatgagaagctaaagaaggttgtgaggcttgcccgggttcgagatcattatatctgtaagaaagatttgctggctgcggtggctcacacctgtaatcccagcactttgggaggccaaggcgagtggatcacggggtcaagagagcgagaccatcctggctaacatggtgaaaccccgtctctactaaaaaaaaaaaaaaaaaaaaaaaaaattagtcgggcatgggggcgagcgcctgtagtcccagctactcgagaagctaaggcaagagaatggtgtgaacctgggaggcgaagcttgcagtgagccgagatcacgccactgcactccagcctgggcaacagagcaagactccgtctcaaaaaaaaaaaaaaagaaaagaaagaaagaga

SEQ ID NO: 23026 - DNA, 1150 bp, Homo sapiens
  source 1..1150: mol_type = unassigned DNA
agggctactaggacgcacgcgcgagatagaacctctagtctcgtggagagattgaagatggcggcttctcaggcggtggaggaaatgcggagccgcgtggttctgggggagtttggggttcgcaatgtccatactactgactttcccggtaactattccggttatgatgatgcctgggaccaggaccgcttcgagaagaatttccgtgtggatgtagtacacatggatgaaaactcactggagtttgacatggtgggaattgacgcagccattgccaatgcttttcgacgaattctgctagctgaggtgccaactatggctgtggagaaggtcctggtgtacaataatacatccattgttcaggatgagattcttgctcaccgtctggggctcattcccattcatgctgatccccgtctttttgagtatcggaaccaaggagatgaagaaggcacagagatagatactctacagtttcgtctccaggtcagatgcactcggaacccccatgctgctaaagattcctctgaccccaacgaactgtacgtgaaccacaaagtgtataccaggcatatgacatggatccccctggggaaccaggctgatctctttccagagggcactatccgaccagtgcatgatgatatcctcatcgctcagctgcggcctggccaagaaattgacctgctcatgcactgtgtcaagggcattggtaaaaaggtggccagagttgccaacccccggctggataccttcagcagagaaatcttccggaatgagaagctaaagaaggttgtgaggcttgcccgggttcgagatcattatatcttctctgttgagtcaacgggggtgttgccaccagatgtgctggtgagtgaagccatcaaagtactgatggggaagtgccggcgcttcttggatgaactagatgcggttcagatggactgagcttggatgcttctgaggcaagctgaagctttgggttctgactgacccaccctacaggactgctgaacagagagcccagtgtgactagggatcctgagttttctgggacaattccagctttaatcaatacattttgttaaatgtgccataaaatgagactttttacgcctttataaggccttagatgtaaataaactcaccc

SEQ ID NO: 23027 - DNA, 1355 bp, Homo sapiens
  source 1..1355: mol_type = unassigned DNA
aggaggcggtgcgttgccacggagacggagcagggctactaggacgcacgcgcgagatagaacctctagtctcgtggagagattgaagatggcggcttctcaggcggtggaggaaatgcggagccgcgtggttctgggggagtttggggttcgcaatgtccatactactgactttcccggtaactattccggttatgatgatgcctgggaccaggaccgcttcgagaagaatttccgtgtggatgtagtacacatggatgaaaactcactggagtttgacatggtgggaattgacgcagccattgccaatgcttttcgacgaattctgctagctgaggtgccaactatggctgtggagaaggtcctggtgtacaataatacatccattgttcaggatgagattcttgctcaccgtctggggctcattcccattcatgctgatccccgtctttttgagtatcggaaccaaggagatgaagaaggcacagagatagatactctacagtttcgtctccaggtcagatgcactcggaacccccatgctgctaaagattcctctgaccccaacgaactgtacgtgaaccacaaagtgtataccaggcatatgacatggatccccctggggaaccaggctgatctctttccagagggcactatccgaccagtgcatgatgatatcctcatcgctcagctgcggcctggccaagaaattgacctgctcatgcactgtgtcaagggcattggcaaagatcatgccaagttttcaccagtggcaacagccagttacaggctcctgccagacatcaccctgcttgagcccgtggaaggggaggcagctgaggagttgagcaggtgcttctcacctggtgttattgaggtgcaggaagtccaaggtaaaaaggtggccagagttgccaacccccggctggataccttcagcagagaaatcttccggaatgagaagctaaagaaggttgtgaggcttgcccgggttcgagatcattatatcttctctgttgagtcaacgggggtgttgccaccagatgtgctggtgagtgaagccatcaaagtactgatggggaagtgccggcgcttcttggatgaactagatgcggttcagatggactgagcttggatgcttctgaggcaagctgaagctttgggttctgactgacccaccctacaggactgctgaacagagagcccagtgtgactagggatcctgagttttctgggacaattccagctttaatcaatacattttgttaaatgtgccataaaatgagactttttacgcctttataaggccttagatgtaaataaactcacccaaacaaaaaaactttttgagacta

SEQ ID NO: 23028 - DNA, 1945 bp, Homo sapiens
  source 1..1945: mol_type = unassigned DNA
gtcctccgcgccttccgtcggtcggtccttgcttcctgcttcgcctccgcgcctcgcgctatgggacagagcccccgatccgccagcaccacctgaggatccagaaaccgccccagcgatggaagaggatcaggagctggagaggaaagcaatagaagaactgcttaaggaggcaaaacgtgggaaaactagagctgaaacaatgggacccatgggttggatgaagtgtcctcttgctagcaccaataaaagatttctaattaacacaattaaaaacacattgccctctcataaagagcaagaccatgaacaaaaagagggcgataaggaaccagcgaagagccaggcccagaaagaagaaaacccgaagaaacacagaagccatccttacaagcacagcttccgcgctcgaggttccgccagttactccccgccacgaaagcggagcagccaggacaagtacgaaaagcggtccaaccggcggtgaggctggaaccagggccagccagccctgcgggcctccgtgctccttcggggtgcggtgtgcggagaaggcctgagctggcagggcaaacacctgagagtgactttgacattaggtcctttgttgtttttaaagaggctgctggccacaggcaaaaaaaatgacctagcaactcttgaggaaacaagtgcaaaggaggatgtcttggcaagtttaagctacttctgcagtgtagtagacttacatattgttgtttatcttgtttggaagtgtgtttcaaaataaacatgtctagaatttaaagttttcagagattgttaaaactggttccaattttttggtcatttctcagaaaaataaaatacttataaatcctatattttactttttgggggtattacatttaaaatttagaaatcatcagtccagtgaccatatttatgaaaagctgtagccctccaaggtctgggaatttatcgagaagctctttgatagctctgcatttgttttcccttaggtgaacaatgtaggaaatcctcaaagtggctttgaatttaatgctccacttcagttaccagaggttaaaaatgggttttgttgtttcctgtgcattctcaaactcatttattagatagaacaatctttctatatttaatttttttaatatataggtcttaagtggtgctttaaaaagaaccctcacaagttaaaaattaagagttgtttcagtgctagatcttaccagctaaagacttgtgataccactatatagtatagttgttccagaaatcttcattttaaatagaagtgtttacaatgccttttttcccccagtattggttttcaatacctgttttcatatacaattacaaacctttcaaacctgtattccttctttatactcaggaaaatgtcaccaagcaccctcctccccagttcacaaaaggaagaagatgaagattctgtctccctgttccccctccccagttttccaaagtgtctgagcatatgcctggctgtcctcagatcatcaccatgccacatccctgctccctacttcctggcagccaagaaaagccctttctacatgctagaaggaaatacatccaaaaagttagcattggagtgttagaaactagaatagacctctccgccaccgagctgctgtgtcacgccctcagcctgctagggagtgacaagcccaagtcattcttgatccaccccttctcccaccccagatcccagggactcatcctgtgactttgtaaccacactcattcctttcaaacacagaggaggaattattgcttcatctgactttattcaaatctagttatgtattggcctaaattatttgtgcaaaatttgaaatgttttttatttaaatattagaaatagcacaaagtcatggagtttttaaaaattgttataattaagtaaaaataaagctgaattgtgtca

SEQ ID NO: 23029 - DNA, 1626 bp, Homo sapiens
  source 1..1626: mol_type = unassigned DNA
ccccactcgccccgggctgtccccgccgcccgcctgattcccctgcggaagccccgctggctaggtgtctgcgcgcacccccggccgccgccaagagtggcacagctggggaaggagtgaacatccagaggaatcgcggggcggggtggggggaggccaggagaacaggtggcgcagggaagcagaaacgtagttgcgctggacagctggagtcgggcagggtcggggccagcggcgaggggacaagaagggccgattcgagaggaagcgcacctgagggagcacagcgaaggccgggacgcagggagctggatggagagcgagcctgggcggcgaaaggttgccgaggcgggggctgggcgcctgggaacaaagttgaaaatgcaactgcaagctccccggtgaaacaaataccgccttcaaccttcgtattctgtggtgactcatctcgcacgtgacccccctccctcttcaaggtgtgttgaccgactacagtttaagcctgtcgtcccacaaaaggcccgggagggccggggtcccaggaagggccatcctgggtcaacaccgccccagttgggaagtcgggccgctttcggacttgccactgggaagggaagtgatttgggggcggcaggtaaggccgcgccccttcgccatcacctggggaaaggtaccagagttgagccggggcgcccgcaggcctgtctgggcctcggggtaaggcggcgctggccccgccccctgcccctcccgccgcgagtggcctcgcgtggtcgcccaggtgagccgcggggccgcgagccaccgctcaccccgcgtcggggcgggggctgggggtggagcctcatgccccgccccgcggctgggccctgccgcgccgctgcggctcctcctccctccttccgtcctccgcgccttccgtcggtcggtccttgcttcctgcttcgcctccgcgcctcgcgctatgggacagagcccccgatccgccagcaccacctgaggatccagaaaccgccccagcgatggaagaggatcaggagctggagagaaaaatatctggattgaagacctcaatggctgaaggcgagaggaagacagccctggaaatggtccaggcagctggaacagatagacactgtgtgacatttgtattgcacgaggaagaccataccctaggaaattctctacgttacatgatcatgaagaacccggaagtggaattttgtggttacactacgacccatccttcagagagcaaaattaatttacgcattcagactcgaggtacccttccagctgttgagccatttcagagaggcctgaatgagctcatgaatgtctgccaacatgtgcttgacaagtttgaggccagcataaaggactataaggatcaaaaagcaagcagaaatgaatccacattctagtcctttatgcagtatacaaggagaactgtcctgtaggatattctcttcctgatggtgcagaacccagaattagaagtttgtggttacagcatactctgtccttcagaaaggcgtgattctagctgttgaccccttgcagctgttggaatctctgcaagaacctctgtattcttctaataaattccctcttttatttaaacta

SEQ ID NO: 23030 - DNA, 690 bp, Homo sapiens
  source 1..690: mol_type = unassigned DNA
ccttgcttcctgcttcgcctccgcgcctcgcgctatgggacagagcccccgatccgccagcaccacctgaggatccagaaaccgccccagcgatggaagaggatcaggagctggagagaaaaatatctggattgaagacctcaatggctgaaggcgagaggaagacagccctggaaatggtccaggcagctggaacagatagacactgtgtgacatttgtattgcacgaggaagaccataccctaggaaattctctacgttacatgatcatgaagaacccggaagtggaattttgtggttacactacgacccatccttcagagagcaaaattaatttacgcattcagactcgaggtacccttccagctgttgagccatttcagagaggcctgaatgagctcatgaatgtctgccaacatgtgcttgacaagtttgaggccagcataaaggactataaggatcaaaaagcaagcagaaatgaatccacattctagtcctttatgcagtatacaaggagaactgtcctgtaggatattctcttcctgatggtgcagaacccagaattagaagtttgtggttacagcatactctgtccttcagaaaggcgtgattctagctgttgaccccttgcagctgttggaatctctgcaagaacctctgtattcttctaataaattccctcttttattt

SEQ ID NO: 23031 - DNA, 6568 bp, Homo sapiens
  source 1..6568: mol_type = unassigned DNA
gggagctgaaaaatttccggtaagggaaagaagggctcctttcgctccttatttccccgcctccttccctcccccaccttcccctcctccggctttttcctcccaactcggggaggtccttcccggtggccgccctgacgaggtctgagcacctaggcggaggcggcgcaggctttttgtagtgaggtttgcgcctgcgcagcgcgcctgcctccgccatgcacgggggtggccccccctcgggggacagcgcatgcccgctgcgcaccatcaagagagtccagttcggagtcctgagtccggatgaactgaagcgaatgtctgtgacggagggtggcatcaaatacccagagacgactgagggaggccgccccaagcttggggggctgatggacccgaggcagggggtgattgagcggactggccgctgccaaacatgtgcaggaaacatgacagagtgtcctggccactttggccacattgaactggccaagcctgtgtttcacgtgggcttcctggtgaagacaatgaaagttttgcgctgtgtctgcttcttctgctccaaactgcttgtggactctaacaacccaaagatcaaggatatcctggctaagtccaagggacagcccaagaagcggctcacacatgtctacgacctttgcaagggcaaaaacatatgcgagggtggggaggagatggacaacaagttcggtgtggaacaacctgagggtgacgaggatctgaccaaagaaaagggccatggtggctgtgggcggtaccagcccaggatccggcgttctggcctagagttgtatgcggaatggaagcacgttaatgaggactctcaggagaagaagatcctgctgagtccagagcgagtgcatgagatcttcaaacgcatctcagatgaggagtgttttgtgctgggcatggagccccgctatgcacggccagagtggatgattgtcacagtgctgcctgtgcccccgctctccgtgcggcctgctgttgtgatgcagggctctgcccgtaaccaggatgacctgactcacaaactggctgacatcgtgaagatcaacaatcagctgcggcgcaatgagcagaacggcgcagcggcccatgtcattgcagaggatgtgaagctcctccagttccatgtggccaccatggtggacaatgagctgcctggcttgccccgtgccatgcagaagtctgggcgtcccctcaagtccctgaagcagcggttgaagggcaaggaaggccgggtgcgagggaacctgatgggcaaaagagtggacttctcggcccgtactgtcatcacccccgaccccaacctctccattgaccaggttggcgtgccccgctccattgctgccaacatgacctttgcggagattgtcacccccttcaacattgacagacttcaagaactagtgcgcagggggaacagccagtacccaggcgccaagtacatcatccgagacaatggtgatcgcattgacttgcgtttccaccccaagcccagtgaccttcacctgcagaccggctataaggtggaacggcacatgtgtgatggggacattgttatcttcaaccggcagccaactctgcacaaaatgtccatgatggggcatcgggtccgcattctcccatggtctacctttcgcttgaatcttagtgtgacaactccgtacaatgcagactttgacggggatgagatgaacttgcacctgccacagtctctggagacgcgagcagagatccaggagctggccatggttcctcgcatgattgtcaccccccagagcaatcggcctgtcatgggtattgtgcaggacacactcacagcagtgcgcaaattcaccaagagagacgtcttcctggagcggggtgaagtgatgaacctcctgatgttcctgtcgacgtgggatgggaaggtcccacagccggccatcctaaagccccggcccctgtggacaggcaagcaaatcttctccctcatcatacctggtcacatcaattgtatccgtacccacagtacccatcccgatgatgaagacagtggcccttacaagcacatctctcctggggacaccaaggtggtggtggagaatggggagctgatcatgggcatcctgtgtaagaagtctctgggcacgtcagctggctccctggtccacatctcctacctagagatgggtcatgacatcactcgcctcttctactccaacattcagactgtcattaacaactggctcctcatcgagggtcatactattggcattggggactccattgctgattctaagacttaccaggacattcagaacactattaagaaggccaagcaggacgtaatagaggtcatcgagaaggcacacaacaatgagctggagcccaccccagggaacactctgcggcagacgtttgagaatcaggtgaaccgcattcttaacgatgcccgagacaagactggctcctctgctcagaaatccctgtctgaatacaataacttcaagtctatggtcgtgtccggagctaaaggttccaagattaacatctcccaggtcattgctgtcgttggacagcagaacgtcgagggcaagcggattccatttggcttcaagcaccggactctgcctcacttcatcaaggatgactacgggcctgagagccgtggctttgtggagaactcctacctagccggcctcacacccactgagttctttttccacgccatggggggtcgtgaggggctcattgacacggctgtcaagactgctgagactggatacatccagcggcggctgatcaagtccatggagtcagtgatggtgaagtacgacgcgactgtgcggaactccatcaaccaggtggtgcagctgcgctacggcgaagacggcctggcaggcgagagcgttgagttccagaacctggctacgcttaagccttccaacaaggcttttgagaagaagttccgctttgattataccaatgagagggccctgcggcgcactctgcaggaggacctggtgaaggacgtgctgagcaacgcacacatccagaacgagttggagcgggaatttgagcggatgcgggaggatcgggaggtgctcagggtcatcttcccaactggagacagcaaggtcgtcctcccctgtaacctgctgcggatgatctggaatgctcagaaaatcttccacatcaacccacgccttccctccgacctgcaccccatcaaagtggtggagggagtcaaggaattgagcaagaagctggtgattgtgaatggggatgacccactaagtcgacaggcccaggaaaatgccacgctgctcttcaacatccacctgcggtccacgttgtgttcccgccgcatggcagaggagtttcggctcagtggggaggccttcgactggctgcttggggagattgagtccaagttcaaccaagccattgcgcatcccggggaaatggtgggggctctggctgcgcagtcccttggagaacctgccacccagatgaccttgaataccttccactatgctggtgtgtctgccaagaatgtgacgctgggtgtgccccgacttaaggagctcatcaacatttccaagaagccaaagactccttcgcttactgtcttcctgttgggccagtccgctcgagatgctgagagagccaaggatattctgtgccgtctggagcatacaacgttgaggaaggtgactgccaacacagccatctactatgaccccaacccccagagcacggtggtggcagaggatcaggaatgggtgaatgtctactatgaaatgcctgactttgatgtggcccgaatctccccctggctgttgcgggtggagctggatcggaagcacatgactgaccggaagctcaccatggagcagattgctgaaaagatcaatgctggttttggtgacgacttgaactgcatctttaatgatgacaatgcagagaagctggtgctccgtattcgcatcatgaacagcgatgagaacaagatgcaagaggaggaagaggtggtggacaagatggatgatgatgtcttcctgcgctgcatcgagtccaacatgctgacagatatgaccctgcagggcatcgagcagatcagcaaggtgtacatgcacttgccacagacagacaacaagaagaagatcatcatcacggaggatggggaattcaaggccctgcaggagtggatcctggagacggacggcgtgagcttgatgcgggtgctgagtgagaaggacgtggaccccgtacgcaccacgtccaatgacattgtggagatcttcacggtgctgggcattgaagccgtgcggaaggccctggagcgggagctgtaccacgtcatctcctttgatggctcctatgtcaattaccgacacttggctctcttgtgtgataccatgacctgtcgtggccacttgatggccatcacccgacacggagtcaaccgccaggacacaggaccactcatgaagtgttcctttgaggaaacggtggacgtgcttatggaagcagccgcacacggtgagagtgaccccatgaagggggtctctgagaatatcatgctgggccagctggctccggccggcactggctgctttgacctcctgcttgatgcagagaagtgcaagtatggcatggagatccccaccaatatccccggcctgggggctgctggacccaccggcatgttctttggttcagcacccagtcccatgggtggaatctctcctgccatgacaccttggaaccagggtgcaacccctgcctatggcgcctggtcccccagtgttgggagtggaatgaccccaggggcagccggcttctctcccagtgctgcgtcagatgccagcggcttcagcccaggttactcccctgcctggtctcccacaccgggctccccggggtccccaggtccctcaagcccctacatcccttcaccaggtggtgccatgtctcccagctactcgccaacgtcacctgcctacgagccccgctctcctgggggctacacaccccagagtccctcttattcccccacttcaccctcctactcccctacctctccatcctattctccaaccagtcccaactatagtcccacatcacccagctattcgccaacgtcacccagctactcaccgacctctcccagctactcacccacctctcccagctactcgcccacctctcccagctactcgcccacctctcccagctactcacccacttcccctagctactcgcccacttcccctagctactcgccaacgtctcccagctactcaccgacatctcccagctactcgccaacttcacccagctattctcccacttctcccagctactcacctacctctccaagctattcacccacctcccccagctactcacccacttccccaagttactcacccaccagcccgaactattctccaaccagtcccaattacaccccaacatcacccagctacagcccgacatcacccagctattcacctactagtcccaactacacacctaccagccctaactacagcccaacctctccaagctactctccaacatcacccagctattccccgacctcaccaagttactccccttccagcccacgatacacaccacagtctccaacctataccccaagctcacccagctacagccccagctcgcccagctacagcccagcctcacccaagtacaccccaaccagtccttcttacagtcccagctccccagagtataccccaacctctcccaagtactcacctaccagtcccaaatattcacccacctctcccaagtactcgcctaccagtcccacctattcacccaccaccccaaaatactccccaacatctcctacttattccccaacctctccagtctacaccccaacctctcccaagtactcacctactagccccacttactcgcccacttcccccaagtactcgcccaccagccccacctactcgcccacctcccccaaaggctcaacctactctcccacttcccctggttactcgcccaccagccccacctacagtctcacaagcccggctatcagcccggatgacagtgacgaggagaactgagggcacgtggggtgcggcagcgggctagggcccagggcagcttgcccgtgctgctgtgcagttcttgcctccctcacggggcgtcacccccagcccagctccgttgtacataaatgccttgtggcagagctcccggtgaacttctggatcccgtttctgatgcagactcttgtcttgttctccacttgtgctgttagaactcactggcccagtggtgttctcactcctaccccacccaccccctgcctgtccccaaattgaagatccttccttgcctgtggcttgatgcggggcgggtaaagggtattttaacttaggggtagttcctgctgtgagtggttacagctgatcctcgggaagaacaaagctaaagctgccttttgtctgttattttatttttttgaagtttaaataaagtttactaattttgaccaaaa

SEQ ID NO: 23032 - DNA, 2057 bp, Homo sapiens
  source 1..2057: mol_type = unassigned DNA
atggacagtacaaacagtactaccacgaacgtccctgcactcgtatctttgtttacaactgcaagtgtttctgcagtatgaattcttagaagtgttactgttaagtgaaggacgtatgcgtgttttgccaaactaccctccgagatagctgaatctggtacattttaaagcaggaggccgcagaagacgctcggcagttctggcctccgagcagcaggcggcgctgtgagtcgtctttgcggaagccgcggaggcctcgctgactgacttccggtgttggcggtggcgccgcgcagtcaccgcggagcagacgcggaggctggtggcccctgggcgagatgccgtacgccaaccagcctaccgtgcggatcacggagctcactgacgagaatgtcaagttcatcatcgagaacaccgacctggcggtggccaattcgattcggagggtcttcatcgctgaggttcccataatagccattgactgggttcagattgatgccaattcctcagttcttcatgatgaattcattgctcacaggcttggattaattcccctcattagtgatgacattgtggacaagctgcagtactctcgggactgcacatgtgaggagttctgccccgagtgctcggtggagttcaccctcgatgtgcggtgcaatgaagaccagacgcgacatgtcacgtctcgagacctcatctccaacagcccccgggtcattccggtgacatcccggaaccgagataatgaccccaatgactacgtggagcaggatgacatcctcatcgtcaagttgagaaagggccaggagctgagacttcgagcctatgccaaaaagggctttggcaaggagcatgccaagtggaaccctactgcaggggtggcttttgaatacgatccagacaatgccctgaggcacacagtgtaccccaagcccgaggaatggccaaagagtgagtactcggagctggatgaggatgagtcgcaggctccctatgaccccaacggcaagccagaaaggttttactacaatgtggagtcctgtggctctctgcgtcctgaaaccattgtcctgtcagccctctcaggattgaagaagaaactgagtgatttacaaactcaattaagccacgagatccagagtgatgtgctaaccataaattaactgcagcttgcctgcttcagcaaaaacggagattcaggccagcagctggatatgggggtctctcttcagactcttctcgtttctgagaatctagtctactgttggttgagcttcttggcaggacatcagtaccaactagaagtgggtcatagatagattaccagggatgcagtggtgtttaggcaggataggtctttactggccctgactgctgttaataattggcagcagtgctccccagatcccagaaggtccctgctggagtgtttccagtgcacctgtagggaaccaactagacttctctcctggttagtccagctctttactctaaaccctttctgtccaaaatgagtcattttcagttgtaccttagatgtctggtgttgaggatcaagtgccatagcctttattcagggggcctataaacccttccagttcttgccccagggctggcctgctagcgcttcaaattcccaggtgtccctaatttgagaagtaaccttttggaatagcattagaccctggctgtcccctccccaccaaataaacatgatatttcattctctgtccagcagtcatgaaccccttcacctccaatgacctgatcatttagtttggtgggggtgggggtgggggtgggggtggaagcagccgcaggagcaagggcccctcccacatacacaggaggagtatttcatttctccttaatgaaggctctggccctaacccctcagcactgtctccagataggaacatgcacaaagcagttaattaggcagcctggagaaaaccagagatccagtacagaaaggaaaggatatttattgattaacagaagttgtctttttaaaagtgtttatttttggcaataaagagcacaacataatctcc

SEQ ID NO: 23033 - DNA, 2866 bp, Homo sapiens
  source 1..2866: mol_type = unassigned DNA
ggattcggcgcaggcgcagtccgcgcgggttctcgcgcggagaaggggtgcgagcggcggcggcggcggaggctgccatggacgacgaggaggagacgtaccggctctggaaaatccgcaagaccatcatgcagctgtgccacgaccgtggctatctggtgacccaggacgagcttgaccagaccctggaggagttcaaagcccaatctggggacaagccgagtgaggggcggccgcggcgcacggacctcaccgtgctggtggcccacaacgatgaccccaccgaccagatgtttgtgttctttccagaggagcccaaggtgggcatcaagaccatcaaggtgtactgccagcgcatgcaggaggagaacatcacacgggctctcatcgtggtgcagcagggcatgacaccctccgccaagcagtccctggtcgacatggcccccaagtacatcctggagcagtttctgcagcaggagctgctcatcaacatcacggagcacgagctagtccctgagcacgtcgtcatgaccaaggaggaggtgacagagctgctggcccgatataagctccgagagaaccagctgcccaggatccaggcgggggaccctgtggcgcgctactttgggataaagcgtgggcaggtggtgaagatcatccggcccagtgagacggctggcaggtacatcacctaccggctggtgcagtagctaccgcctgacagcccctagaggcggacacacagcgacccccatccctgcaggacaaacgcccctgccctgccagaatccggcccccacagctctcacggctgctgctcctctggactccccaaggcaggtggcctccacccacgttctcccgtcctggggtgaggcttcctgtggcccagcccgccccattcacctgtggatttgtgcgagatgcagcctcagaaggaacaaggcccccagagggaggtcacctgggggcagctggtgccgggtcttcacccagaccacgctgggtcccctctgttgggggtttggggtccgggtctcccaccagccactgcttcctcctgggccctcggccttccacccctcgtcttccctccctcgggggccctgatgcgtggcggcccccgcccggcctcggctctttactccattcacagccatgcacgcgctcaagccaccagggtgcgagatgccagctctggagttctcggttgttgtaggaggttgggtgttttcaaatggtaaagatgttttgagcaaataaatttgcttgatacagaaaccaggccgactaacaaggtttccagcaggtggccttgcctcaccccaagcacacgaggtcagcctggcaggtgtgccctcctcgcgctggcttcaggggtcagtgtctccccaggccctcgccctgccctcccacttcgtgctcctgggtaaggcgtgagcgtgtctgtctcttcccttcccgtgagggtgtggagttgttctctggcttgtgcagctgtggtttgcggccagttcctcttacagacgtttgggatctggctctacttccccgtttgcttactgtctgatttcagaaggcctcgcctgcccaagtttaacctagccacgtggttctctcacagtagctttattaagatgtaattcaccctcgggcggtcggtggtctgtaacgcgcccactgttctgtgcagcagggtccccagatccccaggccgcggactgtgtgtgtgatggggacagtgcttccccttctctccaaatgtacttttttcaaaattgtcttggccaaagcaagccagacccaaagggacaaacactgatgtcactcctaggaggtcactagagtcgtcagagactggaagtaggatgggggttcccgggactggggagttgggtggggatgggggttcccagggctggggaggagggaggggacagagtgtgtcatgtgcacagttttagtttgggaagatgagaaaattctggaggtggccgggcgcggtggctcacgcctgtaatcccagcactttgggaggccgaggtgggcggatcacctgaggtcgggagttcgagaccagcctgaccaacatggcaaaatcccatcactgcaaaaaatacaaaaattacctgggcgtggtggtgcatgcctgtaatcccagctacttgggagctaaggcaggagaatcacttgaacccaggaagtggaggatcgcttgagctcaggagttaaaagaccagcccgggcaacacagagaaaccccccacctctacaaaaaactttaagattacctgggcacagtggctcacacctgtaatcccaacactttgggaggctgaggcgggaggatcatttgagcccaggaggccgaggctgcagtgagctacgattgtgctcctgtactccagcctgggccacagggtcacaccctgtctcaaaaaaaaaaaaaaatgcagttccacaggcgcatgggccacgtttccagtgcttggtggccatgtggggctgacgtgcgaaaccttagagccgggggatacgtccgtcatcgagaacgttttcctggactgccctgggctgcaggtggacgtgacgaggtcattcgatgcctgaccgtctgcacagcctgtggtgaagaccacccgggctcccacctcgcggggccccgtggcggggggttcccttcctcacacatccctcccctagggggaggcccagggccacgccacggggctctctctgtcccctccctggccccttcttctaagcttgcagctgccacagaaaatcttctaagcttgcagctgccacagaaaacacccgattaaaaactttttatttcagcaaaataaacgtgcctgtgaaagaa

SEQ ID NO: 23034 - DNA, 560 bp, Homo sapiens
  source 1..560: mol_type = unassigned DNA
gcgcgagtcgtagtgtcgctgtttgcgggtctccgcgcgggaccggggcgcagcggggtcgctgaggcgagggtgtcatgtcagacaacgaggacaattttgatggcgacgactttgatgatgtggaggaggatgaagggctagatgacttggagaatgccgaagaggaaggccaggagaatgtcgagatcctcccctctggggagcgaccgcaggccaaccagaagcgaatcaccacaccatacatgaccaagtacgagcgagcccgcgtgctgggcacccgagcgctccagattgcgatgtgtgcccctgtgatggtggagctggagggggagacagatcctctgctcattgccatgaaggaactcaaacttctctgggggctggaatacacagtgctgagaccctcctacgcactggcccacagcctaggctctttcagcatctcctcccgctgacttctcccgacagtcctgctgggtggatatcatcaccccattgtacagatgcataaactgagcccaggttgctgatggtctcacccgagctgaacacaggat

SEQ ID NO: 23035 - DNA, 582 bp, Homo sapiens
  source 1..582: mol_type = unassigned DNA
ataagctaggagccgcgcgagtcgtagtgtcgctgtttgcgggtctccgcgcgggaccggggcgcagcggggtcgctgaggcgagggtgtcatgtcagacaacgaggacaattttgatggcgacgactttgatgatgtggaggaggatgaagggctagatgacttggagaatgccgaagaggaaggccaggagaatgtcgagatcctcccctctggggagcgaccgcaggccaaccagaagcgaatcaccacaccatacatgaccaagtacgagcgagcccgcgtgctgggcacccgagcgctccagattgcgatgtgtgcccctgtgatggtggagctggagggggagacagatcctctgctcattgccatgaaggaactcaacgcccgctcggcctcagaaccgcccggagaggagccgccctggatggacagagggacgagggacgagcatctgccgtcgtgtcccggctgccctgcagtcgcctccaacacccgctgctgcccgcccgctgcctgcctgcctggcatctctctctcccggaggcggcggctcagagaggagtgactcgcctgaagccc

SEQ ID NO: 23036 - DNA, 2106 bp, Homo sapiens
  source 1..2106: mol_type = unassigned DNA
agtgatttcctctgggttacggcgcaggcgcaagataagctaggagccgcgcgagtcgtagtgtcgctgtttgcgggtctccgcgcgggaccggggcgcagcggggtcgctgaggcgagggtgtcatgtcagacaacgaggacaattttgatggcgacgactttgatgatgtggaggaggatgaagggctagatgacttggagaatgccgaagaggaaggccaggagaatgtcgagatcctcccctctggggagcgaccgcaggccaaccagaagcgaatcaccacaccatacatgaccaagtacgagcgagcccgcgtgctgggcacccgagcgctccagattgcgatgtgtgcccctgtgatggtggagctggagggggagacagatcctctgctcattgccatgaaggaactcaaggcccgaaagatccccatcatcattcgccgttacctgccagatgggagctatgaagactggggggtggacgagctcatcatcaccgactgagctggagtcatcttcctgcccttgccccatgcccaattttcattctcactttatatgtgtaaataataaaatattcaactttccaacccccttcccctctgcttatctgcaatgtcaccacctgttgcttccccgttaccgccatgctgcgtggagcatgcacctattccagtggccctgtgactgtcagctccttaagaagcaccaggggcccttagcccctttggatcccccacatccttccctccatctccctgttccccagagcaaaggctgctgcaggggagacacctcagctgccttccaagcagacagacaagtctttgtgcccagggagctggttgccacggaaacccccaatttcctttccagtggggactggctgcaggggcttctcccttctcaggagtatcacagagcaggtctcatcaagccacccattgtttcctaaggacctgcttcgagcctcttatcgtgggctcggatcccctttcaggagcagtgccccagcaggaagcgtgggggtgtgctgatctcccaccctccccaggcagagccctgctgggcaagtcagcagctggagcaaggaccgagcacctgcctacccctgcccccatggctctgtccccactcctcctcaggactctgcccacacgctgtcctctgtggcccacctctttggtgtgccacacccatgccttcttcctagcctctataagatatcctttccctcctatttggggctggtgatcccctgaggccttggggacatggtgctggggtggtggtgctcctgggttccaggtgttacattaagtcagagctggagttcccccttcctctgcctgaggttctaatgggtcctcttcctttctccaccctgcttacccaacctgaggtaagaccagtcacactggctcctccctcctagagggggtcagggggagggtgtatattgacatgaacagggatagagggtaaactggctccctgaatatgccagccttaacctccattccactgccagctccccttcaaagaggaggagctgggcttccctaacctctgcaggaggcagggcctccaggcctaggtgcagcctggccctgggatgggatgtggggagtgaatggtgaggatctgcattggtgggaggggtgtccgctgccctggagaagggttaattcagggagcagtggacttcacactcccatccaccctcctccaagcctgtggaatcctttaatcaagttgggtgctgaaatttcagctctgaaatgccgcctttgtgctggcatccaggcagccgccccagagtgcgggggtcactttctcggccccatttctctaaatggtctctttgttccctgctgggctgctcagtatcagatgtgattaaagggagatggggtttgggctggggaggaggggaattgggggttaacccttaggggatagagtgcaagggaaatgggacagaaggggtgtttttcctcctgtcttcctcttcccattctcctcttttggggagtcccctgctattcagctgtctgggcctggcttttgacttctcttgaataaaatgtcccggtcacca

SEQ ID NO: 23037 - DNA, 827 bp, Homo sapiens
  source 1..827: mol_type = unassigned DNA
agtcgcagcaagcgcggaactggggttgcggcgtctaagtgtttccggtggattcccagggactgtcggaggtgtggactctgcctgcctacctggtctgggaagatgttctaccatatctccctagagcacgaaatcctgctgcacccgcgctacttcggccccaacttgctcaacacggtgaagcagaagctcttcaccgaggtggaggggacctgcacagggaagtatggctttgtaattgctgtcaccaccattgacaatattggtgctggtgtgatccagccaggccgaggctttgtcctttatccagttaagtacaaggccattgttttccggccatttaaaggggaggtcgtggatgctgttgtcactcaggtcaacaaggttggactcttcacagaaattgggcccatgtcttgcttcatctctcgacattccatcccttcagagatggagtttgatcctaactccaacccaccatgttacaagacaatggatgaggatattgtgattcagcaggacgatgagatccgcttaaagattgtggggacccgtgtggacaagaatgacatttttgctattggctccctgatggacgattacttggggcttgtaagctgagcctggtggcctcctacccttggtcctactctaggaagtgtgattgtcacacttatcatgttgtccagaggtccagtctggctgctgttgtggaggcaaggaaggcaactcatcccagaaggcatctggtgcttcttgtagcttaactactgcctcctcatttttcagtatgtgttctaagtataaaaagtccttggttctca

SEQ ID NO: 23038 - DNA, 821 bp, Homo sapiens
  source 1..821: mol_type = unassigned DNA
tccggtcttgtccacgctagggggtgcacgtactcccaactgtggtcgcgctctcaccccttctgctgctctcgtggccccctcgcgatggcgggcatcctgtttgaggatattttcgatgtgaaggatattgacccggagggcaagaagtttgaccgagtgtctcgactgcattgtgagagtgaatctttcaagatggatctaatcttagatgtaaacattcaaatttaccctgtagacttgggtgacaagtttcggttggtcatagctagtaccttgtatgaagatggtaccctggatgatggtgaatacaaccccactgatgataggccttccagggctgaccagtttgagtatgtaatgtatggaaaagtgtacaggattgagggagatgaaacttctactgaagcagcaacacgcctctctgcgtacgtgtcctatgggggcctgctcatgaggctgcagggggatgccaacaacctgcatggattcgaggtggactccagagtttatctcctgatgaagaagctagccttctgaacctcgcctgaagccagcctctctgccaagtcactcaggtcatgggcattgttcaagcctgagtggcagccgctcttgctcacctgttgaggaagggctggctcactgtccaccgtggcggcatctttaactggcctccactcaatgggaaactgactcgcctgtgaaagacacagtgggagagctgaaaatgaatcagaagctttatgtatatgatttttaaattaaactttactttttcagactgcccctcccctttttgtaaaaagtccatttactgt

SEQ ID NO: 23039 - DNA, 836 bp, Homo sapiens
  source 1..836: mol_type = unassigned DNA
ggcccagccaggctggggtccgcgcggggcctcccgagaggcggcaaggggcgctgggaaggcgcaagcccgcgccggctccctgcggatgcccgggtcggagaggggcgcccgggaggggcgggtctactggcacgtggaggggccggcccgggttcgcggttccccgtgcccaggcaggaggggctgcagacgcctgagctccgtaggggttggggctgggggctgcggagctgtctacatcggactcctccgggtcagcccgttaggagccgcctcccctctgcccctccgaagagacgagcggcccagacaggcctgggaaggcccctctgccccgtcaggggtgaaaagcaaagctggaaggattcggagagggttggggccgtcttcctcatccttccttttctcggggctcccgtgggcccccacgcattccagtcttcggaacccggcctctgaagagggcgcagtagggccccagcggagcgcgagaacccgctctacagcctattgcttccccgccctgggcagagccacctggacatgagacccgccctcaatgccgaagcctctcggaagcaatctttcgggacggaagttaagtagccccgagcgggaggctgtggcggaagtggtcgcgttaccgcttgtttgtgcgcatgcgccactctcgtctggccgccgcgctttcaggaggtgcttttggttctctccggtcttgtccacgctagggggtgcacgtactcccaactgtggtcgcgctctcaccccttctgctgctctcgtggccccctcgcgatggcgggcatcctgtttgaggatattttcgatgt

SEQ ID NO: 23040 - DNA, 823 bp, Homo sapiens
  source 1..823: mol_type = unassigned DNA
gaagagctggtatccaagggacagggcagtgccaggctgaaggggcacggaggggatccgtgtccaggagaaggcagtggagggggaacgcgcagcactaagctggagggagccacctggacatgagacccgccctcaatgccgaagcctctcggaagcaatctttcgggacggaagttaagtagccccgagcgggaggctgtggcggaagtggtcgcgttaccgcttgtttgtgcgcatgcgccactctcgtctggccgccgcgctttcaggaggtgcttttggttctctccggtcttgtccacgctagggggtgcacgtactcccaactgtggtcgcgctctcaccccttctgctgctctcgtggccccctcgcgatggcgggcatcctgtttgaggatattttcgatgtgaaggatattgacccggagggcaagaagtttgaccgagtgtctcgactgcattgtgagagtgaatctttcaagatggatctaatcttagatgtaaacattcaaatttaccctgtagacttgggtgacaagtttcggttggtcatagctagtaccttgtatgaagatggtaccctggatgatggtgaatacaaccccactgatgataggccttccagggctgaccagtttgagtatgtaatgtatggaaaagtgtacaggattgagggagatgaaacttctactgaagcagcaacacgcctctctgcgtacgtgtcctatgggggcctgctcatgaggctgcagggggatgccaacaacctgcatggattcgaggtggactccagagtttatctcctgatgaagaagctagc

SEQ ID NO: 23041 - DNA, 1802 bp, Homo sapiens
  source 1..1802: mol_type = unassigned DNA
gggacggcccagccaggctggggtccgcgcggggcctcccgagaggcggcaaggggcgctgggaaggcgcaagcccgcgccggctccctgcggatgcccgggtcggagaggggcgcccgggaggggcgggtctactggcacgtggaggggccggcccgggttcgcggttccccgtgcccaggcaggaggggctgcagacgcctgagctccgtaggggttggggctgggggctgcggagctgtctacatcggactcctccgggtcagcccgttaggagccgcctcccctctgcccctccgaagagacgagcggcccagacaggcctgggaaggcccctctgccccgtcaggggtgaaaagcaaagctggaaggattcggagagggttggggccgtcttcctcatccttccttttctcggggctcccgtggcgacgtcatggcaaattcccaaactggacggatccggctcgggttacgtccagcagggccgagccggcccaggccggccccggggtcctcggtgccggctggaggggctgggcacctctggggcggggttctgctccacctgccctcggcgcggactgtgccctcggcgggcacgcggaccggcggggtagggctagggcccggcttctctgggccaaggatcaaggtccctgcctgggttaggcccccacgcattccagtcttcggaacccggcctctgaagagggcgcagtagggccccagcggagcgcgagaacccgctctacagcctattgcttccccgccctgggcagagccacctggacatgagacccgccctcaatgccgaagcctctcggaagcaatctttcgggacggaagttaagtagccccgagcgggaggctgtggcggaagtggtcgcgttaccgcttgtttgtgcgcatgcgccactctcgtctggccgccgcgctttcaggaggtgcttttggttctctccggtcttgtccacgctagggggtgcacgtactcccaactgtggtcgcgctctcaccccttctgctgctctcgtggccccctcgcgatggcgggcatcctgtttgaggatattttcgatgtgaaggatattgacccggagggcaagaagtttgaccgagtgtctcgactgcattgtgagagtgaatctttcaagatggatctaatcttagatgtaaacattcaaatttaccctgtagacttgggtgacaagtttcggttggtcatagctagtaccttgtatgaagatggtaccctggatgatggtgaatacaaccccactgatgataggccttccagggctgaccagtttgagtatgtaatgtatggaaaagtgtacaggattgagggagatgaaacttctactgaagcagcaacacgcctctctgcgtacgtgtcctatgggggcctgctcatgaggctgcagggggatgccaacaacctgcatggattcgaggtggactccagagtttatctcctgatgaagaagctagccttctgaacctcgcctgaagccagcctctctgccaagtcactcaggtcatgggcattgttcaagcctgagtggcagccgctcttgctcacctgttgaggaagggctggctcactgtccaccgtggcggcatctttaactggcctccactcaatgggaaactgactcgcctgtgaaagacacagtgggagagctgaaaatgaatcagaagctttatgtatatgatttttaaattaaactttactttttcagactgcccctcccctttttgtaaaaagtccatttactgtaaaatcgttttttccagtt

SEQ ID NO: 23042 - DNA, 871 bp, Homo sapiens
  source 1..871: mol_type = unassigned DNA
ggcccgggaaaggaccagaacaggcggcgaagactgaagcccggaggtaggagtggcaagagctcgcccagtccgcgaagggtaaactcgcgcatgcgcactggccttcaaccaagccaagcgccttggcttctgtcctggatgctcagtgttttgcggtttacgatgcgcatcgttttcccggctctggcaccagatccatactattctgtaaactgaggcggcgatgcccaaaaattggaagcaattactctaagatatcaaaagattgaagcaagccatgaaacctctgcgcggagagagccgagcccgaggcggcggggagccagcacgtgtgcgcagctccgccctcttttggcgaagcacctaggcctggcccctcccgcgacctgtagcgcggcggagcaagcgcggaaggctgggagggctgcgcgggctgcgcgtcgccatggagcccgacgggacttacgagccgggcttcgtgggtattcgcttctgccaggaatgtaacaacatgctgtaccccaaggaagacaaggagaaccgcattctgctctacgcgtgccggaactgtgattaccagcaggaggccgacaacagctgcatctatgtcaacaagatcacgcacgaagtggacgaactgacccagattatcgccgacgtgtcccaggaccccacgttgccgcggaccgaggaccacccgtgccaaaagtgcggccacaaggaggctgtgttcttccagtcacacagtgcgcgggccgaggacgccatgcgcctttactacgtgtgcacagccccacactgcggccaccgctggaccgagtgacctcctctctcccccgagtgtaataaacaccagattccatgcgtg

SEQ ID NO: 23043 - DNA, 932 bp, Homo sapiens
  source 1..932: mol_type = unassigned DNA
gcggcggcggcggacccttggggtctggacgcaacggcggcgggagcatgaacgcccctccagccttcgagtcgttcttgctcttcgagggcgagaagaagatcaccattaacaaggacaccaaggtacccaatgcctgtttattcaccatcaacaaagaagaccacacactgggaaacatcattaaatcacaactcctaaaagacccgcaagtgctatttgctggctacaaagtcccccaccccttggagcacaagatcatcatccgagtgcagaccacgccggactacagcccccaggaagcctttaccaacgccatcaccgacctcatcagtgagctgtccctgctggaggagcgctttcgggtggccataaaagacaagcaggaaggaattgagtaggggccagagggggctctgctcggcctgtgagccccgttcctacctgtgcctgaccctccgctccaggtaccacaccgaggagagcggccggtcccagccatggcccgccttgtggccacccctcaccctgacaccgacgtgtcctgtacatagattaggttttatattcctaataaagtatagcgggagagacctggatgtggacttgagcagcggtgacttcgcaagcaaatggattgtcaggcttgatgcaggcagatgacctgtttcaggggcgtccggctggcagggatgaattcattctggaccaaagatccggggtccaggggctgctgcgggggctgtgctgagccggagagaagtgtgcaaacccatgagctcccaagagtctctgctctagaagcctcaactcctgggcctgcctgtcagtcaaagcaggaacacttcttcctgcataactcgaaacacctttccacaggcttcttgtccacagtagagtttaataaaaatattcactgaaagacccccccc

SEQ ID NO: 23044 - DNA, 609 bp, Homo sapiens
  source 1..609: mol_type = unassigned DNA
ggcggacccttggggtctggacgcaacggcggcgggagcatgaacgcccctccagccttcgagtcgttcttgctcttcgagggcgagaagaagatcaccattaacaaggacaccaaggtacccaatgcctgtttattcaccatcaacaaagaagaccacacactgggaaacatcattaaatcacaactcctaaaagacccgcaagtgctatttgctggctacaaagtcccccaccccttggagcacaagatcatcatccgagtgcagaccacgccggactacagcccccaggaagcctttaccaacgccatcaccgacctcatcagtgagctgtccctgctggaggagcgctttcgggtgagggcggggcctggaggggcagacggggtggccataaaagacaagcaggaaggaattgagtaggggccagagggggctctgctcggcctgtgagccccgttcctacctgtgcctgaccctccgctccaggtaccacaccgaggagagcggccggtcccagccatggcccgccttgtggccacccctcaccctgacaccgacgtgtcctgtacatagattaggttttatattcctaataaagtatagcgg

SEQ ID NO: 23045 - DNA, 351 bp, Homo sapiens
  source 1..351: mol_type = unassigned DNA
atgaacgcccctccagccttcgagtcgttcttgctcttcgagggcgagaagatcaccattaacaaggacaccaaggtacccaaggcctgcttattcaccatcaacaaagaagaccacacactgggaaacatcattaaatcacgtgcctgcttccccttcgccttctgccgtgattgtcagtttcctgaggcctccccagccacgcttcctgtacagcctgcagaactctgccccagagcacatcagctatgtgccccagctctcaaacgacaccttggcggggaggctcaccctgtccaccttcacgctggagcagcctctaggccagttcagcagccacaacatctctga

SEQ ID NO: 23046 - DNA, 1714 bp, Homo sapiens
  source 1..1714: mol_type = unassigned DNA
agcccaacggggggcgatgagccgatccttgggcgggtttgccccgccggagtaatccggaagaggcctcttattagggctctggtggcggcggtggcggacacttggggtctggacgcaacggcggcgggagcatgaacgcccctccagccttcgagtcgttcttgctcttcgagggcgagaagatcaccattaacaaggacaccaaggtacccaaggcctgcttattcaccatcaacaaagaagaccacacactgggaaacatcattaaatcacaactcctaaaagacccgcaagtgctatttgctggctacaaagtcccccaccccttggagcacaagatcatcatccgagtgcagaccacgccggactacagcccccaggaagcctttaccaacgccatcaccgacctcatcagtgagctgtccctgctggaggagcgcttccggacgtgcctgcttccccttcgccttctgccgtgattgtcagtttcctgaggcctccccagccacgcttcctgtacagcctgcagaactctgccccagagcacatcagctatgtgccccagctctcaaacgacaccttggcggggaggctcaccctgtccaccttcacgctggagcagcctctaggccagttcagcagccacaacatctctgacttggataccatctggctggtggtggccctcagcaacgccacccagagcttcacggccccacggacaaaccaggacatccctgctcctgccaacttctcccagaggggctactatctcacactgagggccaaccgggtgctgtaccagaccagaggccagctccatgtcctccgcgtcggcaatgatacccactgccaaccaacaaaaattggctgcaaccatcccctaccaggacccggcccctacagggtgaagttcctggtgatgaatgacgaaggacccgtggctgaaaccaagtggtccagcgacactcgcctgcagcaagcccaggcacttcgggctgtccccggcccccagagcccgggcaccgtggtcatcatcgccatcctgtctatcctcctggccgtcctcctcacggtcctcctggctgtgctcatatacacctgcttcaacagctgcaggagcacttccctatcaggcccagaggaggcagggagtgtgagaagatacaccacgcacctcgcgttcagcactcctgccgagggggcttcctgaggggttccagaggggcccacgtgtccctccacctcctccctggcccaggctgcagagcctgagctgggacacgccctgaagcttctggaccctgagagagattgtttcttttctttactatttttttttttttttttgagacggagtctcactctgtcgccaggctggcgcgatcttggctcactgcaacctctgcctcacgggttcaagcgattttcctgcttcagcctcctgagtagctgggactacaggcacacgccaccatgcccagctcatttttgtatttttagtagagatggggtttcaccatgttggccaggatggcctccgtctcttgaccttgtgatccgcccgactcggcctcccaaaatgctgggattacaggcgtgagccatcaagtctggtgagagagattgtttctagatgagggtgggggcgggtgtccttagcccaaagcttgtgccagtctctatcagaaataaatgcccccaaaacctc

SEQ ID NO: 23047 - DNA, 998 bp, Homo sapiens
  source 1..998: mol_type = unassigned DNA
ggagtaagagagagagaaagagagacagcactgtgcgtcatgtaccagcgccggaagttggtctcgacacctggactagccgggttgtatttggaaacgcggagtgagtttttccgtgctgtgtaggggctaacaatggacacccagaaggacgttcaacctccaaagcagcaaccaatgatatatatctgtggagagtgtcacacagaaaatgaaataaaatctagggatccaatcagatgcagagaatgtggatacagaataatgtacaagaaaaggactaaaagattggtcgtttttgatgctcgatgaatgctgggaattcagaggaatgtcttcacttatacttggatttgctctcttcccatttctgattgttgtatagctttcgattttgcttacagtagttcccccttatcttcgggagatacattccaaggcccccagtgaactcctgaaacctcaaacagtaccaaacctttatacactgttttttccatatatatatacctatgataaagtataatgtataaattaagcatagcaagagattaataataatgtaatagaacaatgataacatactataataaaagttatgtgaatgtggttggtctctcttgctttcaaaatatcttcttgtacagtactcacctattttagaatgtggttgactacaggtaaccaaaaccacagaaagggaaactttggatgaggggggcactactgtacttaggaatacaactatatacatatgattttatttttaagaccatattatatttgggtatctactaatattttgtataaagcaattttttgttccattacgtgactttttgttttattgtatatgtaatttaacacacaataaagggtaaagttgcttccccaaaccacacttttaatcaaaacctagaatcatctgcagtccttgttaaaaatgcaggtttctagaaccctctgaagttctgattaaataaatttattgcaaacca

SEQ ID NO: 23048 - DNA, 892 bp, Homo sapiens
  source 1..892: mol_type = unassigned DNA
ccgggccgggccgggcagtctgggacgcgccgccgccatgatcatccctgtacgctgcttcacttgtggcaagatcgtcggcaacaagtgggaggcttacctggggctgctgcaggccgagtacaccgagggggatgcgctggatgccctgggcctgaagcgctactgctgccgccggatgctgctggcccacgtggacctgatcgagaagctgctcaattatgcacccctggagaagtgaccacgctggaacccacccacccgctgtgctgaccatgggccctgagcgtcctgccccgaattcacgaggctgaggcatccgggagctggcgtaatgcctggccgcagtgtgtgtgtatccgataccccactctggaaggaaccatccagtaaaggtctttcagaaccactaaggtcccagccctcactaggatgtcaggagccaggtctaggcccagctttcacactgtggcagcccagtgaagcagactgggccatgaactctcctagccctggggccagcctgttccacaggcacccctgcaggaggcgctgccaggagagccttccatctcggggctctttgaggttccctccttctgggtgttcttcaggctgagcagagaggctcctgtaccctctctctcggaatctgaagagccagatttaggccgggcaaaggggctcacccctataatcccaggactttgggaggccaaggcaggaggatcacttgagtccagaaattcaagacccgcctgggcatcataatgagaccccatctctacaacaaaatttaataaattagctgggcacagtgttcacacctgtagtcccggccactcggggctgaggcaggaggatcactggaacctgggaggttgccactgca

SEQ ID NO: 23049 - DNA, 585 bp, Homo sapiens
  source 1..585: mol_type = unassigned DNA
agtctgggacgcgccgccgccatgatcatccctgtacgctgcttcacttgtggcaagatcgtcggcaacaagtgggaggcttacctggggctgctgcaggccgagtacaccgagggggatgcgctggatgccctgggcctgaagcgctactgctgccgccggatgctgctggcccacgtggacctgatcgagaagctgctcaattatgcacccctggagaagtgaccacgctggaacccacccacccgctgtgctgaccatgggccctgagcgtcctgccccgaattcacgaggctgaggcatccgggagctggcgtaatgcctggccgcagtgtatgttggaggcatggtctcgctgcccacaaagagccaccaccgtcttgcagcagctgtctgggaccacacggccaccggcctcctgtgagcggatccactcactgtctcgccagtcctgtgagttgttgctgccacagcagtggaactgcatcaagaacaaggctggggttgagacctggggccagaggctcctgcagaggtccagggaggccctggggatgcacgcgccctcccagcaccacccaccca

SEQ ID NO: 23050 - DNA, 6640 bp, Homo sapiens
  source 1..6640: mol_type = unassigned DNA
gggacactctacggtggccgagaggatgccgcagatgtgttagcggcgagtccagaagcagccccaggaggtgctgggggcatcgtttctctaatctggcctcccgagtgccaaggaggcgtcccggcagcggtcatcatggtgaaggagcagttccgggagacggatgtggccaagaaaataagccacatctgttttggaatgaagtcacctgaggagatgcgccagcaggcgcacatccaagttgtgagtaagaacctgtacagccaggacaaccaacatgcccccttgctatatggggtgctcgaccataggatgggtacgagtgagaaggatcgtccatgtgaaacctgtgggaaaaacttggctgactgtctaggccactatgggtatatcgacctggagttgccgtgttttcatgtagggtacttcagagcagtcataggcatcttacagatgatctgcaaaacctgctgccacatcatgctgtcccaagaggagaagaagcagtttctggactatctaaagaggcccggcctgacctaccttcagaagcgaggactgaaaaagaaaatctctgacaagtgccggaagaaaaacatctgccatcactgtggcgcttttaatggtaccgtaaagaagtgtggactgctgaaaataattcatgagaaatacaagaccaacaaaaaagtggtggatcccattgtatcaaatttccttcagtcttttgaaacagccattgaacataataaagaagtggagcctctgctgggaagggcacaggaaaacttgaatcccttagtagttctgaatttatttaaacgaatcccagctgaagatgttcctctacttctgatgaacccagaagccggaaagccgtctgatttgattctcacacgacttttggtgcctcctttgtgtatcagaccctccgttgtgagtgatttgaagtctggcaccaatgaagatgatctgacaatgaaactgacagaaatcattttcctaaacgatgttattaaaaagcatcggatctcaggagccaagacccagatgatcatggaggactgggatttcctgcagctgcagtgtgccctctacattaacagtgagctctcgggcattcccctcaacatggcacccaagaagtggaccagaggcttcgtccaacgcctgaagggaaaacagggtcgatttagaggaaatctctcaggaaagagagtggatttttctggcagaacagtcatctcgcccgaccccaacctccggattgatgaggtagctgtgccagttcatgtggccaaaattctaacttttcctgagaaggtaaacaaagcaaacatcaatttcttgaggaaactggttcaaaacggccctgaggttcacccaggagcaaacttcattcagcagagacatacgcagatgaaaaggtttttgaaatacggaaatcgagaaaagatggctcaagagctcaagtatggtgacatcgtagagagacacctcatcgatggagatgtggtgctgttcaatcggcagccctcgctgcacaaattgagcattatggctcatctggccagggtcaagccccaccggaccttcagatttaatgagtgtgtctgtacaccctataatgctgactttgatggtgatgaaatgaaccttcatcttcctcaaacagaagaagctaaagcagaggcccttgttctgatggggactaaagcaaatcttgtaaccccgaggaatggggaaccgctgattgctgctattcaggattttctaacaggtgcctatctcctcactctcaaggacactttctttgatcgagccaaggcttgccaaatcattgcttcaatactggttggcaaggatgagaaaattaaagttcgcctcccaccgcctacaatcctaaagcctgtcaccctgtggacgggaaagcagatcttcagtgtcatcctcaggcctagcgatgacaatccagtgagggccaacctgcgaaccaagggcaagcagtactgtggcaaaggggaagatctctgtgccaatgattcctatgttacaatccagaacagtgagttgatgagtggcagcatggacaaaggaaccctagggtcaggatccaagaacaatattttttacattttgctgcgagactggggacagaatgaagctgcagatgccatgtcacggctcgccaggctggctcctgtctacctgtctaaccgtggtttctcaattgggatcggtgatgtcacacctggccaaggactgctgaaggccaagtatgagttgctgaatgccggctacaagaaatgtgatgagtacatcgaagccctgaacacgggcaagctgcagcagcagcctggctgcactgctgaggagaccctggaggcactgatcctgaaggagctgtctgtgatccgtgaccacgctggcagtgcctgcctccgggagctggacaagagcaacagccccctcaccatggctctgtgcggctccaaaggttccttcattaacatatcacagatgattgcctgtgtgggacagcaggccatcagtggctctcgagtgccagacggctttgaaaacaggtccttgcctcattttgaaaaacactcaaagctcccagctgccaaaggctttgtggctaatagcttttattccggtttgacaccaactgagtttttcttccacacaatggccggccgggaaggtctagtcgacacggctgtaaagacagctgaaacgggatacatgcagcgaaggcttgtcaaatctcttgaagatctttgctcccagtatgatctgacagtccgaagctctactggcgatattatccagttcatttatggaggagatggcttagatcctgcagctatggagggaaaagatgaacctttggagtttaaaagggttctggacaacatcaaagcagtcttcccgtgtcccagtgagcctgctctcagcaaaaacgagctgatcctgaccacagagtccatcatgaagaagagtgagttcctctgctgccaggacagcttcctgcaggaaataaaaaaattcattaagggggtctctgagaagatcaagaaaaccagagataaatatggcatcaatgataacggcacaacagagccccgtgtgctgtaccagctggaccgcatcacccccacccaagtagaaaagtttctggagacctgtagggacaagtacatgagggcacagatggagccaggttctgcagtgggtgctctgtgtgcccagagcattggtgagccaggcacccagatgaccctgaagactttccactttgcaggtgtggcctccatgaacatcaccctgggcgtgccccggattaaagagatcatcaacgcttccaaggccatcagcactccaattatcacagcacagctagacaaggatgacgacgcggattatgctcgcctcgtgaaagggagaattgagaaaaccctcttgggagagatttccgagtatattgaagaagtgtttcttcctgatgactgctttattctcgtcaagctctccctggaacggattaggcttctgagactggaagtgaacgctgagacagtgagatattccatctgcacatccaagctccgtgtgaagcccggtgatgtggctgttcatggtgaggctgtggtgtgtgtcacccccagagagaacagcaagagctccatgtactacgtgctgcagttcctgaaagaggatctccccaaggtggtggtgcagggcattccagaggtgtccagagctgtcatccacattgacgagcagagtggaaaggagaagtacaagcttctggtggaaggtgataacctgcgggcagtcatggccacacacggtgtgaagggcacccgaaccacctccaataacacctatgaggtggagaaaactctgggcatcgaggccgcccggacaacgatcatcaatgaaatccagtacaccatggtgaaccacggcatgagcatcgacaggaggcacgtgatgctgctctccgacctcatgacctacaagggtgaagtcctgggcatcactaggtttggcctggccaagatgaaggagagtgtgctgatgctggcctcctttgagaagacggctgaccatctctttgacgctgcctacttcgggcagaaggactctgtgtgtggggtgtctgagtgcatcatcatgggaatcccaatgaacattggaaccgggctcttcaagctgcttcacaaggctgacagggacccgaaccctcccaagaggcccctgatcttcgacacaaatgaattccacatcccccttgtcacatagtccaaagaaagaggggaccatgcctgaccttgactccttgtcctgtctccagctgatgtataaagagttttgtgctccctgggacgggggtcctgaggtccccacctatgccagcaatcagagaagccctcttggcatccccaggagcagcttctcctctgatagggtgcagctcacaccagtgaccctgactgtgccacgctgctcgggagagctgagggttttattgtttgcttgcttgaaacctaatctatagacggccccacagctcgtgcacacactgcttccctggacttaaagcccagccaggtgtcatggtccatcccagctcactgcatacatccatcggctccccatggtgtcttcacacctgacgatgagccaggcctgagccccacacaggccagggcacattcttggattttccattccttggtcatgctggaatctctcaatgtgacatacttatgtaaatattgttactattatttatttgttccatttgagggatttggaatttttgttattttagttttatttttgaaaccaagcatctatagaaaccaagaaagtcagcatgtaagcgtcactggaaaaactggtttaagcaaatagagccgtctgggatttgtaactgaggtgcaactgtcatgaggcccaggcagctctgtaacatcttctatagatgcccctggctaccctgttgttttcatctacctcagacccctatcatggggctctaccctgtgacaagagccaaacccattctccatggcctatggaagcctcactggagtttggggcctgctgcaatggggatgagatggttttttgtagaattatacttacgttccttggatgatctctagttgattttttaagttctgagttgatgctgttaaggtacccggggtagccattggttcttggatctgtgttagaatgagtgctttcccttcctactgatgtgattgtggattaggaattcgtgaccgagtgatttttggccagtggttgggtttaaaattctattaaaatttgtagtttgggctgggtgctgtggctcatacctataatcccagcactttgggaggccgaggggggcagatcacttgagcccaggagttcgagagcagcctgggcaacatgacgaaaccccgtctctacagagaatacaaaaattagccaggcatggtggcccatgcctgtagtacctgctattggtaaggctgaggtggaaggttcacttgagcctgggaggtggaggttgtagtgagccaagatcgtgccactacactccagcctgggcaacaaagcaagaccttgtctcaaaaaaaaaaaagaaaaaaattaagcgtaaaaaaaaattagtttttataaaaaattatagtttgaccttttgatttccctgcatctacaaggtagacctattaacttctcttggggtatcagtgatgtggaaaaaaaatgccatttttcttaatgtttaacccccctttatctttgaattgagctagagcctggtttaggacaaaggattaagtttgttaatgaacactaattcagggcttctacttgagaccccaccgagatcaccagttctcatgtaacctgggaagagccataaaggggtaccccccaccccaactgccttcctggaagcatgcctgggaagtaagctgtaggcctgatccgagccaggaccactgggatccgtgcaaaggccaggggagggtagaattgaatcataggagtgaactccggcacctgttgtcttctgcgggtgacgcacactttaaatggaagagaggttgtggctataacttgtggctgggaataataaagatggcaccgccaaggagcctcaccttgcgtgagtgagtactcagttgggcgctgcagggtctggagtctgtgtgagacgtgtgtgattgtgatgggtgcgaatcagcgtatagcacttgagaacaaggcagaccttggagcagaatggttatgtgaaggatcacatcacccatgggtagggggggaagtcatacgtcctggaggtgctggtcctcctcctggaactgccagccttgctaggactatcaacatcaacagcattgcctggtaaaccctactgtttgtgctccccactgtgtcccatgactggtgttaaaattctccctactttgatcatctgccctgcccaggccttgggctttatgccagcacagagctcaaaggccaggtagcagcacatcctcaagcatgagagctcaaagggttacatttgagtctctgtacctgcttggaagaaataaaaatacgtgtgaattccatctca

SEQ ID NO: 23051 - DNA, 1668 bp, Homo sapiens
  source 1..1668: mol_type = unassigned DNA
ctgcagtgggtgctctgtgtgcccagagcattggtgagccaggcacccagatgaccctgaagactttccactttgcaggtgtggcctccatgaacatcaccctgggcgtgccccggattaaagagatcatcaacgcttccaaggccatcagcactccaattatcacagcacagctagacaaggatgacgacgcggattatgctcgcctcatgactgctttattctcgtcaagctctccctggaacggattaggcttctgagactggaagtgaacgctgagacagtgagatattccatctgcacatccaagctccgtgtgaagcccggtgatgtggctgttcatggtgaggctgtggtgtgtgtcacccccagagagaacagcaagagctccatgtactacgtgctgcagttcctgaaagaggatctccccaaggtggtggtgcagggcattccagaggtgtccagagctgtcatccacattgacgagcagagtggaaaggagaagtacaagcttctggtggaaggtgataacctgcgggcagtcatggccacacacggtgtgaagggcacccgaaccacctccaataacacctatgaggtggagaaaactctgggcatcgaggccgcccggacaacgatcatcaatgaaatccagtacaccatggtgaaccacggcatgagcatcgacaggaggcacgtgatgctgctctccgacctcatgacctacaagggtgaagtcctgggcatcactaggtttggcctggccaagatgaaggagagtgtgctgatgctggcctcctttgagaagacggctgaccatctctttgacgctgcctacttcgggcagaaggactctgtgtgtgcctggccccaaccctgagacctgtatgaaggtggatagtccacactcagaaaagagaagcaggatggtagtcatggaagctggaatctgccaaggagtatggaacaactcaccagccaaatgaactcgtcctaaaaatatggatctaatttttttaaaaaagaaaaggccaagtgcagtggctcacacccataatcccagcatcccagcacttgggaggccgaggtagatggatcacttgaggtcaggagttcgagatcagcctggccaacatggtgacaccccatctctactaaagatacaaaaattagccaggcatggtggcatgtgcctgtagtcccagctactcgggaggctgaagcatgagaatcgcttggacctgggaggcagaggctgcggtgagccaaaattgcgccaatgcactccagcctgggtgacagaagaagaccctgtttcagggggaaaaaaaagaaaaagaaaggaaagggaaaaaacatgaagagagcccagtgtatccagacccgagtctcatcaccttctcaggaagctttttgggttgtccaggccttaagtaggcctgtgcttccaaacttcatttctgggaggagtgccagtgggctggggaagtcggaggctagaagaagcctgttcttgtaccttgcagtctgttccaccaccgaggaacaggcctgacccgagtggcctgcagtaaagctccgagtcagggagcatggtataatcacctgacactggtgttacaggtaaatcacaatctctccccatagacaacatgatcttcctcatgt

SEQ ID NO: 23052 - DNA, 4433 bp, Homo sapiens
  source 1..4433: mol_type = unassigned DNA
atgccgcagatgtgttagcggcgagtccagaagcagccccaggaggtgctgggggcatcgtttctctaatctggcctcccgagtgccaaggaggcgtcccggcagcggtcatcatggtgaaggagcagttccgggagacggatgtggccaagaaaataagccacatctgttttggaatgaagtcacctgaggagatgcgccagcaggcgcacatccaagttgtgagtaagaacctgtacagccaggacaaccaacatgcccccttgctatatggggtgctcgaccataggatgggtacgagtgagaaggatcgtccatgtgaaacctgtgggaaaaacttggctgactgtctaggccactatgggtatatcgacctggagttgccgtgttttcatgtagggtacttcagagcagtcataggcatcttacagatgatctgcaaaacctgctgccacatcatgctgtcccaagaggagaagaagcagtttctggactatctaaagaggcccggcctgacctaccttcagaagcgaggactgaaaaagaaaatctctgacaagtgccggaagaaaaacatctgccatcactgtggcgcttttaatggtaccgtaaagaagtgtggactgctgaaaataattcatgagaaatacaagaccaacaaaaaagtggtggatcccattgtatcaaatttccttcagtcttttgaaacagccattgaacataataaagaagtggagcctctgctgggaagggcacaggaaaacttgaatcccttagtagttctgaatttatttaaacgaatcccagctgaagatgttcctctacttctgatgaacccagaagccggaaagccgtctgatttgattctcacacgacttttggtgcctcctttgtgtatcagaccctccgttgtgagtgatttgaagtctggcaccaatgaagatgatctgacaatgaaactgacagaaatcattttcctaaacgatgttattaaaaagcatcggatctcaggagccaagacccagatgatcatggaggactgggatttcctgcagctgcagtgtgccctctacattaacagtgagctctcgggcattcccctcaacatggcacccaagaagtggaccagaggcttcgtccaacgcctgaagggaaaacagggtcgatttagaggaaatctctcaggaaagagagtggatttttctggcagaacagtcatctcgcccgaccccaacctccggattgatgaggtagctgtgccagttcatgtggccaaaattctaacttttcctgagaaggtaaacaaagcaaacatcaatttcttgaggaaactggttcaaaacggccctgaggttcacccaggagcaaacttcattcagcagagacatacgcagatgaaaaggtttttgaaatacggaaatcgagaaaagatggctcaagagctcaagtatggtgacatcgtagagagacacctcatcgatggagatgtggtgctgttcaatcggcagccctcgctgcacaaattgagcattatggctcatctggccagggtcaagccccaccggaccttcagatttaatgagtgtgtctgtacaccctataatgctgactttgatggtgatgaaatgaaccttcatcttcctcaaacagaagaagctaaagcagaggcccttgttctgatggggactaaagcaaatcttgtaaccccgaggaatggggaaccgctgattgctgctattcaggattttctaacaggtgcctatctcctcactctcaaggacactttctttgatcgagccaaggcttgccaaatcattgcttcaatactggttggcaaggatgagaaaattaaagttcgcctcccaccgcctacaatcctaaagcctgtcaccctgtggacgggaaagcagatcttcagtgtcatcctcaggcctagcgatgacaatccagtgagggccaacctgcgaaccaagggcaagcagtactgtggcaaaggggaagatctctgtgccaatgattcctatgttacaatccagaacagtgagttgatgagtggcagcatggacaaaggaaccctagggtcaggatccaagaacaatattttttacattttgctgcgagactggggacagaatgaagctgcagatgccatgtcacggctcgccaggctggctcctgtctacctgtctaaccgtggtttctcaattgggatcggtgatgtcacacctggccaaggactgctgaaggccaagtatgagttgctgaatgccggctacaagaaatgtgatgagtacatcgaagccctgaacacgggcaagctgcagcagcagcctggctgcactgctgaggagaccctggaggcactgatcctgaaggagctgtctgtgatccgtgaccacgctggcagtgcctgcctccgggagctggacaagagcaacagccccctcaccatggctctgtgcggctccaaaggttccttcattaacatatcacagatgattgcctgtgtgggacagcaggccatcagtggctctcgagtgccagacggctttgaaaacaggtccttgcctcattttgaaaaacactcaaagctcccagctgccaaaggctttgtggctaatagcttttattccggtttgacaccaactgagtttttcttccacacaatggccggccgggaaggtctagtcgacacggctgtaaagacagctgaaacgggatacatgcagcgaaggcttgtcaaatctcttgaagatctttgctcccagtatgatctgacagtccgaagctctactggcgatattatccagttcatttatggaggagatggcttagatcctgcagctatggagggaaaagatgaacctttggagtttaaaagggttctggacaacatcaaagcagtcttcccgtgtcccagtgagcctgctctcagcaaaaacgagctgatcctgaccacagagtccatcatgaagaagagtgagttcctctgctgccaggacagcttcctgcaggaaataaaaaaattcattaagggggtctctgagaagatcaagaaaaccagagataaatatggcatcaatgataacggcacaacagagccccgtgtgctgtaccagctggaccgcatcacccccacccaagtagaaaagtttctggagacctgtagggacaagtacatgagggcacagatggagccaggttctgcagtgggtgctctgtgtgcccagaggaacatcaccctgggcgtgccccggattaaagagatcatcaacgcttccaaggccatcagcactccaattatcacagcacagctagacaaggatgacgacgcggattatgctcgcctcgtgaaagggagaattgagaaaaccctcttgggagagatttccgagtatattgaagaagtgtttcttcctgatgactgctttattctcgtcaagctctccctggaacggattaggcttctgagactggaagtgaacgctgagacagtgagatattccatctgcacatccaagctccgtgtgaagcccggtgatgtggctgttcatggtgaggctgtggtgtgtgtcacccccagagagaacagcaagagctccatgtactacgtgctgcagttcctgaaagaggatctccccaaggtggtggtgcagggcattccagaggtgtccagagctgtcatccacattgacgagcagagtggaaaggagaagtacaagcttctggtggaaggtgataacctgcgggcagtcatggccacacacggtgtgaagggcacccgaaccacctccaataacacctatgaggtggagaaaactctgggcatcgaggccgcccggacaacgatcatcaatgaaatccagtacaccatggtgaaccacggcatgagcatcgacaggaggcacgtgatgctgctctccgacctcatgacctacaagggtgaagtcctgggcatcactaggtttggcctggccaagatgaaggagagtgtgctgatgctggcctcctttgagaagacggctgaccatctctttgacgctgcctacttcgggcagaaggactctgtgtgtggggtgtctgagtgcatcatcatgggaatcccaatgaacattggaaccgggctcttcaagctgcttcacaaggctgacagggacccgaaccctcccaagaggcccctgatcttcgacacaaatgaattccacatcccccttgtcacatagtccaaagaaagaggggaccatgcctgaccttgactccttgtcctgtctccagctgatgtataaagagttttgtgctccctgggacgggggtcctgaggtccccacctatgccagcaatcagagaagccctcttggcatccccaggagcagcttctcctctgatagggtgcagctcacaccagtgaccctgactgtgccacgctgctcggg

SEQ ID NO: 23053 - DNA, 4273 bp, Homo sapiens
  source 1..4273: mol_type = unassigned DNA
accagagggcgtactttccttactcggcctcggccacatccgggttccaccgcagattcgggcagggagcgggcggaacctttctaccgcgtctctagctaacacgcacggcggggacagtttaggcctccgcgcaccgttcgccgggagtcttgcagtttgcttggtgcagggaaggcgggcgcggaggttctatctgtttcttcctccttcgtgagcagcatggacgtgctagcggaggagtttgggaacctgactccggagcagctggcggcgccgatcccgactgtagaggaaaaatggaggctgcttccagcatttttaaaggtgaaaggccttgtgaaacagcatatagattcatttaactatttcattaatgtagagataaagaagataatgaaagccaatgaaaaggttacaagtgacgctgaccctatgtggtacttaaaatatcttaatatctatgttgggcttcctgatgttgaagaaagcttcaatgtaactagaccagtgtcccctcatgagtgccgtttgagagacatgacatactctgcccctattacagtggatattgaatatacccgaggcagccagaggatcatccgcaatgccttacctatcggcagaatgcccataatgctacgtagttcaaactgtgttcttacaggaaaaacgccagcagaatttgccaaactgaacgaatgtcccttagatccaggtggctacttcattgttaaaggagtagaaaaagttattcttatccaagagcagctgtctaagaacaggatcatcgtggaggctgatagaaaaggggctgttggagcttcagttaccagctctacccatgagaaaaaaagcagaaccaatatggctgtgaaacaaggacgattttatttgaggcataatactttgtcagaagatatacccattgtcatcatatttaaggccatgggtgttgagagtgaccaggaaattgtgcagatgattggaacagaggagcacgtgatggctgcatttgggcccagtctggaagagtgccagaaagctcagattttcacacagatgcaggcattaaaatatatagggaacaaagtaagaaggcaaaggatgtggggaggtggaccaaagaaaaccaaaatagaagaagcaagagagctcctggcttccaccattctgacccatgtcccagttaaggaattcaatttccgagccaaatgtatctatactgcagtgatggtgcgaagagttattctggcccaaggagataataaagttgacgacagagattattatggtaacaagcgactggaattggcaggacagcttttatctcttctttttgaagacttgttcaaaaaatttaattctgaaatgaaaaagattgccgaccaggtgattcctaagcaaagagcagcccagtttgatgttgtcaaacacatgcgccaagaccagatcaccaatggcatggtgaatgctatttctaccggaaattggtctttaaagagatttaaaatggaccgccagggtgtaacccaagtgctgtctcgcttgtcatatatatccgcactgggcatgatgacaagaatctcttcccagtttgaaaaaacgagaaaagtgagtggtcctcgctccctccagccatctcagtggggaatgctgtgtccttcggacactcctgaaggagaggcatgtggtttggttaaaaacttggcccttatgacacacatcacaactgatatggaagatggacccattgttaaattagccagtaacttgggagtagaagatgtgaatttattatgtggggaagagctctcttacccaaatgtgtttcttgtctttcttaatggtaacatcttaggtgtcattcgagaccacaaaaagctagtgaatacatttcgactcatgagaagagcaggatatatcaatgaatttgtttccatctcaacaaatcttacagatcgatgtgtctatatttcttctgatgggggaaggctatgcagaccctacataattgtcaagaaacagaagccagcagtcacaaataaacatatggaagagctggcccaagggtacaggaattttgaagatttcttacatgagagtctggttgaatatttagatgtgaatgaagaaaatgattgtaacattgcactgtacgaacacacaattaataaagacaccacccacttggagattgaacccttcactcttctcggcgtgtgtgctggacttatcccataccctcaccataaccagtcaccgagaaacacttatcagtgtgccatggggaaacaagccatgggtactataggatacaaccagcgaaacagaattgatactctcatgtatctactagcatatccacaaaaacccatggttaagacaaaaaccattgaattgatagaatttgagaaactgccagctggacagaatgcaacagttgctgtgatgagctatagtggctatgatattgaagatgctcttgttttaaacaaggcctctttagacagaggctttgggcgttgccttgtatataaaaatgctaaatgtacgttgaaacgatacaccaatcagacttttgataaagtgatggggcccatgttggatgctgctacaaggaaacctatctggcgacatgaaatcttagatgcagatggtatttgttctccaggtgagaaagtagaaaacaaacaagtgcttgtaaataagtccatgcccacagtgactcagattcctttggaaggaagtaatgtaccacagcaaccacagtacaaagatgtacccataacctacaaaggagcaacagactcatatattgaaaaagtgatgatatcttcaaatgctgaagatgcttttctgatcaaaatgctgctgagacagacaaggcgtccagaaattggagacaaattcagcagtcgtcatgggcaaaaaggtgtttgtggcttgatcgtcccccaggaagacatgccattttgtgattctggcatctgtccggacatcatcatgaacccacacggcttcccatcacgaatgacggtggggaagctcattgagctgctggctggcaaggccggtgtgctggacggcagattccactacggcactgcgtttggaggcagtaaagtgaaggatgtgtgtgaggacctcgttcgccatggttataactacttggggaaagactatgttacatccggcatcacaggtgagcccttagaagcatacatctattttggccccgtgtactatcagaagctgaaacacatggtgctagataaaatgcatgcccgggcccggggcccacgagccgtccttaccaggcaacccactgaaggacggtctcgtgatggtggcttgcgtctcggggaaatggaacgtgactgtttaatcggttatggagccagtatgcttttgctagagagactaatgatttcaagtgatgcctttgaggttgatgtctgtgggcagtgtggacttctggggtattctggctggtgccattactgcaagtcatcctgccacgtgtcttccctccgtattccgtatgcctgcaagctgctcttccaggaactacagtctatgaacatcatccccaggttaaaactgtccaagtacaatgaatgaggatggaaaaaatgattattaaagagaacaagtgatacatccaatgcaacggaaagcagaagggatttaggactacgtctcctcctgtgaagaattcccttgcgtattctctctctaaaacaaccaaaaaaaaatggagaggctttttatatactctaagactggctaaacaaccttgatcattgagcctcgagccatgggagagatgctgaccatgtggactgcaaggctgcttgattcacagatggatgtgacctaaaggataaataagctattacttatgtgctgatctcttgacattcactcattagaagaccttactccttcaagcaaatgtttggggtcaaatttaccatatcttctggctaaccatattcaagattcttctgaaacttggaggatgtaaagaatccatttgatttggtcagcctggcttttgtcgtggtggctggctcggataaattttcccaacaattaaatcttgcctttacacacccaaactttgtaattttagtcttggtgaaatataatgaatttgttcctaccttgtcaagcaagaatgtcgtcttctcctatggactcaattgctattattttaaacctgcatgattgtaccatgcaatactattcgttaaatatctgaatctaa

SEQ ID NO: 23054 - DNA, 4118 bp, Homo sapiens
  source 1..4118: mol_type = unassigned DNA
agagcgtcgcgcttgcgagtcttttttccagagccggcctccgcgtgcgcgagtgaaggctgatcccagaggagctgtcagccgctgcgggggccgagaagccccgctgctggctctagggttggagctcttccagcataggaaaaatggaggctgcttccagcatttttaaaggtgaaaggccttgtgaaacagcatatagattcatttaactatttcattaatgtagagataaagaagataatgaaagccaatgaaaaggttacaagtgacgctgaccctatgtggtacttaaaatatcttaatatctatgttgggcttcctgatgttgaagaaagcttcaatgtaactagaccagtgtcccctcatgagtgccgtttgagagacatgacatactctgcccctattacagtggatattgaatatacccgaggcagccagaggatcatccgcaatgccttacctatcggcagaatgcccataatgctacgtagttcaaactgtgttcttacaggaaaaacgccagcagaatttgccaaactgaacgaatgtcccttagatccaggtggctacttcattgttaaaggagtagaaaaagttattcttatccaagagcagctgtctaagaacaggatcatcgtggaggctgatagaaaaggggctgttggagcttcagttaccagctctacccatgagaaaaaaagcagaaccaatatggctgtgaaacaaggacgattttatttgaggcataatactttgtcagaagatatacccattgtcatcatatttaaggccatgggtgttgagagtgaccaggaaattgtgcagatgattggaacagaggagcacgtgatggctgcatttgggcccagtctggaagagtgccagaaagctcagattttcacacagatgcaggcattaaaatatatagggaacaaagtaagaaggcaaaggatgtggggaggtggaccaaagaaaaccaaaatagaagaagcaagagagctcctggcttccaccattctgacccatgtcccagttaaggaattcaatttccgagccaaatgtatctatactgcagtgatggtgcgaagagttattctggcccaaggagataataaagttgacgacagagattattatggtaacaagcgactggaattggcaggacagcttttatctcttctttttgaagacttgttcaaaaaatttaattctgaaatgaaaaagattgccgaccaggtgattcctaagcaaagagcagcccagtttgatgttgtcaaacacatgcgccaagaccagatcaccaatggcatggtgaatgctatttctaccggaaattggtctttaaagagatttaaaatggaccgccagggtgtaacccaagtgctgtctcgcttgtcatatatatccgcactgggcatgatgacaagaatctcttcccagtttgaaaaaacgagaaaagtgagtggtcctcgctccctccagccatctcagtggggaatgctgtgtccttcggacactcctgaaggagaggcatgtggtttggttaaaaacttggcccttatgacacacatcacaactgatatggaagatggacccattgttaaattagccagtaacttgggagtagaagatgtgaatttattatgtggggaagagctctcttacccaaatgtgtttcttgtctttcttaatggtaacatcttaggtgtcattcgagaccacaaaaagctagtgaatacatttcgactcatgagaagagcaggatatatcaatgaatttgtttccatctcaacaaatcttacagatcgatgtgtctatatttcttctgatgggggaaggctatgcagaccctacataattgtcaagaaacagaagccagcagtcacaaataaacatatggaagagctggcccaagggtacaggaattttgaagatttcttacatgagagtctggttgaatatttagatgtgaatgaagaaaatgattgtaacattgcactgtacgaacacacaattaataaagacaccacccacttggagattgaacccttcactcttctcggcgtgtgtgctggacttatcccataccctcaccataaccagtcaccgagaaacacttatcagtgtgccatggggaaacaagccatgggtactataggatacaaccagcgaaacagaattgatactctcatgtatctactagcatatccacaaaaacccatggttaagacaaaaaccattgaattgatagaatttgagaaactgccagctggacagaatgcaacagttgctgtgatgagctatagtggctatgatattgaagatgctcttgttttaaacaaggcctctttagacagaggctttgggcgttgccttgtatataaaaatgctaaatgtacgttgaaacgatacaccaatcagacttttgataaagtgatggggcccatgttggatgctgctacaaggaaacctatctggcgacatgaaatcttagatgcagatggtatttgttctccaggtgagaaagtagaaaacaaacaagtgcttgtaaataagtccatgcccacagtgactcagattcctttggaaggaagtaatgtaccacagcaaccacagtacaaagatgtacccataacctacaaaggagcaacagactcatatattgaaaaagtgatgatatcttcaaatgctgaagatgcttttctgatcaaaatgctgctgagacagacaaggcgtccagaaattggagacaaattcagcagtcgtcatgggcaaaaaggtgtttgtggcttgatcgtcccccaggaagacatgccattttgtgattctggcatctgtccggacatcatcatgaacccacacggcttcccatcacgaatgacggtggggaagctcattgagctgctggctggcaaggccggtgtgctggacggcagattccactacggcactgcgtttggaggcagtaaagtgaaggatgtgtgtgaggacctcgttcgccatggttataactacttggggaaagactatgttacatccggcatcacaggtgagcccttagaagcatacatctattttggccccgtgtactatcagaagctgaaacacatggtgctagataaaatgcatgcccgggcccggggcccacgagccgtccttaccaggcaacccactgaaggacggtctcgtgatggtggcttgcgtctcggggaaatggaacgtgactgtttaatcggttatggagccagtatgcttttgctagagagactaatgatttcaagtgatgcctttgaggttgatgtctgtgggcagtgtggacttctggggtattctggctggtgccattactgcaagtcatcctgccacgtgtcttccctccgtattccgtatgcctgcaagctgctcttccaggaactacagtctatgaacatcatccccaggttaaaactgtccaagtacaatgaatgaggatggaaaaaatgattattaaagagaacaagtgatacatccaatgcaacggaaagcagaagggatttaggactacgtctcctcctgtgaagaattcccttgcgtattctctctctaaaacaaccaaaaaaaaatggagaggctttttatatactctaagactggctaaacaaccttgatcattgagcctcgagccatgggagagatgctgaccatgtggactgcaaggctgcttgattcacagatggatgtgacctaaaggataaataagctattacttatgtgctgatctcttgacattcactcattagaagaccttactccttcaagcaaatgtttggggtcaaatttaccatatcttctggctaaccatattcaagattcttctgaaacttggaggatgtaaagaatccatttgatttggtcagcctggcttttgtcgtggtggctggctcggataaattttcccaacaattaaatcttgcctttacacacccaaactttgtaattttagtcttggtgaaatataatgaatttgttcctaccttgtcaagcaagaatgtcgtcttctcctatggactcaattgctattattttaaacctgcatgattgtaccatgcaatactattcgttaaatatctgaatct

SEQ ID NO: 23055 - DNA, 3800 bp, Homo sapiens
  source 1..3800: mol_type = unassigned DNA
ggcgcgggcgcatgcgcaggcgcgggccggtggggtggcctggagcggcgtgcgtaatgtcggcactttgctggggccgcggagcggcggggctcaaacgagccctacggccttgcggccgcccgggactccccggcaaagaagggaccgccggtggcgtctgcggccccaggaggagctcgtccgccagcccccaggagcaagaccaagaccgcaggaaggactggggccacgtggagctgctggaggtgctccaggcgcgggtgcggcagctgcaggctgagagcgtgtcggaggtggtggtgaacagggtggatgtggcgcggctcccagaatgtggcagtggagatggtagcctccagccacccaggaaggtccagatgggggccaaggatgccaccccggtgccctgtggccgctgggcaaagatactggagaaggataagcggacccagcagatgcgtatgcagcggttgaaggcgaagctgcagatgccattccagagcggggagttcaaggcgctgaccaggcgcctgcaggtggagccccggctcctgagcaagcagatggccgggtgcctggaggactgcacgcgccaggcccccgagagcccctgggaggagcagctggcccggctgctgcaggaggcccctgggaagctgagcctcgatgtggagcaggccccgtcggggcagcactcgcaggcccagctctcaggtcagcagcagaggctcctggccttcttcaagtgctgcctgctcactgaccagctgcccctcgcccaccacctgctggtcgtccaccacggccagcggcagaagcggaagctgctcacgctggacatgtacaacgccgtgatgcttggctgggcgcggcagggtgccttcaaggagctggtatatgtgttattcatggtgaaggatgccggcttgactccggacctgctgtcctatgcggctgccctccagtgcatggggaggcaggaccaggacgccgggaccatcgaaaggtgtctggaacagatgagccaggaggggctgaagctgcaggcactcttcaccgccgttctgctgtctgaggaggatcgggccactgttctgaaggccgtgcacaaggtgaagcccaccttcagcctcccgccgcagctgccgcccccggtcaacacctccaagctgctcagggacgtgtatgccaaggatgggcgtgtgtcctacccgaagctgcacctgcccttgaagaccctgcagtgcctctttgagaagcagctccacatggagctggccagcagggtgtgcgtggtgtccgtggagaagcccacgttgccaagcaaggaggtcaagcacgcgcggaagaccctgaagaccctgcgggaccaatgggagaaagcactgtgccgggcgctgcgggagaccaagaaccgcctagagcgcgaggtgtacgagggccggttctcactttaccccttcctgtgcctgctggacgagcgcgaggtggtgcggatgctcctgcaggtcctgcaggcgctgcccgcccaaggtgagtccttcaccaccctggcccgggagctgagtgcgcgcactttcagccggcacgtggtgcagaggcagcgggtcagtggccaggtgcaggcgctgcagaaccactacaggaagtacctctgcttgctggcctccgacgccgaggtgcccgagccctgcctgccgcggcagtactgggaggagctgggggcgcccgaggccctgcgggagcagccctggcccctgccagtgcagatggagctgggcaagctgctggcggagatgctggtgcaggctacgcagatgccatgcagcctggacaagccgcatcgttcctctcggcttgtccccgtgctctaccacgtgtattccttccgcaacgtccagcagatcggcatcctgaagccgcacccggcctacgtgcagctgctggagaaggccgcggagcccacgctgaccttcgaggcggtggatgtacccatgctttgccccccgctgccctggacatcgccgcactctggtgctttcctgctcagccccaccaagctgatgcgcacggtggaaggcgccacgcagcaccaggagctgctggaaacctgcccgcccaccgcgctgcatggcgcactggacgccctcacccaactgggcaactgcgcctggcgcgtcaacgggcgcgtgctggacctggtgctgcagctcttccaggccaagggctgcccccagctaggcgtgccggccccgccctccgaggcgccccagccgcccgaggcccacctgccgcacagcgccgcgcccgcccgcaaggccgagctgcgccgtgagctggcgcactgccagaaggtggcccgggagatgcacagcctgcgggcggaggcgctgtaccgcctctcgctggcgcagcacctgcgggaccgcgtcttctggctgccgcacaacatggacttccgcggccgcacctacccctgcccgccgcacttcaaccacctgggcagcgacgtggcgcgggccctgctggagttcgcccagggccgcccgctcggcccgcacggcctggattggctcaagatccacctggtcaatctcacggggttgaagaagcgggagccgctgcggaagcgcctggcctttgcggaggaggtgatggatgacatcctggactccgcggaccaacccttgacgggccgaaagtggtggatgggcgcggaggaaccctggcagacgctggcctgctgtatggaggtggcgaacgctgtgcgcgcctccgaccctgccgcctatgtctcccacctccccgtccatcaggacggctcttgcaacggcctgcagcattatgctgctctgggccgcgacagcgtgggcgccgcctccgtcaacctggagccctcggatgtgccgcaggacgtgtacagcggcgtggccgcgcaggtggaggtgttccgtaggcaggacgcccagcggggcatgcgggtggcacaggtgctggaaggtttcatcacccgcaaggtggtgaagcagacggtgatgacggtggtgtacggggtcacgcgctatggcgggcgcctgcagattgagaagcgcctccgggagctgagcgactttccccaggagttcgtgtgggaggcctctcactatctcgtacgccaggtcttcaagagtctacaggagatgttctcggggacccgggccatccagcactggctgaccgagagtgcccgcctcatctcccacatgggctctgtggtggagtgggtcacacccctgggcgtccccgtcatccagccctatcgcctggactccaaggtcaagcaaataggaggtggaattcagagcatcacctacacccacaacggagacatcagccgaaagcccaacacacgtaagcagaagaacggcttcccgcccaacttcatccactcgctggactcctcccacatgatgctcaccgccctgcactgctacaggaagggcctgaccttcgtctctgtgcacgactgttactggactcacgcagctgatgtctccgtcatgaaccaggtgtgccgggagcagtttgtccgcttgcacagcgagcccatcctgcaggacctgtccagattcctggtcaagcggttctgctctgagccccagaagatcttggaggccagccagctgaaggagacactgcaggcggtgcccaagccaggggccttcgacctggagcaggtgaagcgttccacctacttcttcagctgacaccccgtgagccttgtcagtgtgtaaataaagctcttttgccacccccag

SEQ ID NO: 23056 - DNA, 3633 bp, Homo sapiens
  source 1..3633: mol_type = unassigned DNA
aatcagcgatcagactccggagtttggcccgggagctggggagctcaccgatcccccgcccagcagttctggccgctgtcccggtgcgcacggacgtggctcgagtttcctctgctctccgctctcgcccgctagctctcctcccttccgctcctgcttctctccgggtctcccgctccagctccagccccacccggccggtcccgcacggctccgggtagccatggaggaccccacgctctatattgtcgagcggccgcttcccgggtaccccgacgccgaggccccggagccttcctccgctggggctcaggcagcggaggagccgtcgggggccggctcagaagagctgatcaagtcggaccaggtgaacggcgtgctggtgctgagcctcctggacaaaatcatcggggccgtagaccagatccagctgactcaagcacagctggaggagcggcaggcggagatggagggcgcagtgcagagcatccagggcgagctgagcaagctgggcaaggcgcacgccaccacgagcaatacggtgagcaagctgctggagaaggtgcgcaaggtcagcgtcaacgtgaagaccgtgcgcggcagcctggagcgccaggcggggcagatcaagaagctggaggtcaacgaggccgagctgctgcggcgccgcaactttaaagtcatgatctaccaggatgaagtgaagctgccggccaaactgagcatcagcaaatcgctgaaagagtcggaggcgctgccagagaaggagggcgaggagctgggcgagggcgagcggcccgaggaggacgcagcggcgctggagctttcgtcggacgaggcggtggaggttgaggaggttattgaggagtcccgcgcagagcgtatcaagcgcagcggcctgcggcgcgtggacgacttcaagaaggccttctccaaggagaagatggagaagaccaaggtgcgtacccgcgagaacctggagaagacgcgcctcaagaccaaggaaaacctggagaagacgcggcacaccctggagaagcgcatgaacaagctgggcacgcgcctggtgcccgccgagcggcgcgagaaactgaagacgtcgcgggacaagttgcgcaaatccttcacgcccgaccacgtggtgtacgcgcgctccaagaccgcggtctacaaggtgccacccttcaccttccacgtcaagaagatccgcgagggccaggtggaagtgctcaaggccaccgagatggtggaggtgggcgccgacgacgacgagggcggcgcggagcgcggggaggccggcgacctgcggcgcgggagcagccccgacgtgcacgcgctgctggagatcaccgaggagtcggacgccgtgctggtggacaagagcgacagcgactgagccgcccccgctgccacccaccccattcctcgctccttccgaacttcctctttcgcattctctctcggctcgagctggctgagatttttctaaattgaaaacacgcccccctccccacacctccaggaactccactcccagtcttagagctgttaggacccgatggggaggcagcccccgcagtggacaacccccgcttggacacagtccgagtggaatgggaagggaatggtcaatccctgtcctggttgtccaagtcgggatctcagaggaaattgcagtgattccacggttaggcccccctgggggggctgccttcccctcagcctctccccacaccacccacccagctgctgtcattccgctcactgagctcttcttcattctcaccctgatccctgggggactcaaagccaaaactgcccaaagaggaaagattgaatcctaaaggggatccctgcccccatgggaggccccctactagaaggacgtgaaagcagcttttgggggaaactgaggcagtggggaagacagagcagaatgagccctcaccctggctgggggtccagcacaggctgtatctgcagagggtcccagaggaacgctggagccaagagaagccctgggaaggaggggtggggaacgacatgcatgtgagggatggcacactgatgtgtttatgcacctgtacacaggagcgcatggccatggctttggaaaggagaatggaaaaatagaagaaggtcggccgggcttggtggcttatgcctgtaaccccagcactttgggaggccgaggtgggcggatcacctgaagtcaggagttcgggaccagcctggcaaacaccccatctctactaagcgaaaacccatctctactaaaattacaaaaattagctgggcatggttgcgcatgcctgtaatcccagctactttggaggctgaggtggggagaattgcttgaacctgggaggtggaggttgcagtgagccaaggtcgcgacactgcactccagcctgggtgacagagtgagactccatctcaacagaaggaaaaaaaaggaaaataggagaaggtggaaatgggtgaagagagaagtcccctcactagctgcatgagaaatctatcttactgtggttctccatgggcagcaggaccatttttcagaatcaagagggaggacagtgtgagaaggcgatgatccaaagaagacagagaggtcagccccacccgatccctcaaatgggctcttggaggcacccccaggggcagcccatttctcaaagtccagaaaattagggtcccagaagggggcagcagcaggctgggagttaggagggagagcagggtgccggccctgccaccaagttgagagctggaggggaggtggggagagaacatcacagagcagccagccctggttcactcctggcagtttcttctcaagctccttccctaggagcatggtggcacgtgcctgtggtctcagctacttgggaggctgaggcgggaggatcgccagagcccaggagtttgaggctgcagtgagctatgagggtgcctctgtgctccatcctaggcaacagagtgatacgctgtttaaaaaggaaaaaatccttccctagagctagtatcctaaagctgcagagctagcccagacctcattggtttccttgtccttggggtgcttttcctgaatctttgcgggtgaagggagtgttgctcccagtccagaggcctgattctgtttggactgggttctcaagacacgaccaggttctcaagacacgagtccccttgttcctccccattaaagggggtttgtcagaagcaagaacagcccctctccccagtcacagcctgaagggaggccccgagagcttcctccttccccccacctgctccttaccttctctgccctgctttttagaactgcagttcattgttttaagggattgggggagggagcctggggacacaaaccttttatacaatacaaagctttgctttttttttttttttcttccttttccctttctcggttctcttctctcctctgaatggctgaagacccctctgccgagggaggttggggattgtgggacaaggtcccttggtgctgatggcctgaaggggcctgagctgtgggcagatgcagttttctgtgggcttggggaacctctcacgttgctgtgtcctggtgagcagcccgaccaataaacctgcttttctaaaagg

SEQ ID NO: 23057 - DNA, 1927 bp, Homo sapiens
  source 1..1927: mol_type = unassigned DNA
atggaggaccccacgctctatattgtcgagcggccgcttcccgggtaccccgacgccgtagaccagatccagctgactcaagcacagctggaggagcggcaggcggagatggagggcgcagtgcagagcatccagggcgagctgagcaagctgggcaaggcgcacgccaccacgagcaatacggtgagcaagctgctggagaaggtgcgcaaggtcagcgtcaacgtgaagaccgtgcgcggcagcctggagcgccaggcggggcagatcaagaagctggaggtcaacgaggccgagctgctgcggcgccgcaactttaaagtcatgatctaccaggatgaagtgaagctgccggccaaactgagcatcagcaaatcgctgaaagagtcggaggcgctgccagagaaggagggcgaggagctgggcgagggcgagcggcccgaggaggacgcagcggcgctggagctttcgtcggacgaggcggtggaggttgaggaggttattgaggagtcccgcgcagagcgtatcaagcgcagcggcctgcggcgcgtggacgacttcaagaaggccttctccaaggagaagatggagaagaccaaggtgcgtacccgcgagaacctggagaagacgcgcctcaagaccaaggaaaacctggagaagacgcggcacaccctggagaagcgcatgaacaagctgggcacgcgcctggtgcccgccgagcggcgcgagaaactgaagacgtcgcgggacaagttgcgcaaatccttcacgcccgaccacgtggtgtacgcgcgctccaagaccgcggtctacaaggtgccacccttcaccttccacgtcaagaagatccgcgagggccaggtggaagtgctcaaggccaccgagatggtggaggtgggcgccgacgacgacgagggcggcgcggagcgcggggaggccggcgacctgcggcgcgggagcagccccgacgtgcacgcgctgctggagatcaccgaggagtcggacgccgtgctggtggacaagagcgacagcgactgagccgcccccgctgccacccaccccattcctcgctccttccgaacttcctctttcgcattctctctcggctcgagctggctgagatttttctaaattgaaaacacgcccccctccccacacctccaggaactccactcccagtcttagagctgccttcccctcagcctctccccacaccacccacccagctgctgtcattccgctcactgagctcttcttcattctcaccctgatccctgggggactcaaagccaaaactgcccaaagaggaaagattgaatcctaaaggggatccctgcccccatgggaggccccctactagaaggacgtgaaagcagcttttgggggaaactgaggcagtggggaagacagagcagaatgagccctcaccctggctgggggtccagcacaggctgtatctgcagagggtcccagaggaacgctggagccaagagaagccctgggaaggaggggtggggaacgacatgcatgtgagggatggcacactgatgtgtttatgcacctgtacacaggagcgcatggccatggctttggaaaggagaatggaaaaatagaagaaggtcggccgggcttggtggcttatgcctgtaaccccagcactttgggaggccgaggtgggcggatcacctgaagtcaggagttcgggaccagcctggcaaacaccccatctctactaagcgaaaacccatctctactaaaattacaaaaattagctgggcatggttgcgcatgcctgtaatcccagctactttggaggctgaggtggggagaattgcttgaacctgggaggtggaggttgcagtgagccaaggtcgcgacactgcactccagcctgggtgacagagtgagactccatctcaacagaagg

SEQ ID NO: 23058 - DNA, 4279 bp, Homo sapiens
  source 1..4279: mol_type = unassigned DNA
gagcagagtttcagttttggcagcagcgtccagtgccctgccagtagctcctagagaggcaggggttaccaactggccagcaggctgtgtccctgaagtcagatcaacgggagagaaggaagtggctaaaacattgcacaggagaagtcggcctgagtggtgcggcgctcgggacccaccagcaatgctgctcttcgtgctcacctgcctgctggcggtcttcccagccatctccacgaagagtcccatatttggtcccgaggaggtgaatagtgtggaaggtaactcagtgtccatcacgtgctactacccacccacctctgtcaaccggcacacccggaagtactggtgccggcagggagctagaggtggctgcataaccctcatctcctcggagggctacgtctccagcaaatatgcaggcagggctaacctcaccaacttcccggagaacggcacatttgtggtgaacattgcccagctgagccaggatgactccgggcgctacaagtgtggcctgggcatcaatagccgaggcctgtcctttgatgtcagcctggaggtcagccagggtcctgggctcctaaatgacactaaagtctacacagtggacctgggcagaacggtgaccatcaactgccctttcaagactgagaatgctcaaaagaggaagtccttgtacaagcagataggcctgtaccctgtgctggtcatcgactccagtggttatgtaaatcccaactatacaggaagaatacgccttgatattcagggtactggccagttactgttcagcgttgtcatcaaccaactcaggctcagcgatgctgggcagtatctctgccaggctggggatgattccaatagtaataagaagaatgctgacctccaagtgctaaagcccgagcccgagctggtttatgaagacctgaggggctcagtgaccttccactgtgccctgggccctgaggtggcaaacgtggccaaatttctgtgccgacagagcagtggggaaaactgtgacgtggtcgtcaacaccctggggaagagggccccagcctttgagggcaggatcctgctcaacccccaggacaaggatggctcattcagtgtggtgatcacaggcctgaggaaggaggatgcagggcgctacctgtgtggagcccattcggatggtcagctgcaggaaggctcgcctatccaggcctggcaactcttcgtcaatgaggagtccacgattccccgcagccccactgtggtgaagggggtggcaggaggctctgtggccgtgctctgcccctacaaccgtaaggaaagcaaaagcatcaagtactggtgtctctgggaaggggcccagaatggccgctgccccctgctggtggacagcgaggggtgggttaaggcccagtacgagggccgcctctccctgctggaggagccaggcaacggcaccttcactgtcatcctcaaccagctcaccagccgggacgccggcttctactggtgtctgaccaacggcgatactctctggaggaccaccgtggagatcaagattatcgaaggagaaccaaacctcaaggtaccagggaatgtcacggctgtgctgggagagactctcaaggtcccctgtcactttccatgcaaattctcctcgtacgagaaatactggtgcaagtggaataacacgggctgccaggccctgcccagccaagacgaaggccccagcaaggccttcgtgaactgtgacgagaacagccggcttgtctccctgaccctgaacctggtgaccagggctgatgagggctggtactggtgtggagtgaagcagggccacttctatggagagactgcagccgtctatgtggcagttgaagagaggaaggcagcggggtcccgcgatgtcagcctagcgaaggcagacgctgctcctgatgagaaggtgctagactctggttttcgggagattgagaacaaagccattcaggatcccaggctttttgcagaggaaaaggcggtggcagatacaagagatcaagccgatgggagcagagcatctgtggattccggcagctctgaggaacaaggtggaagctccagagcgctggtctccaccctggtgcccctgggcctggtgctggcagtgggagccgtggctgtgggggtggccagagcccggcacaggaagaacgtcgaccgagtttcaatcagaagctacaggacagacattagcatgtcagacttcgagaactccagggaatttggagccaatgacaacatgggagcctcttcgatcactcaggagacatccctcggaggaaaagaagagtttgttgccaccactgagagcaccacagagaccaaagaacccaagaaggcaaaaaggtcatccaaggaggaagccgagatggcctacaaagacttcctgctccagtccagcaccgtggccgccgaggcccaggacggcccccaggaagcctagacggtgtcgccgcctgctccctgcacccatgacaatcaccttcagaatcatgtcgatcctggggccctcagctcctggggaccccactccctgctctaacacctgcctaggtttttcctactgtcctcagaggcgtgctggtcccctcctcagtgacatcaaagcctggcctaattgttcctattggggatgagggtggcatgaggaggtcccacttgcaacttctttctgttgagagaacctcaggtacggagaagaatagaggtcctcatgggtcccttgaaggaagagggaccagggtgggagagctgattgcagaaaggagagacgtgcagcgcccctctgcacccttatcatgggatgtcaacagaatttttccctccactccatccctccctcccgtccttcccctcttcttctttccttccatcaaaagatgtatttgaattcatactagaattcaggtgctttgctagatgctgtgacaggtatgccaccaacactgctcacagcctttctgaggacaccagtgaaagaagccacagctcttcttggcgtatttatactcactgagtcttaacttttcaccaggggtgctcacctctgcccctattgggagaggtcataaaatgtctcgagtcctaaggccttaggggtcatgtatgatgagcatacacacaggtaattataaacccacattcttaccatttcacacataagaaaattgaggtttggaagagtgaagcgtttttctttttcttttttttttttgagacggagtctctcactgtcgcccaggctggagtgcagtggcgcaatctcggctcactgcaacctccgcctcccaggttgacaccattctcctgcctcaccctcccaagtagctgggactacaggcgcctgccagcacgcctggctaattttttgtatttttagtagagacagggtttcaccgtgttagccaggatggtctcgatctcctgacctcgtgatccgcctgcctctgcctcccaaagtgctgggattacaggcgtgagccaccgcgtccggcctctttttttcttttcttttttttgagacaaagtctcactgtgtcacccagactggaatgcagtgacacaatctcggctcactgaaacctctgccttccaggttcaagctattctcatgcctcagcctctcaagtagctgggactacagatgtgggccaccatgtctggctaattttttttttttttttttttttttgtagagacagggtttcgccatgttgacgagactggtctcgaactcctggcctcaagtgatctgccgcctcagcttctcaaagtactgggattatataggcatgagccactgagcctggccctgaagcgtttttctcaaaggccctcagtgagataaattagatttggcatctcctgtcctgggccagggatctctctacaagagcccctgcccctctgttggaggcacagttttagaataaggaggaggagggagaagagaaaatgtaaaggagggagatctttcccaggccgcaccatttctgtcactcacatggacccaagataaaagaatggccaaaccctcacaacccctgatgtttgaagagttccaagttgaagggaaacaaagaagtgtttgatggtgccagagaggggctgctctccagaaagctaaaatttaatttcttttttcctctgagttctgtacttcaaccagcctacaagctggcacttgctaacaaatcagaaatatgacaattaatgattaaagactgtgattgccaccaacgag

SEQ ID NO: 23059 - DNA, 3203 bp, Homo sapiens
  source 1..3203: mol_type = unassigned DNA
tgcgggcgtctccgccattttgtgagtctataactcggagccgttgggtcggttcctgctattccggcgcctccactccgtcccccgcgggtctgctctgtgtgccatggacggcattgtcccagatatagccgttggtacaaagcggggatctgacgagcttttctctacttgtgtcactaacggaccgtttatcatgagcagcaactcggcttctgcagcaaacggaaatgacagcaagaagttcaaaggtgacagccgaagtgcaggcgtcccctctagagtgatccacatccggaagctccccatcgacgtcacggagggggaagtcatctccctggggctgccctttgggaaggtcaccaacctcctgatgctgaaggggaaaaaccaggccttcatcgagatgaacacggaggaggctgccaacaccatggtgaactactacacctcggtgacccctgtgctgcgcggccagcccatctacatccagttctccaaccacaaggagctgaagaccgacagctctcccaaccaggcgcgggcccaggcggccctgcaggcggtgaactcggtccagtcggggaacctggccttggctgcctcggcggcggccgtggacgcagggatggcgatggccgggcagagccccgtgctcaggatcatcgtggagaacctcttctaccctgtgaccctggatgtgctgcaccagattttctccaagttcggcacagtgttgaagatcatcaccttcaccaagaacaaccagttccaggccctgctgcagtatgcggaccccgtgagcgcccagcacgccaagctgtcgctggacgggcagaacatctacaacgcctgctgcacgctgcgcatcgacttttccaagctcaccagcctcaacgtcaagtacaacaatgacaagagccgtgactacacacgcccagacctgccttccggggacagccagccctcgctggaccagaccatggccgcggccttcggcctttccgttccgaacgtccacggcgccctggcccccctggccatcccctcggcggcggcggcagctgcggcggcaggtcggatcgccatcccgggcctggcgggggcaggaaattctgtattgctggtcagcaacctcaacccagagagagtcacaccccaaagcctctttattcttttcggcgtctacggtgacgtgcagcgcgtgaagatcctgttcaataagaaggagaacgccctagtgcagatggcggacggcaaccaggcccagctggccatgagccacctgaacgggcacaagctgcacgggaagcccatccgcatcacgctctcgaagcaccagaacgtgcagctgccccgcgagggccaggaggaccagggcctgaccaaggactacggcaactcacccctgcaccgcttcaagaagccgggctccaagaacttccagaacatattcccgccctcggccacgctgcacctctccaacatcccgccctcagtctccgaggaggatctcaaggtcctgttttccagcaatgggggcgtcgtcaaaggattcaagttcttccagaaggaccgcaagatggcactgatccagatgggctccgtggaggaggcggtccaggccctcattgacctgcacaaccacgacctcggggagaaccaccacctgcgggtctccttctccaagtccaccatctaggggcacaggcccccacggccgggccccctggcgacaacttccatcattccagagaaaagccactttaaaaacagctgaagtgaccttagcagaccagagattttatttttttaaagagaaatcagtttacctgtttttaaaaaaattaaatctagttcaccttgctcaccctgcggtgacagggacagctcaggctcttggtgactgtggcagcgggagttcccggccctccacacccggggccagaccctcggggccatgccttggtggggcctgtgtcgggcgtggggcctgcaggtgggcgccccgaccacgacttggcttccttgtgccttaaaaaacctgccttcctgcagccacacacccacccggggtgtcctggggacccaaggggtgggggggtcacaccagagagaggcagggggcctggccggctcctgcaggatcatgcagctggggcgcggcggccgcggctgcgacaccccaaccccagccctctaatcaagtcacgtgattctcccttcaccccgcccccagggccttcccttctgcccccaggcgggctccccgctgctccagctgcggagctggtcgacataatctctgtattatatactttgcagttgcagacgtctgtgcctagcaatatttccagttgaccaaatattctaatcttttttcatttatatgcaaaagaaatagttttaagtaactttttatagcaagatgatacaatggtatgagtgtaatctaaacttccttgtggtattaccttgtatgctgttacttttattttattccttgtaattaagtcacaggcaggacccagtttccagagagcaggcggggccgcccagtgggtcaggcacagggagccccggtcctatcttagagcccctgagcttcagggaaggggcgggcgtgtcgccgcctctggcatcgcctccggttgccttacaccacgccttcacctgcagtcgcctagaaaacttgctctcaaacttcagggttttttcttccttcaaattttggaccaaagtctcatttctgtgttttgcctgcctctgatgctgggacccggaaggcgggcgctcctcctgtcttctctgtgctctttctaccgcccccgcgtcctgtcccgggggctctcctaggatcccctttccgtaaaagcgtgtaacaagggtgtaaatatttataattttttatacctgttgtgagacccgaggggcggcggcgcggttttttatggtgacacaaatgtatattttgctaacagcaattccaggctcagtattgtgaccgcggagccacaggggaccccacgcacattccgttgccttacccgatggcttgtgacgcggagagaaccgattaaaaccgtttgagaaactcctcccttgtctagccctgtgttcgctgtggacgctgtagaggcaggttggccagtctgtacctggacttcgaataaatcttctgtatcctcgctccgttccgcctt

SEQ ID NO: 23060 - DNA, 2201 bp, Homo sapiens
  source 1..2201: mol_type = unassigned DNA
tgcgggcgtctccgccattttgtgagtctataactcggagccgttgggtcggttcctgctattccggcgcctccactccgtcccccgcgggtctgctctgtgtgccatggacggcattgtcccagatatagccgttggtacaaagagagtcacaccccaaagcctctttattcttttcggcgtctacggtgacgtgcagcgcgtgaagatcctgttcaataagaaggagaacgccctagtgcagatggcggacggcaaccaggcccagctggccatgagccacctgaacgggcacaagctgcacgggaagcccatccgcatcacgctctcgaagcaccagaacgtgcagctgccccgcgagggccaggaggaccagggcctgaccaaggactacggcaactcacccctgcaccgcttcaagaagccgggctccaagaacttccagaacatattcccgccctcggccacgctgcacctctccaacatcccgccctcagtctccgaggaggatctcaaggtcctgttttccagcaatgggggcgtcgtcaaaggattcaagttcttccagaaggaccgcaagatggcactgatccagatgggctccgtggaggaggcggtccaggccctcattgacctgcacaaccacgacctcggggagaaccaccacctgcgggtctccttctccaagtccaccatctaggggcacaggcccccacggccgggccccctggcgacaacttccatcattccagagaaaagccactttaaaaacagctgaagtgaccttagcagaccagagattttatttttttaaagagaaatcagtttacctgtttttaaaaaaattaaatctagttcaccttgctcaccctgcggtgacagggacagctcaggctcttggtgactgtggcagcgggagttcccggccctccacacccggggccagaccctcggggccatgccttggtggggcctgtgtcgggcgtggggcctgcaggtgggcgccccgaccacgacttggcttccttgtgccttaaaaaacctgccttcctgcagccacacacccacccggggtgtcctggggacccaaggggtgggggggtcacaccagagagaggcagggggcctggccggctcctgcaggatcatgcagctggggcgcggcggccgcggctgcgacaccccaaccccagccctctaatcaagtcacgtgattctcccttcaccccgcccccagggccttcccttctgcccccaggcgggctccccgctgctccagctgcggagctggtcgacataatctctgtattatatactttgcagttgcagacgtctgtgcctagcaatatttccagttgaccaaatattctaatcttttttcatttatatgcaaaagaaatagttttaagtaactttttatagcaagatgatacaatggtatgagtgtaatctaaacttccttgtggtattaccttgtatgctgttacttttattttattccttgtaattaagtcacaggcaggacccagtttccagagagcaggcggggccgcccagtgggtcaggcacagggagccccggtcctatcttagagcccctgagcttcagggaaggggcgggcgtgtcgccgcctctggcatcgcctccggttgccttacaccacgccttcacctgcagtcgcctagaaaacttgctctcaaacttcagggttttttcttccttcaaattttggaccaaagtctcatttctgtgttttgcctgcctctgatgctgggacccggaaggcgggcgctcctcctgtcttctctgtgctctttctaccgcccccgcgtcctgtcccgggggctctcctaggatcccctttccgtaaaagcgtgtaacaagggtgtaaatatttataattttttatacctgttgtgagacccgaggggcggcggcgcggttttttatggtgacacaaatgtatattttgctaacagcaattccaggctcagtattgtgaccgcggagccacaggggaccccacgcacattccgttgccttacccgatggcttgtgacgcggagagaaccgattaaaaccgtttgagaaactcctcccttgtctagccctgtgttcgctgtggacgctgtagaggcaggttggccagtctgtacctggacttcgaataaatcttctgtatcctcgctccgttccgcctt

SEQ ID NO: 23061 - DNA, 3281 bp, Homo sapiens
  source 1..3281: mol_type = unassigned DNA
tgcgggcgtctccgccattttgtgagtctataactcggagccgttgggtcggttcctgctattccggcgcctccactccgtcccccgcgggtctgctctgtgtgccatggacggcattgtcccagatatagccgttggtacaaagcggggatctgacgagcttttctctacttgtgtcactaacggaccgtttatcatgagcagcaactcggcttctgcagcaaacggaaatgacagcaagaagttcaaaggtgacagccgaagtgcaggcgtcccctctagagtgatccacatccggaagctccccatcgacgtcacggagggggaagtcatctccctggggctgccctttgggaaggtcaccaacctcctgatgctgaaggggaaaaaccaggccttcatcgagatgaacacggaggaggctgccaacaccatggtgaactactacacctcggtgacccctgtgctgcgcggccagcccatctacatccagttctccaaccacaaggagctgaagaccgacagctctcccaaccaggcgcgggcccaggcggccctgcaggcggtgaactcggtccagtcggggaacctggccttggctgcctcggcggcggccgtggacgcagggatggcgatggccgggcagagccccgtgctcaggatcatcgtggagaacctcttctaccctgtgaccctggatgtgctgcaccagattttctccaagttcggcacagtgttgaagatcatcaccttcaccaagaacaaccagttccaggccctgctgcagtatgcggaccccgtgagcgcccagcacgccaagctgtcgctggacgggcagaacatctacaacgcctgctgcacgctgcgcatcgacttttccaagctcaccagcctcaacgtcaagtacaacaatgacaagagccgtgactacacacgcccagacctgccttccggggacagccagccctcgctggaccagaccatggccgcggccttcggtgcacctggtataatctcagcctctccgtatgcaggagctggtttccctcccacctttgccattcctcaagctgcaggcctttccgttccgaacgtccacggcgccctggcccccctggccatcccctcggcggcggcggcagctgcggcggcaggtcggatcgccatcccgggcctggcgggggcaggaaattctgtattgctggtcagcaacctcaacccagagagagtcacaccccaaagcctctttattcttttcggcgtctacggtgacgtgcagcgcgtgaagatcctgttcaataagaaggagaacgccctagtgcagatggcggacggcaaccaggcccagctggccatgagccacctgaacgggcacaagctgcacgggaagcccatccgcatcacgctctcgaagcaccagaacgtgcagctgccccgcgagggccaggaggaccagggcctgaccaaggactacggcaactcacccctgcaccgcttcaagaagccgggctccaagaacttccagaacatattcccgccctcggccacgctgcacctctccaacatcccgccctcagtctccgaggaggatctcaaggtcctgttttccagcaatgggggcgtcgtcaaaggattcaagttcttccagaaggaccgcaagatggcactgatccagatgggctccgtggaggaggcggtccaggccctcattgacctgcacaaccacgacctcggggagaaccaccacctgcgggtctccttctccaagtccaccatctaggggcacaggcccccacggccgggccccctggcgacaacttccatcattccagagaaaagccactttaaaaacagctgaagtgaccttagcagaccagagattttatttttttaaagagaaatcagtttacctgtttttaaaaaaattaaatctagttcaccttgctcaccctgcggtgacagggacagctcaggctcttggtgactgtggcagcgggagttcccggccctccacacccggggccagaccctcggggccatgccttggtggggcctgtgtcgggcgtggggcctgcaggtgggcgccccgaccacgacttggcttccttgtgccttaaaaaacctgccttcctgcagccacacacccacccggggtgtcctggggacccaaggggtgggggggtcacaccagagagaggcagggggcctggccggctcctgcaggatcatgcagctggggcgcggcggccgcggctgcgacaccccaaccccagccctctaatcaagtcacgtgattctcccttcaccccgcccccagggccttcccttctgcccccaggcgggctccccgctgctccagctgcggagctggtcgacataatctctgtattatatactttgcagttgcagacgtctgtgcctagcaatatttccagttgaccaaatattctaatcttttttcatttatatgcaaaagaaatagttttaagtaactttttatagcaagatgatacaatggtatgagtgtaatctaaacttccttgtggtattaccttgtatgctgttacttttattttattccttgtaattaagtcacaggcaggacccagtttccagagagcaggcggggccgcccagtgggtcaggcacagggagccccggtcctatcttagagcccctgagcttcagggaaggggcgggcgtgtcgccgcctctggcatcgcctccggttgccttacaccacgccttcacctgcagtcgcctagaaaacttgctctcaaacttcagggttttttcttccttcaaattttggaccaaagtctcatttctgtgttttgcctgcctctgatgctgggacccggaaggcgggcgctcctcctgtcttctctgtgctctttctaccgcccccgcgtcctgtcccgggggctctcctaggatcccctttccgtaaaagcgtgtaacaagggtgtaaatatttataattttttatacctgttgtgagacccgaggggcggcggcgcggttttttatggtgacacaaatgtatattttgctaacagcaattccaggctcagtattgtgaccgcggagccacaggggaccccacgcacattccgttgccttacccgatggcttgtgacgcggagagaaccgattaaaaccgtttgagaaactcctcccttgtctagccctgtgttcgctgtggacgctgtagaggcaggttggccagtctgtacctggacttcgaataaatcttctgtatcctcgctccgttccgcctt

SEQ ID NO: 23062 - DNA, 3260 bp, Homo sapiens
  source 1..3260: mol_type = unassigned DNA
tgcgggcgtctccgccattttgtgagtctataactcggagccgttgggtcggttcctgctattccggcgcctccactccgtcccccgcgggtctgctctgtgtgccatggacggcattgtcccagatatagccgttggtacaaagcggggatctgacgagcttttctctacttgtgtcactaacggaccgtttatcatgagcagcaactcggcttctgcagcaaacggaaatgacagcaagaagttcaaaggtgacagccgaagtgcaggcgtcccctctagagtgatccacatccggaagctccccatcgacgtcacggagggggaagtcatctccctggggctgccctttgggaaggtcaccaacctcctgatgctgaaggggaaaaaccaggccttcatcgagatgaacacggaggaggctgccaacaccatggtgaactactacacctcggtgacccctgtgctgcgcggccagcccatctacatccagttctccaaccacaaggagctgaagaccgacagctctcccaaccaggcgcgggcccaggcggccctgcaggcggtgaactcggtccagtcggggaacctggccttggctgcctcggcggcggccgtggacgcagggatggcgatggccgggcagagccccgtgctcaggatcatcgtggagaacctcttctaccctgtgaccctggatgtgctgcaccagattttctccaagttcggcacagtgttgaagatcatcaccttcaccaagaacaaccagttccaggccctgctgcagtatgcggaccccgtgagcgcccagcacgccaagctgtcgctggacgggcagaacatctacaacgcctgctgcacgctgcgcatcgacttttccaagctcaccagcctcaacgtcaagtacaacaatgacaagagccgtgactacacacgcccagacctgccttccggggacagccagccctcgctggaccagaccatggccgcggccttcgcctctccgtatgcaggagctggtttccctcccacctttgccattcctcaagctgcaggcctttccgttccgaacgtccacggcgccctggcccccctggccatcccctcggcggcggcggcagctgcggcggcaggtcggatcgccatcccgggcctggcgggggcaggaaattctgtattgctggtcagcaacctcaacccagagagagtcacaccccaaagcctctttattcttttcggcgtctacggtgacgtgcagcgcgtgaagatcctgttcaataagaaggagaacgccctagtgcagatggcggacggcaaccaggcccagctggccatgagccacctgaacgggcacaagctgcacgggaagcccatccgcatcacgctctcgaagcaccagaacgtgcagctgccccgcgagggccaggaggaccagggcctgaccaaggactacggcaactcacccctgcaccgcttcaagaagccgggctccaagaacttccagaacatattcccgccctcggccacgctgcacctctccaacatcccgccctcagtctccgaggaggatctcaaggtcctgttttccagcaatgggggcgtcgtcaaaggattcaagttcttccagaaggaccgcaagatggcactgatccagatgggctccgtggaggaggcggtccaggccctcattgacctgcacaaccacgacctcggggagaaccaccacctgcgggtctccttctccaagtccaccatctaggggcacaggcccccacggccgggccccctggcgacaacttccatcattccagagaaaagccactttaaaaacagctgaagtgaccttagcagaccagagattttatttttttaaagagaaatcagtttacctgtttttaaaaaaattaaatctagttcaccttgctcaccctgcggtgacagggacagctcaggctcttggtgactgtggcagcgggagttcccggccctccacacccggggccagaccctcggggccatgccttggtggggcctgtgtcgggcgtggggcctgcaggtgggcgccccgaccacgacttggcttccttgtgccttaaaaaacctgccttcctgcagccacacacccacccggggtgtcctggggacccaaggggtgggggggtcacaccagagagaggcagggggcctggccggctcctgcaggatcatgcagctggggcgcggcggccgcggctgcgacaccccaaccccagccctctaatcaagtcacgtgattctcccttcaccccgcccccagggccttcccttctgcccccaggcgggctccccgctgctccagctgcggagctggtcgacataatctctgtattatatactttgcagttgcagacgtctgtgcctagcaatatttccagttgaccaaatattctaatcttttttcatttatatgcaaaagaaatagttttaagtaactttttatagcaagatgatacaatggtatgagtgtaatctaaacttccttgtggtattaccttgtatgctgttacttttattttattccttgtaattaagtcacaggcaggacccagtttccagagagcaggcggggccgcccagtgggtcaggcacagggagccccggtcctatcttagagcccctgagcttcagggaaggggcgggcgtgtcgccgcctctggcatcgcctccggttgccttacaccacgccttcacctgcagtcgcctagaaaacttgctctcaaacttcagggttttttcttccttcaaattttggaccaaagtctcatttctgtgttttgcctgcctctgatgctgggacccggaaggcgggcgctcctcctgtcttctctgtgctctttctaccgcccccgcgtcctgtcccgggggctctcctaggatcccctttccgtaaaagcgtgtaacaagggtgtaaatatttataattttttatacctgttgtgagacccgaggggcggcggcgcggttttttatggtgacacaaatgtatattttgctaacagcaattccaggctcagtattgtgaccgcggagccacaggggaccccacgcacattccgttgccttacccgatggcttgtgacgcggagagaaccgattaaaaccgtttgagaaactcctcccttgtctagccctgtgttcgctgtggacgctgtagaggcaggttggccagtctgtacctggacttcgaataaatcttctgtatcctcgctccgttccgcctt

SEQ ID NO: 23063 - DNA, 3069 bp, Homo sapiens
  source 1..3069: mol_type = unassigned DNA
cagccgccattttctcgccgcttgtgtggctcgctggctgcgtggctcggttcttgtgagcgaagctttgtccggttcggcaatggacggaatcgtcactgaggttgcagttggcgtgaagagaggatctgacgaactactctcaggcagtgttctcagtagtccgaactctaatatgagcagcatggtagttacagccaatggtaatgatagtaaaaaatttaaaggagaagataaaatggatggtgctccttctcgtgtacttcatattcgaaaattacctggggaagtaacagaaactgaagttattgctttaggcttaccttttggtaaggtgaccaacatccttatgctgaaaggaaaaaatcaggcatttttggaactagcaaccgaggaagcagctattactatggttaattactattctgctgtgacacctcatcttcgtaaccaaccaatatatatccagtactcgaatcacaaagaactaaagacagataatacattaaaccaacgtgctcaggcagttcttcaagctgtgacagctgtccagacagcaaatactcctcttagtggcaccacagttagcgagagtgcagtgactccagcccagagtccagtacttagaataattattgacaacatgtactaccctgtaacacttgatgttcttcaccaaatattttctaagtttggtgctgtattgaagataatcacatttacaaaaaataaccagtttcaagctttgctccagtatggtgatccagtaaatgctcaacaagcaaaactagccctagatggtcagaatatttataatgcctgctgtaccctaaggattgatttttccaaacttgtgaatttgaatgtaaaatacaacaatgataaaagtagggattatactcgacctgatcttccatctggggatggacaacctgcattggacccagctattgctgcagcatttgccaaggagacatccctcttagctgttccaggagctctgagtcctttggccattccaaatgctgctgcagcagctgctgcagctgctgctggccgagtgggtatgcctggagtctcagctggtggcaatacagtcctgttggttagcaatttaaatgaagagatggttacgccccaaagtctgtttaccctcttcggtgtttatggagatgtgcagcgtgtgaagattttatacaataagaaagacagcgctctaatacagatggctgatggaaaccaatcacaacttgccatgaatcatcttaatggacagaaaatgtatggaaaaattattcgtgttactctgtctaaacatcagactgtacagctacctcgagagggacttgatgatcaagggctaacaaaagattttggtaattccccattgcatcgttttaagaaacctggatccaaaaattttcaaaacatttttcctccttctgccacccttcacctatctaatatccctccatcagtagcagaagaggatctacgaacactgttcgctaacactgggggcactgtgaaagcatttaagttttttcaaagagatcacaaaatggctcttcttcagatggcaacagtggaagaagctattcaggccttgattgatcttcataattataaccttggagaaaaccatcatctgagagtgtctttctccaagtcaacaatttaaaaatgggaagatgaagattgggggtgaatcacattgttcaatgtcatcacctatttgactgttcagaaaagtggggaccagagtttgattttttttgtttttgtttttttggggtttcttttttttttccatgctgttatcattccttggttataaaatgaaatggcatatgtaaaggcagagttgttaactgctatatttcatctgttctatagggaagccattttgtctgtttaaaatttcagtttaattttgctttttttttttttttttttttcctttcaacttagttgacatacgtgccttaaaaaggaaaactagtgttgctattgtgcatttactagaaaaaaggaattggttgtttagggcacactgttatatgggaattaaaatatgtttaggcaggggtgtgtaaaaaggttaagtttttgtttctcctgcttggaacttattttgaattactggcttgtcacctttttttctatttaatcaaataagatacatgatattgaaagaataaagcagcatttttagtttttactaccttaggctttattgctttgaaaacaacattggccttttgtatctcacaattctggtctagattcagttatgaatgtaggcattagttaaaattaacaagatgcagagtattaatttcttaagacaacaaagtgatttctgtaagtttgagccctatgtggaaagcattgtggaatcttaaccttttcgtacacactcttgtgggacgtatcatataaatgtcagcactaagtaatgtcttgtttgtggctgaatatttttcgtagatgtttttgaagttgacatgacttacgtgcatttaaatatatattgccatccttagtttgtaattaagatttggaatatggttgtggatttctgagcatgtgcagactggtctagctagttcaggaactggtgcatgtatttttcaaagataaagaaagtgtactgcgaaaatatgcaggaagattaattttgtggcagttttctaaaactgacaaccaggtgggaccaaagtttatgtgcctttagtcttaatttaccttgcattgtaatattcagttttaataaatcttcaaaatattttgtatttaggaatagatctgactttaataaaaacatggctcagaatctacaggtcaaattaatttgaacagttcttgtcaatccgaattgttgattctgtttaaatgaccaatactttttgaaattgatgtacttagtttcaagattcatagattctgttatctatgtagacagaatggtcatgtatattttctattagttgagtttttacatctttagaaatgtaaaattcagtatagtttgaaagcggcacaattaaaaattaattttctaacaaa

SEQ ID NO: 23064 - DNA, 3057 bp, Homo sapiens
  source 1..3057: mol_type = unassigned DNA
ggctcgctggctgcgtggctcggttcttgtgagcgaagctttgtccggttcggcaatggacggaatcgtcactgaggttgcagttggcgtgaagagaggatctgacgaactactctcaggcagtgttctcagtagtccgaactctaatatgagcagcatggtagttacagccaatggtaatgatagtaaaaaatttaaaggagaagataaaatggatggtgctccttctcgtgtacttcatattcgaaaattacctggggaagtaacagaaactgaagttattgctttaggcttaccttttggtaaggtgaccaacatccttatgctgaaaggaaaaaatcaggcatttttggaactagcaaccgaggaagcagctattactatggttaattactattctgctgtgacacctcatcttcgtaaccaaccaatatatatccagtactcgaatcacaaagaactaaagacagataatacattaaaccaacgtgctcaggcagttcttcaagctgtgacagctgtccagacagcaaatactcctcttagtggcaccacagttagcgagagtgcagtgactccagcccagagtccagtacttagaataattattgacaacatgtactaccctgtaacacttgatgttcttcaccaaatattttctaagtttggtgctgtattgaagataatcacatttacaaaaaataaccagtttcaagctttgctccagtatggtgatccagtaaatgctcaacaagcaaaactagccctagatggtcagaatatttataatgcctgctgtaccctaaggattgatttttccaaacttgtgaatttgaatgtaaaatacaacaatgataaaagtagggattatactcgacctgatcttccatctggggatggacaacctgcattggacccagctattgctgcagcatttgccaaggagacatccctcttagggcttcctgttgcagctgttccaggagctctgagtcctttggccattccaaatgctgctgcagcagctgctgcagctgctgctggccgagtgggtatgcctggagtctcagctggtggcaatacagtcctgttggttagcaatttaaatgaagagatggttacgccccaaagtctgtttaccctcttcggtgtttatggagatgtgcagcgtgtgaagattttatacaataagaaagacagcgctctaatacagatggctgatggaaaccaatcacaacttgccatgaatcatcttaatggacagaaaatgtatggaaaaattattcgtgttactctgtctaaacatcagactgtacagctacctcgagagggacttgatgatcaagggctaacaaaagattttggtaattccccattgcatcgttttaagaaacctggatccaaaaattttcaaaacatttttcctccttctgccacccttcacctatctaatatccctccatcagtagcagaagaggatctacgaacactgttcgctaacactgggggcactgtgaaagcatttaagttttttcaaagagatcacaaaatggctcttcttcagatggcaacagtggaagaagctattcaggccttgattgatcttcataattataaccttggagaaaaccatcatctgagagtgtctttctccaagtcaacaatttaaaaatgggaagatgaagattgggggtgaatcacattgttcaatgtcatcacctatttgactgttcagaaaagtggggaccagagtttgattttttttgtttttgtttttttggggtttcttttttttttccatgctgttatcattccttggttataaaatgaaatggcatatgtaaaggcagagttgttaactgctatatttcatctgttctatagggaagccattttgtctgtttaaaatttcagtttaattttgctttttttttttttttttttttcctttcaacttagttgacatacgtgccttaaaaaggaaaactagtgttgctattgtgcatttactagaaaaaaggaattggttgtttagggcacactgttatatgggaattaaaatatgtttaggcaggggtgtgtaaaaaggttaagtttttgtttctcctgcttggaacttattttgaattactggcttgtcacctttttttctatttaatcaaataagatacatgatattgaaagaataaagcagcatttttagtttttactaccttaggctttattgctttgaaaacaacattggccttttgtatctcacaattctggtctagattcagttatgaatgtaggcattagttaaaattaacaagatgcagagtattaatttcttaagacaacaaagtgatttctgtaagtttgagccctatgtggaaagcattgtggaatcttaaccttttcgtacacactcttgtgggacgtatcatataaatgtcagcactaagtaatgtcttgtttgtggctgaatatttttcgtagatgtttttgaagttgacatgacttacgtgcatttaaatatatattgccatccttagtttgtaattaagatttggaatatggttgtggatttctgagcatgtgcagactggtctagctagttcaggaactggtgcatgtatttttcaaagataaagaaagtgtactgcgaaaatatgcaggaagattaattttgtggcagttttctaaaactgacaaccaggtgggaccaaagtttatgtgcctttagtcttaatttaccttgcattgtaatattcagttttaataaatcttcaaaatattttgtatttaggaatagatctgactttaataaaaacatggctcagaatctacaggtcaaattaatttgaacagttcttgtcaatccgaattgttgattctgtttaaatgaccaatactttttgaaattgatgtacttagtttcaagattcatagattctgttatctatgtagacagaatggtcatgtatattttctattagttgagtttttacatctttagaaatgtaaaattcagtatagtttgaaagcggcacaattaaaaattaattttctaacaaa

SEQ ID NO: 23065 - DNA, 3054 bp, Homo sapiens
  source 1..3054: mol_type = unassigned DNA
ggctcgctggctgcgtggctcggttcttgtgagcgaagctttgtccggttcggcaatggacggaatcgtcactgaggttgcagttggcgtgaagagaggatctgacgaactactctcaggcagtgttctcagtagtccgaactctaatatgagcagcatggtagttacagccaatggtaatgatagtaaaaaatttaaaggagaagataaaatggatggtgctccttctcgtgtacttcatattcgaaaattacctggggaagtaacagaaactgaagttattgctttaggcttaccttttggtaaggtgaccaacatccttatgctgaaaggaaaaaatcaggcatttttggaactagcaaccgaggaagcagctattactatggttaattactattctgctgtgacacctcatcttcgtaaccaaccaatatatatccagtactcgaatcacaaagaactaaagacagataatacattaaaccaacgtgctcaggcagttcttcaagctgtgacagctgtccagacagcaaatactcctcttagtggcaccacagttagcgagagtgcagtgactccagcccagagtccagtacttagaataattattgacaacatgtactaccctgtaacacttgatgttcttcaccaaatattttctaagtttggtgctgtattgaagataatcacatttacaaaaaataaccagtttcaagctttgctccagtatggtgatccagtaaatgctcaacaagcaaaactagccctagatggtcagaatatttataatgcctgctgtaccctaaggattgatttttccaaacttgtgaatttgaatgtaaaatacaacaatgataaaagtagggattatactcgacctgatcttccatctggggatggacaacctgcattggacccagctattgctgcagcatttgccaaggagacatccctcttagggcttcctgttgcagctgttccaggagctctgagtcctttggccattccaaatgctgctgcagcagctgctgcagctgctgctggccgagtgggtatgcctggagtctcagctggtggcaatacagtcctgttggttagcaatttaaatgaagagatggttacgccccaaagtctgtttaccctcttcggtgtttatggagatgtgcagcgtgtgaagattttatacaataagaaagacagcgctctaatacagatggctgatggaaaccaatcacaacttgccatgaatcatcttaatggacagaaaatgtatggaaaaattattcgtgttactctgtctaaacatcagactgtacagctacctcgagagggacttgatgatcaagggctaacaaaagattttggtaattccccattgcatcgttttaagaaacctggatccaaaaattttcaaaacatttttcctccttctgccacccttcacctatctaatatccctccatcagtagcagaagaggatctacgaacactgttcgctaacactgggggcactgtgaaagcatttaagttttttcaagatcacaaaatggctcttcttcagatggcaacagtggaagaagctattcaggccttgattgatcttcataattataaccttggagaaaaccatcatctgagagtgtctttctccaagtcaacaatttaaaaatgggaagatgaagattgggggtgaatcacattgttcaatgtcatcacctatttgactgttcagaaaagtggggaccagagtttgattttttttgtttttgtttttttggggtttcttttttttttccatgctgttatcattccttggttataaaatgaaatggcatatgtaaaggcagagttgttaactgctatatttcatctgttctatagggaagccattttgtctgtttaaaatttcagtttaattttgctttttttttttttttttttttcctttcaacttagttgacatacgtgccttaaaaaggaaaactagtgttgctattgtgcatttactagaaaaaaggaattggttgtttagggcacactgttatatgggaattaaaatatgtttaggcaggggtgtgtaaaaaggttaagtttttgtttctcctgcttggaacttattttgaattactggcttgtcacctttttttctatttaatcaaataagatacatgatattgaaagaataaagcagcatttttagtttttactaccttaggctttattgctttgaaaacaacattggccttttgtatctcacaattctggtctagattcagttatgaatgtaggcattagttaaaattaacaagatgcagagtattaatttcttaagacaacaaagtgatttctgtaagtttgagccctatgtggaaagcattgtggaatcttaaccttttcgtacacactcttgtgggacgtatcatataaatgtcagcactaagtaatgtcttgtttgtggctgaatatttttcgtagatgtttttgaagttgacatgacttacgtgcatttaaatatatattgccatccttagtttgtaattaagatttggaatatggttgtggatttctgagcatgtgcagactggtctagctagttcaggaactggtgcatgtatttttcaaagataaagaaagtgtactgcgaaaatatgcaggaagattaattttgtggcagttttctaaaactgacaaccaggtgggaccaaagtttatgtgcctttagtcttaatttaccttgcattgtaatattcagttttaataaatcttcaaaatattttgtatttaggaatagatctgactttaataaaaacatggctcagaatctacaggtcaaattaatttgaacagttcttgtcaatccgaattgttgattctgtttaaatgaccaatactttttgaaattgatgtacttagtttcaagattcatagattctgttatctatgtagacagaatggtcatgtatattttctattagttgagtttttacatctttagaaatgtaaaattcagtatagtttgaaagcggcacaattaaaaattaattttctaacaaa

SEQ ID NO: 23066 - DNA, 2935 bp, Homo sapiens
  source 1..2935: mol_type = unassigned DNA
gggatgaagagaggatctgacgaactactctcaggcagtgttctcagtagtccgaactctaatatgagcagcatggtagttacagccaatggtaatgatagtaaaaaatttaaaggagaagataaaatggatggtgctccttctcgtgtacttcatattcgaaaattacctggggaagtaacagaaactgaagttattgctttaggcttaccttttggtaaggtgaccaacatccttatgctgaaaggaaaaaatcaggcatttttggaactagcaaccgaggaagcagctattactatggttaattactattctgctgtgacacctcatcttcgtaaccaaccaatatatatccagtactcgaatcacaaagaactaaagacagataatacattaaaccaacgtgctcaggcagttcttcaagctgtgacagctgtccagacagcaaatactcctcttagtggcaccacagttagcgagagtgcagtgactccagcccagagtccagtacttagaataattattgacaacatgtactaccctgtaacacttgatgttcttcaccaaatattttctaagtttggtgctgtattgaagataatcacatttacaaaaaataaccagtttcaagctttgctccagtatggtgatccagtaaatgctcaacaagcaaaactagccctagatggtcagaatatttataatgcctgctgtaccctaaggattgatttttccaaacttgtgaatttgaatgtaaaatacaacaatgataaaagtagggattatactcgacctgatcttccatctggggatggacaacctgcattggacccagctattgctgcagcatttgccaaggagacatccctcttagggcttcctgttgcagctgttccaggagctctgagtcctttggccattccaaatgctgctgcagcagctgctgcagctgctgctggccgagtgggtatgcctggagtctcagctggtggcaatacagtcctgttggttagcaatttaaatgaagaggtgtttatggagatgtgcagcgtgtgaagattttatacaataagaaagacagcgctctaatacagatggctgatggaaaccaatcacaacttgccatgaatcatcttaatggacagaaaatgtatggaaaaattattcgtgttactctgtctaaacatcagactgtacagctacctcgagagggacttgatgatcaagggctaacaaaagattttggtaattccccattgcatcgttttaagaaacctggatccaaaaattttcaaaacatttttcctccttctgccacccttcacctatctaatatccctccatcagtagcagaagaggatctacgaacactgttcgctaacactgggggcactgtgaaagcatttaagttttttcaaagagatcacaaaatggctcttcttcagatggcaacagtggaagaagctattcaggccttgattgatcttcataattataaccttggagaaaaccatcatctgagagtgtctttctccaagtcaacaatttaaaaatgggaagatgaagattgggggtgaatcacattgttcaatgtcatcacctatttgactgttcagaaaagtggggaccagagtttgattttttttgtttttgtttttttggggtttcttttttttttccatgctgttatcattccttggttataaaatgaaatggcatatgtaaaggcagagttgttaactgctatatttcatctgttctatagggaagccattttgtctgtttaaaatttcagtttaattttgctttttttttttttttttttttcctttcaacttagttgacatacgtgccttaaaaaggaaaactagtgttgctattgtgcatttactagaaaaaaggaattggttgtttagggcacactgttatatgggaattaaaatatgtttaggcaggggtgtgtaaaaaggttaagtttttgtttctcctgcttggaacttattttgaattactggcttgtcacctttttttctatttaatcaaataagatacatgatattgaaagaataaagcagcatttttagtttttactaccttaggctttattgctttgaaaacaacattggccttttgtatctcacaattctggtctagattcagttatgaatgtaggcattagttaaaattaacaagatgcagagtattaatttcttaagacaacaaagtgatttctgtaagtttgagccctatgtggaaagcattgtggaatcttaaccttttcgtacacactcttgtgggacgtatcatataaatgtcagcactaagtaatgtcttgtttgtggctgaatatttttcgtagatgtttttgaagttgacatgacttacgtgcatttaaatatatattgccatccttagtttgtaattaagatttggaatatggttgtggatttctgagcatgtgcagactggtctagctagttcaggaactggtgcatgtatttttcaaagataaagaaagtgtactgcgaaaatatgcaggaagattaattttgtggcagttttctaaaactgacaaccaggtgggaccaaagtttatgtgcctttagtcttaatttaccttgcattgtaatattcagttttaataaatcttcaaaatattttgtatttaggaatagatctgactttaataaaaacatggctcagaatctacaggtcaaattaatttgaacagttcttgtcaatccgaattgttgattctgtttaaatgaccaatactttttgaaattgatgtacttagtttcaagattcatagattctgttatctatgtagacagaatggtcatgtatattttctattagttgagtttttacatctttagaaatgtaaaattcagtatagtttgaaagcggcacaattaaaaattaattttctaac

SEQ ID NO: 23067 - DNA, 1965 bp, Homo sapiens
  source 1..1965: mol_type = unassigned DNA
gtggctcggttcttgtgagcgaagctttgtccggttcggcaatggacggaatcgtcactgaggttgcagttggcgtgaagaatatctgatctggacttctgtggatttatggaagagctggctttatttctctatcctgtgggaggggcaaactttgattttgtatgtggagtaacttgaccttcagtttttttggtctgagaacaaaggccaaaaaatatgtaacagttaataacagaggatctgacgaactactctcaggcagtgttctcagtagtccgaactctaatatgagcagcatggtagttacagccaatggtaatgatagtaaaaaatttaaaggagaagataaaatggatggtgctccttctcgtgtacttcatattcgaaaattacctggggaagtaacagaaactgaagttattgctttaggcttaccttttggtaaggtgaccaacatccttatgctgaaaggaaaaaatcaggcatttttggaactagcaaccgaggaagcagctattactatggttaattactattctgctgtgacacctcatcttcgtaaccaaccaatatatatccagtactcgaatcacaaagaactaaagacagataatacattaaaccaacgtgctcaggcagttcttcaagctgtgacagctgtccagacagcaaatactcctcttagtggcaccacagttagcgagagtgcagtgactccagcccagagtccagtacttagaataattattgacaacatgtactaccctgtaacacttgatgttcttcaccaaatattttctaagtttggtgctgtattgaagataatcacatttacaaaaaataaccagtttcaagctttgctccagtatggtgatccagtaaatgctcaacaagcaaaactagccctagatggtcagaatatttataatgcctgctgtaccctaaggattgatttttccaaacttgtgaatttgaatgtaaaatacaacaatgataaaagtagggattatactcgacctgatcttccatctggggatggacaacctgcattggacccagctattgctgcagcatttgccaaggagacatccctcttagggcttcctgttgcagctgttccaggagctctgagtcctttggccattccaaatgctgctgcagcagctgctgcagctgctgctggccgagtgggtatgcctggagtctcagctggtggcaatacagtcctgttggttagcaatttaaatgaagagatggttacgccccaaagtctgtttaccctcttcggtgtttatggagatgtgcagcgtgtgaagattttatacaataagaaagacagcgctctaatacagatggctgatggaaaccaatcacaacttgccatgaatcatcttaatggacagaaaatgtatggaaaaattattcgtgttactctgtctaaacatcagactgtacagctacctcgagagggacttgatgatcaagggctaacaaaagattttggtaattccccattgcatcgttttaagaaacctggatccaaaaattttcaaaacatttttcctccttctgccacccttcacctatctaatatccctccatcagtagcagaagaggatctacgaacactgttcgctaacactgggggcactgtgaaagcatttaagttttttcaaagagatcacaaaatggctcttcttcagatggcaacagtggaagaagctattcaggccttgattgatcttcataattataaccttggagaaaaccatcatctgagagtgtctttctccaagtcaacaatttaaaaatgggaagatgaagattgggggtgaatcacattgttcaatgtcatcacctatttgactgttcagaaaagtggggaccagagtttgattttttttgtttttgtttttttggggtttcttttttttttccatgctgttatcattccttggttat

SEQ ID NO: 23068 - DNA, 3027 bp, Homo sapiens
  source 1..3027: mol_type = unassigned DNA
gcgtggctcggttcttgtgagcgaagctttgtccggttcggcaatggacggaatcgtcactgaggttgcagttggcgtgaagagaggatctgacgaactactctcaggcagtgttctcagtagtccgaactctaatatgagcagcatggtagttacagccaatggtaatgatagtaaaaaatttaaaggagaagataaaatggatggtgctccttctcgtgtacttcatattcgaaaattacctggggaagtaacagaaactgaagttattgctttaggcttaccttttggtaaggtgaccaacatccttatgctgaaaggaaaaaatcaggcatttttggaactagcaaccgaggaagcagctattactatggttaattactattctgctgtgacacctcatcttcgtaaccaaccaatatatatccagtactcgaatcacaaagaactaaagacagataatacattaaaccaacgtgctcaggcagttcttcaagctgtgacagctgtccagacagcaaatactcctcttagtggcaccacagttagcgagagtgcagtgactccagcccagagtccagtacttagaataattattgacaacatgtactaccctgtaacacttgatgttcttcaccaaatattttctaagtttggtgctgtattgaagataatcacatttacaaaaaataaccagtttcaagctttgctccagtatggtgatccagtaaatgctcaacaagcaaaactagccctagatggtcagaatatttataatgcctgctgtaccctaaggattgatttttccaaacttgtgaatttgaatgtaaaatacaacaatgataaaagtagggattatactcgacctgatcttccatctggggatggacaacctgcattggacccagctattgctgcagcatttgccaaggagacatccctcttagctgttccaggagctctgagtcctttggccattccaaatgctgctgcagcagctgctgcagctgctgctggccgagtgggtatgcctggagtctcagctggtggcaatacagtcctgttggttagcaatttaaatgaagagatggttacgccccaaagtctgtttaccctcttcggtgtttatggagatgtgcagcgtgtgaagattttatacaataagaaagacagcgctctaatacagatggctgatggaaaccaatcacaacttgccatgaatcatcttaatggacagaaaatgtatggaaaaattattcgtgttactctgtctaaacatcagactgtacagctacctcgagagggacttgatgatcaagggctaacaaaagattttggtaattccccattgcatcgttttaagaaacctggatccaaaaattttcaaaacatttttcctccttctgccacccttcacctatctaatatccctccatcagtagcagaagaggatctacgaacactgttcgctaacactgggggcactgtgaaagcatttaagttttttcaagatcacaaaatggctcttcttcagatggcaacagtggaagaagctattcaggccttgattgatcttcataattataaccttggagaaaaccatcatctgagagtgtctttctccaagtcaacaatttaaaaatgggaagatgaagattgggggtgaatcacattgttcaatgtcatcacctatttgactgttcagaaaagtggggaccagagtttgattttttttgtttttgtttttttggggtttcttttttttttccatgctgttatcattccttggttataaaatgaaatggcatatgtaaaggcagagttgttaactgctatatttcatctgttctatagggaagccattttgtctgtttaaaatttcagtttaattttgctttttttttttttttttttttcctttcaacttagttgacatacgtgccttaaaaaggaaaactagtgttgctattgtgcatttactagaaaaaaggaattggttgtttagggcacactgttatatgggaattaaaatatgtttaggcaggggtgtgtaaaaaggttaagtttttgtttctcctgcttggaacttattttgaattactggcttgtcacctttttttctatttaatcaaataagatacatgatattgaaagaataaagcagcatttttagtttttactaccttaggctttattgctttgaaaacaacattggccttttgtatctcacaattctggtctagattcagttatgaatgtaggcattagttaaaattaacaagatgcagagtattaatttcttaagacaacaaagtgatttctgtaagtttgagccctatgtggaaagcattgtggaatcttaaccttttcgtacacactcttgtgggacgtatcatataaatgtcagcactaagtaatgtcttgtttgtggctgaatatttttcgtagatgtttttgaagttgacatgacttacgtgcatttaaatatatattgccatccttagtttgtaattaagatttggaatatggttgtggatttctgagcatgtgcagactggtctagctagttcaggaactggtgcatgtatttttcaaagataaagaaagtgtactgcgaaaatatgcaggaagattaattttgtggcagttttctaaaactgacaaccaggtgggaccaaagtttatgtgcctttagtcttaatttaccttgcattgtaatattcagttttaataaatcttcaaaatattttgtatttaggaatagatctgactttaataaaaacatggctcagaatctacaggtcaaattaatttgaacagttcttgtcaatccgaattgttgattctgtttaaatgaccaatactttttgaaattgatgtacttagtttcaagattcatagattctgttatctatgtagacagaatggtcatgtatattttctattagttgagtttttacatctttagaaatgtaaaattcagtatagtttgaaagcggcacaattaaaaattaattttctaacaaa

SEQ ID NO: 23069 - DNA, 1700 bp, Homo sapiens
  source 1..1700: mol_type = unassigned DNA
agtttctggaaaaacgactataaaaacccagaaccatgctgcatctttgcgaacctgagtcaagacggaatgctgagtgagaatcgtcactgaggttgcagttggcgtgaagagaggatctgacgaactactctcaggcagtgttctcagtagtccgaactctaatatgagcagcatggtagttacagccaatggtaatgatagtaaaaaatttaaaggagaagataaaatggatggtgctccttctcgtgtacttcatattcgaaaattacctggggaagtaacagaaactgaagttattgctttaggcttaccttttggtaaggtgaccaacatccttatgctgaaaggaaaaaatcaggcatttttggaactagcaaccgaggaagcagctattactatggttaattactattctgctgtgacacctcatcttcgtaaccaaccaatatatatccagtactcgaatcacaaagaactaaagacagataatacattaaaccaacgtgctcaggcagttcttcaagctgtgacagctgtccagacagcaaatactcctcttagtggcaccacagttagcgagagtgcagtgactccagcccagagtccagtacttagaataattattgacaacatgtactaccctgtaacacttgatgttcttcaccaaatattttctaagtttggtgctgtattgaagataatcacatttacaaaaaataaccagtttcaagctttgctccagtatggtgatccagtaaatgctcaacaagcaaaactagccctagatggtcagaatatttataatgcctgctgtaccctaaggattgatttttccaaacttgtgaatttgaatgtaaaatacaacaatgataaaagtagggattatactcgacctgatcttccatctggggatggacaacctgcattggacccagctattgctgcagcatttgccaaggagacatccctcttagctgttccaggagctctgagtcctttggccattccaaatgctgctgcagcagctgctgcagctgctgctggccgagtgggtatgcctggagtctcagctggtggcaatacagtcctgttggttagcaatttaaatgaagaggtgtttatggagatgtgcagcgtgtgaagattttatacaataagaaagacagcgctctaatacagatggctgatggaaaccaatcacaacttgccatgaatcatcttaatggacagaaaatgtatggaaaaattattcgtgttactctgtctaaacatcagactgtacagctacctcgagagggacttgatgatcaagggctaacaaaagattttggtaattccccattgcatcgttttaagaaacctggatccaaaaattttcaaaacatttttcctccttctgccacccttcacctatctaatatccctccatcagtagcagaagaggatctacgaacactgttcgctaacactgggggcactgtgaaagcatttaagttttttcaagatcacaaaatggctcttcttcagatggcaacagtggaagaagctattcaggccttgattgatcttcataattataaccttggagaaaaccatcatctgagagtgtctttctccaagtcaacaatttaaaaatgggaagatgaagattgggggtgaatcacattgttcaatgtcatcacctatttgactgttca

SEQ ID NO: 23070 - DNA, 1488 bp, Homo sapiens
  source 1..1488: mol_type = unassigned DNA
agccgccattttctcgccgcttgtgtggctcgctggctgcgtggctcggttcttgtgagcgaagctttgtccggttcggcaatggacggaatcgtcactgaggttgcagttggcgtgaagagaggatctgacgaactactctcaggcagtgttctcagtagtccgaactctaatatgagcagcatggtagttacagccaatggtaatgatagtaaaaaatttaaaggagaagataaaatggatggtgctccttctcgtgtacttcatattcgaaaattacctggggaagtaacagaaactgaagttattgctttaggcttaccttttggtaaggtgaccaacatccttatgctgaaaggaaaaaatcaggcatttttggaactagcaaccgaggaagcagctattactatggttaattactattctgctgtgacacctcatcttcgtaaccaaccaatatatatccagtactcgaatcacaaagaactaaagacagataatcacatttacaaaaaataaccagtttcaagctttgctccagtatggtgatccagtaaatgctcaacaagcaaaactagccctagatggtcagaatatttataatgcctgctgtaccctaaggattgatttttccaaacttgtgaatttgaatgtaaaatacaacaatgataaaagtagggattatactcgacctgatcttccatctggggatggacaacctgcattggacccagctattgctgcagcatttgccaaggagacatccctcttagctgttccaggagctctgagtcctttggccattccaaatgctgctgcagcagctgctgcagctgctgctggccgagtgggtatgcctggagtctcagctggtggcaatacagtcctgttggttagcaatttaaatgaagagatggttacgccccaaagtctgtttaccctcttcggtgtttatggagatgtgcagcgtgtgaagattttatacaataagaaagacagcgctctaatacagatggctgatggaaaccaatcacaacttgccatgaatcatcttaatggacagaaaatgtatggaaaaattattcgtgttactctgtctaaacatcagactgtacagctacctcgagagggacttgatgatcaagggctaacaaaagattttggtaattccccattgcatcgttttaagaaacctggatccaaaaattttcaaaacatttttcctccttctgccacccttcacctatctaatatccctccatcagtagcagaagaggatctacgaacactgttcgctaacactgggggcactgtgaaagcatttaagttttttcaaagagatcacaaaatggctcttcttcagatggcaacagtggaagaagctattcaggccttgattgatcttcataattataaccttggagaaaaccatcatctgagagtgtctttctccaagtcaacaatttaaaaatgggaagatgaagattg

SEQ ID NO: 23071 - DNA, 1259 bp, Homo sapiens
  source 1..1259: mol_type = unassigned DNA
gctgcggcggctggagcaggcgagcggcggcggccgatagcgagtgtcagggccggccggggcggcgcttctcggcctgtcgctggtcggcctcctactgtacctcgtgcctgctgcggctgcgctggcctggctggccgtggggactaccgcggcctggtggggactgagccgcgagccccgaggttcgcgccccttgtcctccttcgttcagaaggcgcgacatcggcgaacactgttcgcttcgcctccggccaagtcgacagccaacggaaacctcctagagccgcggaccctgctcgaaggacctgaccctgccgaactgctcctcatgggcagttacctgggcaagcccgggccgccgcagcccgcccccgctccggagggccaggacctgcggaataggcctggccgccgcccgcccgcccggcgccgcgctccacaccgccctccccgccgacccatcgcgttcaccacttttacccctctctccccactcctcttctccgaccctccgggaggccttccccacgggatcgtgggactttaccagatcggtttgtaataacacctcgaagacgctatccgatccatcaggcccagtattcctgtccgggggtacttcccacagtgtgctggaatggttatcacaagaaggctgtgctgtcccctcgcaactccaggatggtgtgtagcccagtgactctgaggatcgcccctcctgacagaagattttcgcgttctgcgataccagagcagataatcagctcaacactgtcctcaccatcaagtaatgccccagacccatgtgcaaaggagactgtactgagtgccctcaaagagaagaagaagaaaaggacagtggaggaagaagaccaaatattccttgatggccaggaaaataaaagaagctgtcttgtcgacggtctcactgatgcctcttctgcattcaaagttcctcgacccgggccagatacactccagttcacagtggatgtcttccactttgctaatgactccagaaacatgtgacagaagaagcagatgtcaccgtggggccactgatcttcctggacaggaggggtgaccatgaagtagagcagtgggctttgccttctgacacctcagtggtgctgctgggcgtaggcctggctgtggtggtgtccctgactctgactgctgttatcctggttctcaccaggaggtgtcgcactgcctcccaccctgtgtctgcttccgaataaaagaagaaagcaata

SEQ ID NO: 23072 - DNA, 1490 bp, Homo sapiens
  source 1..1490: mol_type = unassigned DNA
ggctgcggcggctggagcaggcgagcggcggcggccgatagcgagtgtcagggccggccggggcggcgcttctcggcctgtcgctggtcggcctcctactgtacctcgtgcctgctgcggctgcgctggcctggctggccgtggggactaccgcggcctggtggggactgagccgcgagccccgaggttcgcgccccttgtcctccttcgttcagaaggcgcgacatcggcgaacactgttcgcttcgcctccggccaagtcgacagccaacggaaacctcctagagccgcggaccctgctcgaaggacctgaccctgccgaactgctcctcatgggcagttacctgggcaagcccgggccgccgcagcccgcccccgctccggagggccaggacctgcggaataggcctggccgccgcccgcccgcccggcgccgcgctccacaccgccctccccgccgacccatcgcgttcaccacttttacccctctctccccactcctcttctccgaccctccgggaggccttccccacgggatcgtgggactttaccagatcggtttgtaataacacctcgaagacgctatccgatccatcaggcccagtattcctgtccgggggtacttcccacagtgtgctggaatggttatcacaagaaggctgtgctgtcccctcgcaactccaggatggtgtgtagcccagtgactctgaggatcgcccctcctgacagaagattttcgcgttctgcgataccagagcagataatcagctcaacactgtcctcaccatcaagtaatgccccagacccatgtgcaaaggagactgtactgagtgccctcaaagagaagaagaagaaaaggacagtggaggaagaagaccaaatattccttgatggccaggaaaataaaagaagctgtcttgtcgacggtctcactgatgcctcttctgcattcaaagttcctcgacccgggccagatacactccagttcacagtggatgtcttccactttgctaatgactccagaaacatgatatacatcacctgccacctgaaggtcaccctagctgagcaggacccagatgaactcaacaaggcctgttccttcagcaagccttccaacagctggttcccagtggaaggcctggctgacatctgtcaatgctgtaacaaaggtgactgtggcactccaagccattccaggaggcagcctcgtgtcgtgagccagtggtccacgtctgcttccctgtaaccgcaggcatgtgacagaagaagcagatgtcaccgtggggccactgatcttcctggacaggaggggtgaccatgaagtagagcagtgggctttgccttctgacacctcagtggtgctgctgggcgtaggcctggctgtggtggtgtccctgactctgactgctgttatcctggttctcaccaggaggtgtcgcactgcctcccaccctgtgtctgcttccgaataaaagaagaaagcaata

SEQ ID NO: 23073 - DNA, 1679 bp, Homo sapiens
  source 1..1679: mol_type = unassigned DNA
catcattccttcccaaagccaccggaagcattccttctaggaaaggtggagtcggtagtgagaagccggaggtgagaagacccctgagcggatggattcattcattttctgaatttcctatgtgaggacagtattagagcccagtgaggctttgagaggccccaaagatgagcgccaacagcagcagagtgggccagcttctcttgcagggttcagcgtgcattaggtggaagcaggatgtggaaggggctgtctaccacctagccaactgcctcttactcctgggcttcatggggggcagtggggtgtatggatgcttctatctttttggcttcctgagtgcaggttacctgtgctgcgtgctgtggggctggttcagtgcctgtggcctggacattgttctttggagcttcctgctggctgtggtctgcctgctccagctggcacacctggtataccgcctgcgtgaggacaccctccctgaggagtttgacctcctctacaagacgctgtgcctgcccttgcaggtgcccctacagacatacaaggagattgttcactgctgcgaggagcaggtcttaactctggccactgaacagacctatgctgtggagggtgagacacccatcaaccgcctgtccctgctgctctctggccgggttcgtgtgagccaggatgggcagtttctgcactacatctttccataccagttcatggactctcctgagtgggaatcactacagccttctgaggagggggtgttccaggtcactctgactgctgagacctcatgtagctacatttcctggccccggaaaagtctccatcttcttctgaccaaagagcgatacatctcctgcctcttctcggctctgctgggatatgacatctcagagaagctctacactctcaatgacaagctctttgctaagtttgggctgcgctttgacatccgccttcccagcctctaccatgtcctgggtcccactgctgcagatgctggaccagagtccgagaagggtgatgaggaagtctgtgagccagctgtgtcccctcctcaggccacacccacctctctccagcaaacacccccttgttctacccctccagctaccaccaactttcctgcacctcctacccgggccaggttgtccaggccagacagtggcatactggcttctagaattcctctccagagctactctcaagttatatccaggggacaggcccctttggctccaacccacacgcctgaactttaaggatcattggactatcttctctgtggccagcgcagctctcttctgtgttcacagaatggccactgataggcatgcctcttttcccacccactggaaggctcacaggcaaggtgagagaggacacagaaggtgccaacactgtcgctacagtaaggacctgaagtgactttgagaaattcaccctcacaaaccttccttcaggagcaggcattggtagtgcagaggcacagattccgtcctttaccagctgcagaatcttgggcaagttacatagcctctgtgagcctcatcggtaaacagtgggggttatgaaacccacctcacagggttgttgtgaggatccaatgagttgatttaggtaagcacctagcacatgccgtggcaccaagtaagcactcaataaatcactcaactcct

SEQ ID NO: 23074 - DNA, 1345 bp, Homo sapiens
  source 1..1345: mol_type = unassigned DNA
catcattccttcccaaagccaccggaagcattccttctaggaaaggtggagtcggtagtgagaagccggaggtgagaagacccctgagcggatggattcattcattttctgaatttcctatgtgaggacagtattagagcccagtgaggctttgagaggccccaaagatgagcgccaacagcagcagagtgggccagcttctcttgcagggttcagcgtgcattaggtggaagcaggatgtggaaggggctgtctaccacctagccaactgcctcttactcctgggcttcatggggggcagtggggtgtatggatgcttctatctttttggcttcctgagtgcaggttacctgtgctgcgtgctgtggggctggttcagtgcctgtggcctggacattgttctttggagcttcctgctggctgtggtctgcctgctccagctggcacacctggtataccgcctgcgtgaggacaccctccctgaggagtttgacctcctctacaagacgctgtgcctgcccttgcaggtgcccctacagacatacaaggagattgttcactgctgcgaggagcaggtcttaactctggccactgaacagacctatgctgtggagggtgagacacccatcaaccgcctgtccctgctgctctctggccgggttcgtgtgagccaggatgggcagtttctgcactacatctttccataccagttcatggactctcctgagtgggaatcactacagccttctgaggagggggtgttccaggtcactctgactgctgagacctcatgtagctacatttcctggccccggaaaagtctccatcttcttctgaccaaagagcgatacatctcctgcctcttctcggctctgctgggatatgacatctcagagaagctctacactctcaatgacaagctctttgctaagtttgggctgcgctttgacatccgccttcccagcctctaccatgtcctgggtcccactgctgcagatgctggaccagagtccgagaagggtgatgaggaagtctgtgagccagctgtgtcccctcctcaggccacacccacctctctccagcaaacacccccttgttctacccctccagctaccaccaactttcctgcacctcctacccgggccaggttgtccaggccagacagtggcatactggagatagatgattttccctcttatttccaccagtttggcttttcagggaaggtggcagctggcagaatcccctgacaacaaaagcttctagaattcctctccagagctactctcaagttatatccaggggacaggcccctttggctccaacccacacgcctgaactttaa

SEQ ID NO: 23075 - DNA, 1250 bp, Homo sapiens
  source 1..1250: mol_type = unassigned DNA
catcattccttcccaaagccaccggaagcattccttctaggaaaggtggagtcggtagtgagaagccggaggtgagaagacccctgagcggatggattcattcattttctgaatttcctatgtgaggacagtattagagcccagtgaggctttgagaggccccaaagatgagcgccaacagcagcagagtgggccagcttctcttgcagggttcagcgtgcattaggtggaagcaggatgtggaaggggctgtctaccacctagccaactgcctcttactcctgggcttcatggggggcagtggggtgtatggatgcttctatctttttggcttcctgagtgcaggttacctgtgctgcgtgctgtggggctggttcagtgcctgtggcctggacattgttctttggagcttcctgctggctgtggtctgcctgctccagctggcacacctggtataccgcctgcgtgaggacaccctccctgaggagtttgacctcctctacaagacgctgtgcctgcccttgcaggtgcccctacagacatacaaggagattgttcactgctgcgaggagcaggtcttaactctggccactgaacagacctatgctgtggagggtgagacacccatcaaccgcctgtccctgctgctctctggccgggttcgtgtgagccaggatgggcagtttctgcactacatctttccataccagttcatggactctcctgagtgggaatcactacagccttctgaggagggggtgttccaggtcactctgactgctgagacctcatgtagctacatttcctggccccggaaaagtctccatcttcttctgaccaaagagcgatacatctcctgcctcttctcggctctgctgggatatgacatctcagagaagctctacactctcaatgacaagctctttgctaagtttgggctgcgctttgacatccgccttcccagcctctaccatgtcctgggtcccactgctgcagatgctggaccagagtccgagaagggtgatgaggaagtctgtgagccagctgtgtcccctcctcaggccacacccacctctctccagcaaacacccccttgttctacccctccagctaccaccaactttcctgcacctcctacccgggccaggttgtccaggccagacagtggcatactggagatagatgattttccctcttatttccaccagtttggcttttcagggaaggtggcagctggcagaatcccctga

SEQ ID NO: 23076 - DNA, 1345 bp, Homo sapiens
  source 1..1345: mol_type = unassigned DNA
aagctccgggcagggctgggaaggaaaggaaataccaaaatatttgcagactggatccaaatcaggagcccagatgaacttaaagaagcgagcatgggattcttagtttttcaagatccgtacacacgaagcctttaatcagcatcaactccagtgtccgttttctctggttttgtgaagactgcacaaaactctcatgatggagaaccaaaggacttagttacctgtttcagtgtcatctaaagtcaactgaaaagtgaagcaggcagtaatacagccatggaaagaaattcaagtttatggaagaacctaatagatgaacacccagtctgcacaacctggaagcaagaggccgaaggagccatttatcatcttgccagtattttatttgtagtaggtttcatgggtggcagtggattcttcgggctcctttatgtcttcagtttgctggggttgggttttctctgttctgctgtctgggcttgggtagatgtctgtgcagctgacatattttcctggaattttgtactgtttgtcatctgcttcatgcaatttgttcatattgcatatcaagttcgcagcataacctttgcccgagaattccaagtgttgtacagctcccttttccagcccctggggatctctttgcctgtcttcagaacgattgctttgagctctgaagtggttactttggaaaaggaacactgttatgccatgcaggggaaaacttccattgataaactctccttgcttgtttcaggaaggatcagagtgacagttgatggcgaatttctgcattacattttcccccttcagttcctggattctcctgagtgggattcactgagacccacagaggaaggcatttttcaggtaaccctcactgcagaaactgattgtcgatatgtgtcttggaggagaaagaaattatatctgctctttgctcagcatcgctacatctcccgccttttttcagtgctaattggcagtgacattgcagataaactctatgccttgaatgacagggtatatataggaaaaagatatcactatgatattcggctacccaacttctatcaaatgtcaactccagaaatacgcagatcacccctgacacaacattttcagaattccagacgatactgtgataaatgacatcaaagtctgaaatttataagtataaaaaaagactctctcttcatcattccccagtgaaatagcaaaatacaaaaaaagagctccctaatgtttttataaatcaaattcagaagcgagatgccattgccaactgttttattcctttcaacaactgcattgtgaataaactttacaaatttttcttgta

SEQ ID NO: 23077 - DNA, 582 bp, Homo sapiens
  source 1..582: mol_type = unassigned DNA
gttttattgaagtataatatgcacacataaatggacatatataaatgtacaacttgatgaattttctgatgaatttcactcaatattccagaatcctgactgtataaggaacatgataacatgaatcttacaggacattatgtcacttattataatgtatgaatttaatattttgcctttcaaaatcataaagggcaagagtcatcagggatctgaaatacacttcctctaccccccacccctccccaattatgtgctctctttctccttcccttataaatgttgttcttgtgttttgataggatcagagtgacagttgatggcgaatttctgcattacattttcccccttcagttcctggattctcctgagtgggattcactgagacccacagaggaaggcatttttcaggtaaccctcactgcagaaactgattgtcgatatgtgtcttggaggagaaagaaattatatctgctctttgctcagcatcgctacatctcccgccttttttcagtgctaattggcagtgacattgcagataaactctatgccttgaatgacagggtatatataggaaaaaga

SEQ ID NO: 23078 - DNA, 1755 bp, Homo sapiens
  source 1..1755: mol_type = unassigned DNA
tgacagatctatccatctggccatccatccgtgggggtctgcaatggccacctttagccgccaggaatttttccagcagctactgcaaggctgtctcctgcctactgcccagcagggccttgaccagatctggctgctccttgccatctgcctcgcctgccgcctcctctggaggctcgggttgccatcctacctgaagcatgcaagcaccgtggcaggcgggttcttcagcctctaccacttcttccagctgcacatggtttgggtcgtgctgctcagcctcctgtgctacctcgtgctgttcctctgccgacattcctcccatcgaggcgtcttcctatccgtcaccatcctcatctacctactcatgggtgagatgcacatggtagacaccgtgacatggcacaagatgcgaggggcacagatgattgtggccatgaaggcagtgtctctgggcttcgacctggaccggggcgaggtgggtacggtgccctcgccagtggagttcatgggctacctctacttcgtgggcaccatcgtcttcgggccctggatatccttccacagctacctacaagctgtccaaggccgcccactgagctgccggtggctgcagaaggtggcccggagcctggcactggccctgctgtgccttgtgctgtccacttgcgtgggcccctacctcttcccgtacttcatccccctcaacggtgaccgcctccttcgcaacaagaaacgcaaagccaggggcaccatggtaaggtggctgcgagcctacgagagtgctgtctccttccacttcagcaactattttgtgggctttctttccgaggccacggccacgttggcgggggctggctttaccgaggagaaggatcacctggaatgggacctgacggtgtccaagccactgaatgtggagctgcctcggtcaatggtggaagttgtcacaagctggaacctgcccatgtcttattggctaaataactatgttttcaagaatgctctccgcctggggaccttctcggctgtgctggtcacctatgcagccagcgccctcctacatggcttcagtttccacctggctgcggtcctgctgtccctggcttttatcacttacgtggagcatgtcctccggaagcgcctggctcggatcctcagtgcctgtgtcttgtcaaagcggtgcccgccagactgttcgcaccagcatcgcttgggcctgggggtgcgagccttaaacttgctctttggagctctggccatcttccacctggcctacctgggctccctgtttgatgtcgatgtggatgacaccacagaggagcagggctacggcatggcatacactgtccacaagtggtcagagctcagctgggccagtcactgggtcacttttggatgctggatcttctaccgtctcataggctgaggcacatctgtggaccctcataaccctcttaagacccctctcagggtgccactgatgggggatgagggaaggccctctctctactccttgaccccctccatccttgacccccaacacctcaacacacacacacacacacacacacaaaatcacaccattttcatgcctgtcaatccccaccccaccacaaggcaggaagggggtggtgcctgctggggcctagagggggatgcttggggaaacagagaaggggagatccagggcctccccgccttccttcttcctttttatatacaatttgttattgtcaaataaaagtaggaaat

SEQ ID NO: 23079 - DNA, 1743 bp, Homo sapiens
  source 1..1743: mol_type = unassigned DNA
atctatccatctggccatccatccgtgggggtctgcaatggccacctttagccgccaggaatttttccagcagctactgcaaggctgtctcctgcctactgcccagcagggccttgaccagatctggctgctccttgccatctgcctcgcctgccgcctcctctggaggctcgggttgccatcctacctgaagcatgcaagcaccgtggcaggcgggttcttcagcctctaccacttcttccagctgcacatggtttgggtcgtgctgctcagcctcctgtgctacctcgtgctgttcctctgccgacattcctcccatcgaggcgtcttcctatccgtcaccatcctcatctacctactcatgggtgagatgcacatggtagacaccgtgacatggcacaagatgcgaggggcacagatgattgtggccatgaaggcagtgtctctgggcttcgacctggaccggggcgaggtgggtacggtgccctcgccagtggagttcatgggctacctctacttcgtgggcaccatcgtcttcgggccctggatatccttccacagctacctacaagctgtccaaggccgcccactgagctgccggtggctgcagaaggtggcccggagcctggcactggccctgctgtgccttgtgctgtccacttgcgtgggcccctacctcttcccgtacttcatccccctcaacggtgaccgcctccttcgcaagggcaccatggtaaggtggctgcgagcctacgagagtgctgtctccttccacttcagcaactattttgtgggctttctttccgaggccacggccacgttggcgggggctggctttaccgaggagaaggatcacctggaatgggacctgacggtgtccaagccactgaatgtggagctgcctcggtcaatggtggaagttgtcacaagctggaacctgcccatgtcttattggctaaataactatgttttcaagaatgctctccgcctggggaccttctcggctgtgctggtcacctatgcagccagcgccctcctacatggcttcagtttccacctggctgcggtcctgctgtccctggcttttatcacttacgtggagcatgtcctccggaagcgcctggctcggatcctcagtgcctgtgtcttgtcaaagcggtgcccgccagactgttcgcaccagcatcgcttgggcctgggggtgcgagccttaaacttgctctttggagctctggccatcttccacctggcctacctgggctccctgtttgatgtcgatgtggatgacaccacagaggagcagggctacggcatggcatacactgtccacaagtggtcagagctcagctgggccagtcactgggtcacttttggatgctggatcttctaccgtctcataggctgaggcacatctgtggaccctcataaccctcttaagacccctctcagggtgccactgatgggggatgagggaaggccctctctctactccttgaccccctccatccttgacccccaacacctcaacacacacacacacacacacacacaaaatcacaccattttcatgcctgtcaatccccaccccaccacaaggcaggaagggggtggtgcctgctggggcctagagggggatgcttggggaaacagagaaggggagatccagggcctccccgccttccttcttcctttttatatacaatttgttattgtcaaataaaagtaggaaatattcaataggct

SEQ ID NO: 23080 - DNA, 1848 bp, Homo sapiens
  source 1..1848: mol_type = unassigned DNA
gctggtcccggccttgcggcctgcgggggaggctgcccggaggaggcagcggcggcggcagcgcgtcctcggtccccaggaccacggcttctttcctgccagatctatccatctggccatccatccgtgggggtctgcaatggccacctttagccgccaggaatttttccagcagctactgcaaggctgtctcctgcctactgcccagcagggccttgaccagatctggctgctccttgccatctgcctcgcctgccgcctcctctggaggctcgggttgccatcctacctgaagcatgcaagcaccgtggcaggcgggttcttcagcctctaccacttcttccagctgcacatggtttgggtcgtgctgctcagcctcctgtgctacctcgtgctgttcctctgccgacattcctcccatcgaggcgtcttcctatccgtcaccatcctcatctacctactcatgggtgagatgcacatggtagacaccgtgacatggcacaagatgcgaggggcacagatgattgtggccatgaaggcagtgtctctgggcttcgacctggaccggggcgaggtgggtacggtgccctcgccagtggagttcatgggctacctctacttcgtgggcaccatcgtcttcgggccctggatatccttccacagctacctacaagctgtccaaggccgcccactgagctgccggtggctgcagaaggtggcccggagcctggcactggccctgctgtgccttgtgctgtccacttgcgtgggcccctacctcttcccgtacttcatccccctcaacggtgaccgcctccttcgcaacaagaaacgcaaagccaggtggctgcgagcctacgagagtgctgtctccttccacttcagcaactattttgtgggctttctttccgaggccacggccacgttggcgggggctggctttaccgaggagaaggatcacctggaatgggacctgacggtgtccaagccactgaatgtggagctgcctcggtcaatggtggaagttgtcacaagctggaacctgcccatgtcttattggctaaataactatgttttcaagaatgctctccgcctggggaccttctcggctgtgctggtcacctatgcagccagcgccctcctacatggcttcagtttccacctggctgcggtcctgctgtccctggcttttatcacttacgtggagcatgtcctccggaagcgcctggctcggatcctcagtgcctgtgtcttgtcaaagcggtgcccgccagactgttcgcaccagcatcgcttgggcctgggggtgcgagccttaaacttgctctttggagctctggccatcttccacctggcctacctgggctccctgtttgatgtcgatgtggatgacaccacagaggagcagggctacggcatggcatacactgtccacaagtggtcagagctcagctgggccagtcactgggtcacttttggatgctggatcttctaccgtctcataggctgaggcacatctgtggaccctcataaccctcttaagacccctctcagggtgccactgatgggggatgagggaaggccctctctctactccttgaccccctccatccttgacccccaacacctcaacacacacacacacacacacacacaaaatcacaccattttcatgcctgtcaatccccaccccaccacaaggcaggaagggggtggtgcctgctggggcctagagggggatgcttggggaaacagagaaggggagatccagggcctccccgccttccttcttcctttttatatacaatttgttattgtcaaataaaagtaggaaatattcaataggct

SEQ ID NO: 23081 - DNA, 1877 bp, Homo sapiens
  source 1..1877: mol_type = unassigned DNA
atttaaagggcccgctcgccgcgccgctctgggagccgctgctggtcccggccttgcggcctgcgggggaggctgcccggaggaggcagcggcggcggcagcgcgtcctcggtccccaggaccacggcttctttcctgccagatctatccatctggccatccatccgtgggggtctgcaatggccacctttagccgccaggaatttttccagcagctactgcaaggctgtctcctgcctactgcccagcagggccttgaccagatctggctgctccttgccatctgcctcgcctgccgcctcctctggaggctcgggttgccatcctacctgaagcatgcaagcaccgtggcaggcgggttcttcagcctctaccacttcttccagctgcacatggtttgggtcgtgctgctcagcctcctgtgctacctcgtgctgttcctctgccgacattcctcccatcgaggcgtcttcctatccgtcaccatcctcatctacctactcatgggtgagatgcacatggtagacaccgtgacatggcacaagatgcgaggggcacagatgattgtggccatgaaggcagtgtctctgggcttcgacctggaccggggcgaggtgggtacggtgccctcgccagtggagttcatgggctacctctacttcgtgggcaccatcgtcttcgggccctggatatccttccacagctacctacaagctgtccaaggccgcccactgagctgccggtggctgcagaaggtggcccggagcctggcactggccctgctgtgccttgtgctgtccacttgcgtgggcccctacctcttcccgtacttcatccccctcaacggtgaccgcctccttcgcaagggcaccatggtaaggtggctgcgagcctacgagagtgctgtctccttccacttcagcaactattttgtgggctttctttccgaggccacggccacgttggcgggggctggctttaccgaggagaaggatcacctggaatgggacctgacggtgtccaagccactgaatgtggagctgcctcggtcaatggtggaagttgtcacaagctggaacctgcccatgtcttattggctaaataactatgttttcaagaatgctctccgcctggggaccttctcggctgtgctggtcacctatgcagccagcgccctcctacatggcttcagtttccacctggctgcggtcctgctgtccctggcttttatcacttacgtggagcatgtcctccggaagcgcctggctcggatcctcagtgcctgtgtcttgtcaaagcggtgcccgccagactgttcgcaccagcatcgcttgggcctgggggtgcgagccttaaacttgctctttggagctctggccatcttccacctggcctacctgggctccctgtttgatgtcgatgtggatgacaccacagaggagcagggctacggcatggcatacactgtccacaagtggtcagagctcagctgggccagtcactgggtcacttttggatgctggatcttctaccgtctcataggctgaggcacatctgtggaccctcataaccctcttaagacccctctcagggtgccactgatgggggatgagggaaggccctctctctactccttgaccccctccatccttgacccccaacacctcaacacacacacacacacacacacacaaaatcacaccattttcatgcctgtcaatccccaccccaccacaaggcaggaagggggtggtgcctgctggggcctagagggggatgcttggggaaacagagaaggggagatccagggcctccccgccttccttcttcctttttatatacaatttgttattgtcaaataaaagtaggaaatattc

SEQ ID NO: 23082 - DNA, 1672 bp, Homo sapiens
  source 1..1672: mol_type = unassigned DNA
ggaggaggcagcggcggcggcagcgcgtcctcggtccccaggaccacggcttctttcctgccagatctatccatctggccatccatccgtgggggtctgcaatggccacctttagccgccaggaatttttccagcagctactgcaaggctgtctcctgcctactgcccagcagggccttgaccagatctggctgctccttgccatctgcctcgcctgccgcctcctctggaggctcgggttgccatcctacctgaagcatgcaagcaccgtggcaggcgggttcttcagcctctaccacttcttccagctgcacatggtttgggtcgtgctgctcagcctcctgtgctacctcgtgctgttcctctgccgacattcctcccatcgaggcgtcttcctatccgtcaccatcctcatctacctactcatgggtgagatgcacatggtagacaccgtgacatggcacaagatgcgaggggcacagatgattgtggccatgaaggcagtgtctctgggcttcgacctggaccggggcgaggtgggtacggtgccctcgccagtggagttcatgggctacctctacttcgtgggcaccatcgtcttcgggccctggatatccttccacagctacctacaagctgtccaaggccgcccactgagctgccggtggctgcagaaggtggcccggagcctggcactggccctgctgtgccttgtgctgtccacttgcgtgggcccctacctcttcccgtacttcatccccctcaacggtgaccgcctccttcgcaagtggctgcgagcctacgagagtgctgtctccttccacttcagcaactattttgtgggctttctttccgaggccacggccacgttggcgggggctggctttaccgaggagaaggatcacctggaatgggacctgacggtgtccaagccactgaatgtggagctgcctcggtcaatggtggaagttgtcacaagctggaacctgcccatgtcttattggctaaataactatgttttcaagaatgctctccgcctggggaccttctcggctgtgctggtcacctatgcagccagcgccctcctacatggcttcagtttccacctggctgcggtcctgctgtccctggcttttatcacttacgtggagcatgtcctccggaagcgcctggctcggatcctcagtgcctgtgtcttgtcaaagcggtgcccgccagactgttcgcaccagcatcgcttgggcctgggggtgcgagccttaaacttgctctttggagctctggccatcttccacctggcctacctgggctccctgtttgatgtcgatgtggatgacaccacagaggagcagggctacggcatggcatacactgtccacaagtggtcagagctcagctgggccagtcactgggtcacttttggatgctggatcttctaccgtctcataggctgaggcacatctgtggaccctcataaccctcttaagacccctctcagggtgccactgatgggggatgagggaaggccctctctctactccttgaccccctccatccttgacccccaacacctcaacacacacacacacacacacacacaaaatcacaccattttcatgcctgtcaatccccaccccaccacaaggcaggaagggggtggtgcctgctgggg

SEQ ID NO: 23083 - DNA, 1975 bp, Homo sapiens
  source 1..1975: mol_type = unassigned DNA
gagccgctgctggtcccggccttgcggcctgcgggggaggctgcccggaggaggcagcggcggcggcagcgcgtcctcggtccccaggaccacggcttctttcctgccaggtcacaggctgtgcgtgtgcatgccgaacacccacatgcacacagttggtggctcagtctgatgtacctgacttctcacgccttcccccagtcctccagtaccgtgcctctacatgggctgggcagccccaaactgaaatgtgagtgccagagtgcatcctttaagcgaggtctgccccacggacacccgctccctctgtgtccctgctttgacagatctatccatctggccatccatccgtgggggtctgcaatggccacctttagccgccaggaatttttccagcagctactgcaaggctgtctcctgcctactgcccagcagggccttgaccagatctggctgctccttgccatctgcctcgcctgccgcctcctctggaggctcgctgcacatggtttgggtcgtgctgctcagcctcctgtgctacctcgtgctgttcctctgccgacattcctcccatcgaggcgtcttcctatccgtcaccatcctcatctacctactcatgggtgagatgcacatggtagacaccgtgacatggcacaagatgcgaggggcacagatgattgtggccatgaaggcagtgtctctgggcttcgacctggaccggggcgaggtgggtacggtgccctcgccagtggagttcatgggctacctctacttcgtgggcaccatcgtcttcgggccctggatatccttccacagctacctacaagctgtccaaggccgcccactgagctgccggtggctgcagaaggtggcccggagcctggcactggccctgctgtgccttgtgctgtccacttgcgtgggcccctacctcttcccgtacttcatccccctcaacggtgaccgcctccttcgcaagtggctgcgagcctacgagagtgctgtctccttccacttcagcaactattttgtgggctttctttccgaggccacggccacgttggcgggggctggctttaccgaggagaaggatcacctggaatgggacctgacggtgtccaagccactgaatgtggagctgcctcggtcaatggtggaagttgtcacaagctggaacctgcccatgtcttattggctaaataactatgttttcaagaatgctctccgcctggggaccttctcggctgtgctggtcacctatgcagccagcgccctcctacatggcttcagtttccacctggctgcggtcctgctgtccctggcttttatcacttacgtggagcatgtcctccggaagcgcctggctcggatcctcagtgcctgtgtcttgtcaaagcggtgcccgccagactgttcgcaccagcatcgcttgggcctgggggtgcgagccttaaacttgctctttggagctctggccatcttccacctggcctacctgggctccctgtttgatgtcgatgtggatgacaccacagaggagcagggctacggcatggcatacactgtccacaagtggtcagagctcagctgggccagtcactgggtcacttttggatgctggatcttctaccgtctcataggctgaggcacatctgtggaccctcataaccctcttaagacccctctcagggtgccactgatgggggatgagggaaggccctctctctactccttgaccccctccatccttgacccccaacacctcaacacacacacacacacacacacacaaaatcacaccattttcatgcctgtcaatccccaccccaccacaaggcaggaagggggtggtgcctgctggggcctagagggggatgcttggggaaacagagaaggggagatccagggcctccccgccttccttcttcctttttatatacaatttgttattgtcaaataaaagtaggaaatattc

SEQ ID NO: 23084 - DNA, 558 bp, Homo sapiens
  source 1..558: mol_type = unassigned DNA
gaggctgcccggaggaggcagcggcggcggcagcgcgtcctcggtccccaggaccacggcttctttcctgccagagcgactctaccttggaaaccagggattccccttcccgtcgcccgccccatttgatatatgggcctgaaatgtatgccatcccatcaccatcggactggactgttcacagcactggagagacagaggtccttcattcactccaggtcacaggctatctatccatctggccatccatccgtgggggtctgcaatggccacctttagccgccaggaatttttccagcagctactgcaaggctgtctcctgcctactgcccagcagggccttgaccagatctggctgctccttgccatctgcctcgcctgccgcctcctctggaggctcgggttgccatcctacctgaagcatgcaagcaccgtggcaggcgggttcttcagcctctaccacttcttccagctgcacatggtttgggtcgtgctgctcagcctcctgtgctacctcgtgctgttcctctgccgacattcctcccatcgaggcgtctt

SEQ ID NO: 23085 - DNA, 1539 bp, Homo sapiens
  source 1..1539: mol_type = unassigned DNA
ctctgggagccgctgctggtcccggccttgcggcctgcgggggaggctgcccggaggaggcagcggcggcggcagcgcgtcctcggtccccaggaccacggcttctttcctgccagatctatccatctggccatccatccgtgggggtctgcaatggccacctttagccgccaggaatttttccagcagctactgcaaggctgtctcctgcctactgcccagcagggccttgaccagatctggctgctccttgccatctgcctcgcctgccgcctcctctggaggctcgggttgccatcctacctgaagcatgcaagcaccgtggcaggcgggttcttcagcctctaccacttcttccagctgcacatggtttgggtcgtgctgctcagcctcctgtgctacctcgtgctgttcctctgccgacattcctcccatcgaggcgtcttcctatccgtcaccatcctcatctacctactcatgggtgagatgcacatggtagacaccgtgacatggcacaagatgcgaggggcacagatgattgtggccatgaaggcagtgtctctgggcttcgacctggaccggggcgaggtgggtacggtgccctcgccagtggagttcatgggctacctctacttcgtgggcaccatcgtcttcgggccctggatatccttccacagctacctacaagctgtccaaggccgcccactgagctgccggtggctgcagaaggtggcccggagcctggcactggccctgctgtgccttgtgctgtccacttgcgtgggcccctacctcttcccgtacttcatccccctcaacggtgaccgcctccttcgcaacaagaaacgcaaagccaggggcaccatggtaaggtggctgcgagcctacgagagtgctgtctccttccacttcagcaactattttgtgggctttctttccgaggccacggccacgttggcgggggctggctttaccgaggagaaggatcacctggaatgggacctgacggtgtccaagccactgaatgtggagctgcctcggtcaatggtggaagttgtcacaagctggaacctgcccatgtcttattggctaaataactatgttttcaagaatgctctccgcctggggaccttctcggctgtgctggtcacctatgcagccagcgccctcctacatggcttcagtttccacctggctgcggtcctgctgtccctggcttttatcacttacgtggagcatgtcctccggaagcgcctggctcggatcctcagtgcctgtgtcttgtcaaagcggtgcccgccagactgttcgcaccagcatcgcttgggcctgggggtgcgagccttaaacttgctctttggagctctggccatcttccacctggcctacctgggctccctgtttgatgtcgatgtggatgacaccacagaggagcagggctacggcatggcatacactgtccacaagtggtcagagctcagctgggccagtcactgggtcacttttggatgctggatcttctaccgtctcataggctga

SEQ ID NO: 23086 - DNA, 8536 bp, Homo sapiens
  source 1..8536: mol_type = unassigned DNA
cggctccgggggtggcggtcggacagtgtctagcacgctcagtccgggcttggggccccgcggcggagaaggaggtagagggggcggcggcggcggcggcggtggtggcggcaccatgtttcttcactcagttaatctctggaacctggcgttttatgtcttcatggtctttctggcaaccctggggctgtgggatgtcttcttcggcttcgaggagaataagtgcagtatgagctacatgtttgagtacccggagtatcagaaaatagaacttccaaagaaactggcaaaacgctatcccgcatatgagttgtatctttatggagagggatcctatgctgaagaacacaaaattctccctttgacgggtattccagttctctttcttcctggtaatgctggaagttataagcaagttcgttctattggctccattgcacttagaaaagcagaggacattgacttcaagtaccactttgacttctttagtgtgaacttcaatgaagaactggtggctttgtatggtggaagtcttcagaagcagaccaagtttgtacatgaatgtattaaaacaattctcaaactctataagggtcaagaatttgctccaaaaagtgtggcaataattggtcattctatgggtggccttgttgcaagagcattgcttacactgaaaaattttaagcatgatctgataaatcttcttattacacaagccacacctcatgttgctcctgtgatgccattagatcgtttcattacagatttttatacgactgtaaacaactattggattctaaatgctcgacacataaatttaaccacactttctgtagctggaggattccgggattaccaagttcgttcaggattgacttttctaccaaaattaagccatcataccagtgccttatctgttgtgagttcagcagtgcctaagacctgggtctcaacagaccacctctccattgtgtggtgtaaacaattgcagttgactacagttcgagcattctttgatcttattgatgctgatactaaacaaataactcaaaattccaagaagaaactgtcagttttgtatcaccactttataagacacccatcaaaacattttgaggaaaatccagctataatttctgacttaacagggacatctatgtgggttctagtaaaagtgtccaaatggacctatgtagcttacaacgaatctgagaagatatattttacatttcctcttgaaaatcatagaaaaatctacactcatgtctattgtcagagcactatgctggatacaaatagttggatttttgcttgcataaacagcacttctatgtgcctgcaaggggttgatttatcatggaaagctgaactgctgccaacaattaagtatctgacattaagacttcaagactatccatctttgtctcatcttgttgtttatgtaccatctgttcgtggaagtaagtttgttgtagattgtgaattctttaaaaaagagaaaagatacatacagcttcctgtaactcatcttttttcctttggattgtcttcaaggaaagtggtgttaaatacaaatggcctatactacaatctagagcttctgaactttggacagatataccaagcttttaaaatcaacgtggtaagcaagtgctcagcagtcaaagaagaaataaccagtatctatagacttcatattccttggtcttatgaagattcactaaccattgcacaggctccatcttccacagaaatttctctgaaactccatattgctcaaccagaaaacaatacccatgtggcattatttaaaatgtacacgtcatcagactgtcggtacgaggtgacagttaagacttccttttcacaaatacttggacaggtagttagatttcatggtggagctcttcctgcttatgtcgtatctaatatccttcttgcttatagaggacagttatattctcttttctcaacaggttgttgcttagaatatgctaccatgttggataaagaagccaaaccatacaaagttgatccttttgtaattatcattaagtttctgttggggtataaatggtttaaagaattgtgggatgtattattgttaccagaattagatgccgtcattttaacttgtcagagtatgtgtttccccctgatatccttgattctctttctgtttggaacgtgtactgcctactggagtggcctactgtcttctgcatctgtgagacttctttcttcattgtggctagctttgaaaagaccctctgaacttcctaaagatatcaagatgatatcaccagacttgccctttttgacaattgtcttgatcatagttagttggacaacttgtggagcactagccatacttctttcttatctttactatgtgtttaaggttgttcatctgcaagccagcttaacaacttttaagaatagccagcctgtgaatcccaaacactctagaagaagtgaaaagaaatccaatcatcataaagactcctcaatacaccatcttcgtttatctgccaacgatgctgaagatagccttcgcatgcacagtactgtgattaacttactaacatggattgtattactcagcatgccttctctaatttattggctaaagaatcttaggtattattttaaacttaatcctgatccatgtaaacctttggcatttatccttattccgactatggcaattcttggaaatacttacactgtttcaataaaatcaagtaaattgttgaagactacttcacaatttccacttcctctggctgttggtgtgattgcttttgggtcagcacatttatataggcttccatgctttgtcttcattcctcttttactccatgcattatgcaactttatgtaagattggacttaaggaatgatgaagataatttatgtgtttagggccagtgataagagggaacacacagatccatcagtatggacagcaagatcctttggagaagacaagtctatttttacaatattgaaaataggaaattagttttgtaatgtttgagggaagtagttgaagcatggttttgttttgtggtgtggaatccatgtagtaatcatttttgaaaaattcatgaagggatatatggtgatcactatcattgaggactcctgtgcatataaaatagtctgttttatcaactgtacgagaagtctgatatgagagatttagtagatgcagcattatttgcagtctcactgcaagcattctgctcatttcatcaaactttttttcacaaaagtaggttattttgaatttgctatagtttacctattaagaaataagtctttaaataactgatgaaatttatagctgtttggtttctcaaaggttaaatagccacagaaagcctttggttagtttttggcagccaccatgaacaaagtggatcttgtcttcttacatctatgaaaatagagctttgaatggtaaggagatatgttttcttggtaaccaatgcaagattgatgggtggaaacatgattcaaacttacacaatttttcttgctatttttcaaatatgaatcttactatatattctcggtgaacatcaggagactattaaagaggtctgctgttaaatgtaaagaaaaaatgctcgtagctatttgcttcctggtattggagcagttcagttgtttagtttataccattggattcaattcattgcaccatggttgccaaaagtgcctgaggtcataatggattgttaaaataactaaattccagtggttggaaactctaggtttgtaccattttttctgctgtgggaaaaaacaacaacaacaacatgatcaaggtaacatcacatttgatgtataatattatactattaatggaatatcagtagacaactgttaacccattagtagcatgagtataaacagtacacctgaataaattggagacattagccactaggtttaacagtggaatcttgatttgcctaggtgacttctgggattactgtttgacaaataagagtaacattttatttcatttcagaatttacgtcacttttagctacaagagtaggaagaaggtaatcggcaaggcagaagagtatactctttgccttaggatagcgtaaactcaggctgagacatacccggcttatagagttcttctagatgtgtagactgtaaatgcccaaatcctctcaactaaagttttagtgattccacaaagcctctcatgtaaatttccagtgattccaccattgcacttgtgaatatgtatccttgttagtacccagggatgtcctcgagcaccagttttattttatctgccattgcatctggattccattacagcctctcagctgttactgcctgtggacagttacttctgcttactgcctgtagagagttacctaacttctcttctcagttcttcctcaggtcctggctattttggcctcagttgaagggagtcttgctctcatctctgagggttttaagtttgtttgatcccattgttgtcttttctagctttgagcatgtttttcagtattcatattttaacttactgagaacattaaagggaaatgataaactcgtggtggggatatggcagacaggtgcttgtttgtttgagagaagtagcagaagagataaaatacaaagtgctatatgtttcagctggagaggaaagagagagaatttattagattatatacttgtcccatggcataccacgtatatgtttaaatagggacacatctccctatgtttaactatacttataaacaactttgatacacattgcgtcttttattctgtcacctgatattttagtgtatctcaagttacagattacatgtgtccttaaactatttctgaatttggacttagttccatatacagaaagaactttagaaaattcattaatttggatcttctattgatagccataaatattatgtttatgtattctaaaacctctttgtttagttagtactgttcatgaatgtaacaagcttcaatttctcatttgtgagtagtacatttgctttttgtttgtttgtttgtttgtttttgagatggagtctcacgctgtcaccaggctggagtgcagtggcgcgatttcagctcactgcaacctccacctcccaggtgcaagtgatgcccctgcctcagcctcccgagtagctgggactacagacacccgccaccacacctggctaatttttgtatttttagtagagacggggtttcaccatgttggctaggctggtctcaaactcttgacctcgtgatttgcccgcctctgcctccccaaagtgctgggattacaggcgtgagccaccacgcccagccgtacatttactttttaaagcagcagactaggtacactaattctcactcaaatattttcatgggaatgtagttatcaccaagtcctaaagtattatttatgccaaaaaaaatttcattttaaggactacaaaaatgattctaattaaacattttataatcaatagtaggttgggtctttagccattatatgtgtatatatacagacacatatgtatacacttacattttgacagggtcttcattgagtcttgatgcactttaaacccagctggctaccagagatgcgaaggtgggctctttgaagattagcaaaatggacgtttctgtcacttgagaaaaggaaagttctttgcctttaaattacacagttttcatcatgcccacaatctatattattggctggttaaacagcactgccctattagcaatgttaacaaaaatgaaattatttattggcggttatagattatctaattcaggaaatttctgagctcaacttttacagcaactgttatgccttctaatttagcaattgagttatgagtaagttttgtgcttaactcctagaccctattgttgataaccagatcaaatatagtctgtacagaggaaaacactgggaacatttagtatttctaaagcctcctttggagttactactgattgtaatttggaactgataataggtagagattgctaacactgttttttttcctggatcttttttatgccagaaattaaacaggttctgctaactcttttttttctcttggttatcaccagaatgaaaatatttaaagtgatgactctagaaaagccatctgtgcctggttaacattgagtttgagtctcttcaatatatattgatcatgtattgattaatctttattttttcatattttggctagacaaattcagatctatataatggaataccccttcttgagtgaactatactactaatctacatgattatatagtaaggaaaaaagaagaaataactgtaataggcatagtgtttgttgttggttgtcttgtcattcatgtgatactactcatttccaaaattcacacaaacttacatgaggtggattatttgttttgttcattatttagttcctatatgttttttctttagaaacagagtctcattctgtcacccaggctggagtccaatggggcggtcatagttcactgcagccttgaactctttggctcatgtgatcctcccatctcagcctcccacagcaggtgagactacaggtacatgccactgtgcctgactttttaatttttttgtagagacgaggtttcagtttgttgcccaagctgatcttgaactcctggtttcaagcgatcctcccacctcggcctcccaaagtagtgggatttcaggcatgaccacctggcctagttcctatacttttcttaattcttcagacttctcacatttagtatagtgcattcatttcatcttgctgtttattagcaccctttgtggccaagggaaataaaaggtggtaaaattcagttttcagtttagttcttgaaagctctgggaaatggaggaaacacaaaactatgaattaaactagggctgttgatttctgaacccccagataaatcagttgacccacattttcattttaggtgttaggtccaaattagcataatgtcttgcattattattaggttcagtgtgaaactttacagtgctgcatttgaagtttagtaactggttattattaatcatttgggaaaaatgaaaatgtgttgggactttctatgactaggcatttgttgattatttttcatgattgctttttgttttctcattgtgtaggatttgtgaacttgtatattacaggaaacaagatactttgtaaaatttactggggaaaatccatttggagtgcatgacatttgccaggataagaaagcagtaatatgtttgtattataaaattacaccctgccagaaaactttctttcctagtaaggtaaatgtagaagggacttttacagcatagtaagttgattaggagccaaaattttattccagtttttttttgaactaagaatgttttaaattctgtaatgaacttttatgtttacccattactcatgcattctttcacaatatgtttaatagcctgaggaaataggaaagctgtgaagctactaccattctttacttttaataagaataataggaaagaaaagtcaggtcagtaatccaaatccaaatatgtatactgcaaatgctcaagaagtcacattttttgataaattgtattgagtacagaagaacttatatgaatttattatctgttaataacttagttttgacaacagaataacatttggaaattgtgagaataatcaagctgtttttccattaacagtgtaaattcataacatgtccttcaaaaggtgatattctaagctgtcttaattgtctacggttgataacttttaaataaagtacaggactttctgaaagtgtttggcatgttatgctgccaaaaacaatctgtgttttgaaataccaattaatcagttaatttctgaagactttgtataggacttgatatatgagtcagaatctgtctgtactcattctgtacattgtaactttgaacacttatgaaaaactgtatctgttggtgtgttttgattagttagtgtagatttgtttgcgtatttgaattccgattttagtttaggaagactaaaagtagccatttttgtaaagttcatatgctattttttaatgtcatttttgtttttaatatttatacaatagtgatgttactagtaaaaaatgtttatagataacacgtagagctattaactgttcaaaagcctacatgataggcatattttgtatttcgtgttgcactcgttctgtttcatattggactttttacatcccttttttagcaaaaaaaagagacacatttgaattctctttagcataaagctgtgcattggaaactatgtgactgtatccatacggttagcaaaatactctttgccaccaaaggtaaatgaaactgtaaaatacctctggatatttgtgccaatgaacttttcttagcatattaggattaaagcaaaaataatcttttcagtatgtttcatctaggacttacaataaatgtttaaaccatgaaaactta

SEQ ID NO: 23087 - DNA, 1246 bp, Homo sapiens
  source 1..1246: mol_type = unassigned DNA
tttttcctaacattctagtgttttgaagctgctacaagtgattgatttcgagctttttttaaaaactcctcctttgtacaaaacagaaccgaaattcttcaaaacgaattaagtcatttgcgagtttgaatggaagctggacgaaattgcctcctccagttaacgtggaacccattccccaagagatggaggttctggagagcaagaaaatagaacttccaaagaaactggcaaaacgctatcccgcatatgagttgtatctttatggagagggatcctatgctgaagaacacaaaattctccctttgacgggtattccagttctctttcttcctggtaatgctggaagttataagcaagttcgttctattggctccattgcacttagaaaagcagaggacattgacttcaagtaccactttgacttctttagtgtgaacttcaatgaagaactggtggctttgtatggtggaagtcttcagaagcagaccaagtttgtacatgaatgtattaaaacaattctcaaactctataagggtcaagaatttgctccaaaaagtgtggcaataattggtcattctatgggtggccttgttgcaagagcattgcttacactgaaaaattttaagcatgatctgataaatcttcttattacacaagccacacctcatgttgctcctgtgatgccattagatcgtttcattacagatttttatacgactgtaaacaactattggattctaaatgctcgacacataaatttaaccacactttctgtagctggaggattccgggattaccaagttcgttcaggattgacttttctaccaaaattaagccatcataccagtgccttatctgttgtgagttcagcagtgcctaagacctgggtctcaacagaccacctctccattgtgtggtgtaaacaattgcagttgactacagttcgagcattctttgatcttattgatgctgatactaaacaaataactcaaaattccaagaagaaactgtcagttttgtatcaccactttataagacacccatcaaaacattttgaggaaaatccagctataatttctgacttaacaggaatctgagaagatatattttacatttcctcttgaaaatcatagaaaaatctacactcatgtctattgtcagagcactatgctggatacaaatagttggatttttgcttgcataaacagcacttctatgtgcctgcaaggggttgatttatcat

SEQ ID NO: 23088 - DNA, 2443 bp, Homo sapiens
  source 1..2443: mol_type = unassigned DNA
ggctccgggggtggcggtcggacagtgtctagcacgctcagtccgggcttggggccccgcggcggagaaggaggtagagggggcggcggcggcggcggcggtggtggcggcaccatgtttcttcactcagttaatctctggaacctggcgttttatgtcttcatggtctttctggcaaccctggggctgtgggatgtcttcttcggcttcgaggagaataagtgcagtatgagctacatgtttgagtacccggagtatcagaaaatagaacttccaaagaaactggcaaaacgctatcccgcatatgagttgtatctttatggagagggatcctatgctgaagaacacaaaattctccctttgacgggtattccagttctctttcttcctggtaatgctggaagttataagcaagttcgttctattggctccattgcacttagaaaagcagaggacattgacttcaagtaccactttgacttctttagtgtgaacttcaatgaagaactggtggctttgtatggtggaagtcttcagaagcagaccaagtttgtacatgaatgtattaaaacaattctcaaactctataagggtcaagaatttgctccaaaaagtgtggcaataattggtcattctatgggtggccttgttgcaagagcattgcttacactgaaaaattttaagcatgatctgataaatcttcttattacacaagccacacctcatgttgctcctgtgatgccattagatcgtttcattacagatttttatacgactgtaaacaactattggattctaaatgctcgacacataaatttaaccacactttctgtagctggaggattccgggattaccaagttcgttcaggattgacttttctaccaaaattaagccatcataccagtgccttatctgttgtgagttcagcagtgcctaagacctgggtctcaacagaccacctctccattgtgtggtgtaaacaattgcagttgactacagttcgagcattctttgatcttattgatgctgatactaaacaaataactcaaaattccaagaagaaactgtcagttttgtatcaccactttataagacacccatcaaaacattttgaggaaaatccagctataatttctgacttaacagggacatctatgtgggttctagtaaaagtgtccaaatggacctatgtagcttacaacgaatctgagaagatatattttacatttcctcttgaaaatcatagaaaaatctacactcatgtctattgtcagagcactatgctggatacaaatagttggatttttgcttgcataaacagcacttctatgtgcctgcaaggggttgatttatcatggaaagctgaactgctgccaacaattaagtatctgacattaagacttcaagactatccatctttgtctcatcttgttgtttatgtaccatctgttcgtggaagtaagtttgttgtagattgtgaattctttaaaaaagagaaaagatacatacagcttcctgtaactcatcttttttcctttggattgtcttcaaggaaagtggtgttaaatacaaatggcctatactacaatctagagcttctgaactttggacagatataccaagcttttaaaatcaacgtggtaagcaagtgctcagcagtcaaagaagaaataaccagtatctatagacttcatattccttggtcttatgaagattcactaaccattgcacaggctccatcttccacagaaatttctctgaaactccatattgctcaaccagaaaacaatacccatgtggcattatttaaaatgtacacgtcatcagactgtcggtacgaggtgacagttaagacttccttttcacaaatacttggacaggttgttgcttagaatatgctaccatgttggataaagaagccaaaccatacaaagttgatccttttgtaattatcattaagtttctgttggggtaagttttattatctgtgataatgattttaattgtgttttacatgtaacattatatttggttccataatgcaatataaattttcatacagatttggcagttgacttgtttcattaaatgaggttttttttttctcttaggcaaaggtctaataagtatatcaatgtctacttcaatagtatcatttcaaaagtaattattcactttatgtatatcagtctaaacttagactgcctttaatgtttgtaaataggtgtatatggtccatgatctgtgagtatcctagattcaaacgcaaatcattacagggtattgatgaaacagtgcctctctgatcacttttaaaagtatattttagacctctctaccctagttaacattccattcttaatttagtcacattttcagatttttggttaagcatcaatatgtagatctttttttccatcattacaactaacttggctttct

SEQ ID NO: 23089 - DNA, 10453 bp, Homo sapiens
  source 1..10453: mol_type = unassigned DNA
ggctccgggggtggcggtcggacagtgtctagcacgctcagtccgggcttggggccccgcggcggagaaggaggtagagggggcggcggcggcggcggcggtggtggcggcaccatgtttcttcactcagttaatctctggaacctggcgttttatgtcttcatggtctttctggcaaccctggggctgtgggatgtcttcttcggcttcgaggagaataagtgcagtatgagctacatgtttgagtacccggagtatcagagttcagcagtgcctaagacctgggtctcaacagaccacctctccattgtgtggtgtaaacaattgcagttgactacagttcgagcattctttgatcttattgatgctgatactaaacaaataactcaaaattccaagaagaaactgtcagttttgtatcaccactttataagacacccatcaaaacattttgaggaaaatccagctataatttctgacttaacagggacatctatgtgggttctagtaaaagtgtccaaatggacctatgtagcttacaacgaatctgagaagatatattttacatttcctcttgaaaatcatagaaaaatctacactcatgtctattgtcagagcactatgctggatacaaatagttggatttttgcttgcataaacagcacttctatgtgcctgcaaggggttgatttatcatggaaagctgaactgctgccaacaattaagtatctgacattaagacttcaagactatccatctttgtctcatcttgttgtttatgtaccatctgttcgtggaagtaagtttgttgtagattgtgaattctttaaaaaagagaaaagatacatacagcttcctgtaactcatcttttttcctttggattgtcttcaaggaaagtggtgttaaatacaaatggcctatactacaatctagagcttctgaactttggacagatataccaagcttttaaaatcaacgtggtaagcaagtgctcagcagtcaaagaagaaataaccagtatctatagacttcatattccttggtcttatgaagattcactaaccattgcacaggctccatcttccacagaaatttctctgaaactccatattgctcaaccagaaaacaatacccatgtggcattatttaaaatgtacacgtcatcagactgtcggtacgaggtgacagttaagacttccttttcacaaatacttggacaggtagttagatttcatggtggagctcttcctgcttatgtcgtatctaatatccttcttgcttatagaggacagttatattctcttttctcaacaggttgttgcttagaatatgctaccatgttggataaagaagccaaaccatacaaagttgatccttttgtaattatcattaagtttctgttggggtataaatggtttaaagaattgtgggatgtattattgttaccagaattagatgccgtcattttaacttgtcagagtatgtgtttccccctgatatccttgattctctttctgtttggaacgtgtactgcctactggagtggcctactgtcttctgcatctgtgagacttctttcttcattgtggctagctttgaaaagaccctctgaacttcctaaagatatcaagatgatatcaccagacttgccctttttgacaattgtcttgatcatagttagttggacaacttgtggagcactagccatacttctttcttatctttactatgtgtttaaggttgttcatctgcaagccagcttaacaacttttaagaatagccagcctgtgaatcccaaacactctagaagaagtgaaaagaaatccaatcatcataaagactcctcaatacaccatcttcgtttatctgccaacgatgctgaagatagccttcgcatgcacagtactgtgattaacttactaacatggattgtattactcagcatgccttctctaatttattggctaaagaatcttaggtattattttaaacttaatcctgatccatgtaaacctttggcatttatccttattccgactatggcaattcttggaaatacttacactgtttcaataaaatcaagtaaattgttgaagactacttcacaatttccacttcctctggctgttggtgtgattgcttttgggtcagcacatttatataggcttccatgctttgtcttcattcctcttttactccatgcattatgcaactttatgtaagattggacttaaggaatgatgaagataatttatgtgtttagggccagtgataagagggaacacacagatccatcagtatggacagcaagatcctttggagaagacaagtctatttttacaatattgaaaataggaaattagttttgtaatgtttgagggaagtagttgaagcatggttttgttttgtggtgtggaatccatgtagtaatcatttttgaaaaattcatgaagggatatatggtgatcactatcattgaggactcctgtgcatataaaatagtctgttttatcaactgtacgagaagtctgatatgagagatttagtagatgcagcattatttgcagtctcactgcaagcattctgctcatttcatcaaactttttttcacaaaagtaggttattttgaatttgctatagtttacctattaagaaataagtctttaaataactgatgaaatttatagctgtttggtttctcaaaggttaaatagccacagaaagcctttggttagtttttggcagccaccatgaacaaagtggatcttgtcttcttacatctatgaaaatagagctttgaatggtaaggagatatgttttcttggtaaccaatgcaagattgatgggtggaaacatgattcaaacttacacaatttttcttgctatttttcaaatatgaatcttactatatattctcggtgaacatcaggagactattaaagaggtctgctgttaaatgtaaagaaaaaatgctcgtagctatttgcttcctggtattggagcagttcagttgtttagtttataccattggattcaattcattgcaccatggttgccaaaagtgcctgaggtcataatggattgttaaaataactaaattccagtggttggaaactctaggtttgtaccattttttctgctgtgggaaaaaacaacaacaacaacatgatcaaggtaacatcacatttgatgtataatattatactattaatggaatatcagtagacaactgttaacccattagtagcatgagtataaacagtacacctgaataaattggagacattagccactaggtttaacagtggaatcttgatttgcctaggtgacttctgggattactgtttgacaaataagagtaacattttatttcatttcagaatttacgtcacttttagctacaagagtaggaagaaggtaatcggcaaggcagaagagtatactctttgccttaggatagcgtaaactcaggctgagacatacccggcttatagagttcttctagatgtgtagactgtaaatgcccaaatcctctcaactaaagttttagtgattccacaaagcctctcatgtaaatttccagtgattccaccattgcacttgtgaatatgtatccttgttagtacccagggatgtcctcgagcaccagttttattttatctgccattgcatctggattccattacagcctctcagctgttactgcctgtggacagttacttctgcttactgcctgtagagagttacctaacttctcttctcagttcttcctcaggtcctggctattttggcctcagttgaagggagtcttgctctcatctctgagggttttaagtttgtttgatcccattgttgtcttttctagctttgagcatgtttttcagtattcatattttaacttactgagaacattaaagggaaatgataaactcgtggtggggatatggcagacaggtgcttgtttgtttgagagaagtagcagaagagataaaatacaaagtgctatatgtttcagctggagaggaaagagagagaatttattagattatatacttgtcccatggcataccacgtatatgtttaaatagggacacatctccctatgtttaactatacttataaacaactttgatacacattgcgtcttttattctgtcacctgatattttagtgtatctcaagttacagattacatgtgtccttaaactatttctgaatttggacttagttccatatacagaaagaactttagaaaattcattaatttggatcttctattgatagccataaatattatgtttatgtattctaaaacctctttgtttagttagtactgttcatgaatgtaacaagcttcaatttctcatttgtgagtagtacatttgctttttgtttgtttgtttgtttgtttttgagatggagtctcacgctgtcaccaggctggagtgcagtggcgcgatttcagctcactgcaacctccacctcccaggtgcaagtgatgcccctgcctcagcctcccgagtagctgggactacagacacccgccaccacacctggctaatttttgtatttttagtagagacggggtttcaccatgttggctaggctggtctcaaactcttgacctcgtgatttgcccgcctctgcctccccaaagtgctgggattacaggcgtgagccaccacgcccagccgtacatttactttttaaagcagcagactaggtacactaattctcactcaaatattttcatgggaatgtagttatcaccaagtcctaaagtattatttatgccaaaaaaaatttcattttaaggactacaaaaatgattctaattaaacattttataatcaatagtaggttgggtctttagccattatatgtgtatatatacagacacatatgtatacacttacattttgacagggtcttcattgagtcttgatgcactttaaacccagctggctaccagagatgcgaaggtgggctctttgaagattagcaaaatggacgtttctgtcacttgagaaaaggaaagttctttgcctttaaattacacagttttcatcatgcccacaatctatattattggctggttaaacagcactgccctattagcaatgttaacaaaaatgaaattatttattggcggttatagattatctaattcaggaaatttctgagctcaacttttacagcaactgttatgccttctaatttagcaattgagttatgagtaagttttgtgcttaactcctagaccctattgttgataaccagatcaaatatagtctgtacagaggaaaacactgggaacatttagtatttctaaagcctcctttggagttactactgattgtaatttggaactgataataggtagagattgctaacactgttttttttcctggatcttttttatgccagaaattaaacaggttctgctaactcttttttttctcttggttatcaccagaatgaaaatatttaaagtgatgactctagaaaagccatctgtgcctggttaacattgagtttgagtctcttcaatatatattgatcatgtattgattaatctttattttttcatattttggctagacaaattcagatctatataatggaataccccttcttgagtgaactatactactaatctacatgattatatagtaaggaaaaaagaagaaataactgtaataggcatagtgtttgttgttggttgtcttgtcattcatgtgatactactcatttccaaaattcacacaaacttacatgaggtggattatttgttttgttcattatttagttcctatatgttttttctttagaaacagagtctcattctgtcacccaggctggagtccaatggggcggtcatagttcactgcagccttgaactctttggctcatgtgatcctcccatctcagcctcccacagcaggtgagactacaggtacatgccactgtgcctgactttttaatttttttgtagagacgaggtttcagtttgttgcccaagctgatcttgaactcctggtttcaagcgatcctcccacctcggcctcccaaagtagtgggatttcaggcatgaccacctggcctagttcctatacttttcttaattcttcagacttctcacatttagtatagtgcattcatttcatcttgctgtttattagcaccctttgtggccaagggaaataaaaggtggtaaaattcagttttcagtttagttcttgaaagctctgggaaatggaggaaacacaaaactatgaattaaactagggctgttgatttctgaacccccagataaatcagttgacccacattttcattttaggtgttaggtccaaattagcataatgtcttgcattattattaggttcagtgtgaaactttacagtgctgcatttgaagtttagtaactggttattattaatcatttgggaaaaatgaaaatgtgttgggactttctatgactaggcatttgttgattatttttcatgattgctttttgttttctcattgtgtaggatttgtgaacttgtatattacaggaaacaagatactttgtaaaatttactggggaaaatccatttggagtgcatgacatttgccaggataagaaagcagtaatatgtttgtattataaaattacaccctgccagaaaactttctttcctagtaaggtaaatgtagaagggacttttacagcatagtaagttgattaggagccaaaattttattccagtttttttttgaactaagaatgttttaaattctgtaatgaacttttatgtttacccattactcatgcattctttcacaatatgtttaatagcctgaggaaataggaaagctgtgaagctactaccattctttacttttaataagaataataggaaagaaaagtcaggtcagtaatccaaatccaaatatgtatactgcaaatgctcaagaagtcacattttttgataaattgtattgagtacagaagaacttatatgaatttattatctgttaataacttagttttgacaacagaataacatttggaaattgtgagaataatcaagctgtttttccattaacagtgtaaattcataacatgtccttcaaaaggtgatattctaagctgtcttaattgtctacggttgataacttttaaataaagtacaggactttctgaaagtgtttggcatgttatgctgccaaaaacaatctgtgttttgaaataccaattaatcagttaatttctgaagactttgtataggacttgatatatgagtcagaatctgtctgtactcattctgtacattgtaactttgaacacttatgaaaaactgtatctgttggtgtgttttgattagttagtgtagatttgtttgcgtatttgaattccgattttagtttaggaagactaaaagtagccatttttgtaaagttcatatgctattttttaatgtcatttttgtttttaatatttatacaatagtgatgttactagtaaaaaatgtttatagataacacgtagagctattaactgttcaaaagcctacatgataggcatattttgtatttcgtgttgcactcgttctgtttcatattggactttttacatcccttttttagcaaaaaaaagagacacatttgaattctctttagcataaagctgtgcattggaaactatgtgactgtatccatacggttagcaaaatactctttgccaccaaaggtaaatgaaactgtaaaatacctctggatatttgtgccaatgaacttttcttagcatattaggattaaagcaaaaataatcttttcagtatgtttcatctaggacttacaataaatgtttaaaccatgaaaacttatatttcataccctaatttttctttgaaaatattcaagatttgtagcctagtgtgttctattttgtgtgattgcttgaatgttttctgattttattgggtaaaagtttgcctagtaatgatctttcagcaattcattgaaataattatttgaagtaatcttgcttcagatttaatttgtgatgtacattgttgtacaagccattttagtacaggtgtctcatttatgtagttgaaaggtgactgtggaatttcttttgttttttatgtatttccattcagtctctttatatagtcacatgtttcacaggggaacttgtccactggaacctaacatagtacaaccttttaatatgcgtatcttaaaggaaaatattataaaacaagatattaatactaaagtgttaacattaatatgttgttctcatggaagaaaagtagaaaatgtgataggcttagaaattattttttatcagcattaagtgcttcaatttctccccataaagattctaaggaaatttcagttcctcatattatagttttccccataatttaatattactaagtatttctctgcccagtaatgttgatgcagtttgcataaatagccttggaagtaaggaggcaggacagaaagccaaatatcgaaatctctggccttgatttagtgacagtttattctaatggggaccataggtgttattagtaaaaagatagtgtacaaggcctaagttcagtttacattgttctttgaaatgagttcatcttttgtgttgaataattgtattctaagtaggagatgcctgtatttaacataatcatgctttctatataatcaaatatgtatttgttggaatactggtagaaataaccttcccttcctccactgtgcagtggaaaaaaaactcccgatttatactgtatataaattaggaaattatgttacatatttacatttttaaaaatataaaaatgacatattattttgaagtgattgtattatagtttctgaagcttatgactggctataaatataacaacatacccatgagaaaccagaccaaaattgaatatatatcatcactgtgaccttgaacttatagtcatttgggataaaacagagtgtgccttgaaatgataaagagtgccctgcaattttataactgtacattttattatgggtggtcctctcaaattggccccaaatccttgtcttcgaggttggtgaaataaaagtttaaaataaaagttgactggtatttcctttagtatttccagaactattgctgtagaggcctcccttaattttcagagttctcattttgaattaaagtagacttacgctacatagatgtagaaaattaggtttggcttaggtttctgaaaaaatattctaggagaaggtggtagcattgttctgaacttaccacacttggaaaaactaatcttcaaatgtaattttttgtcttattaatgagtaatctgtcaaagacatgaattctttgacttgtgctcattctttctgaacttattgaggcttatatatatcaaataaggttaatttacacaataattatttttaataattaataaactcattcatgtagtatattttaaaacattatttcctctcatttttccttctcttttttcttcctatatatttttaaggcttcaagagaaaacgggcttcagtttttaaaaaaatgtagacttgcatttttactgtgcttatttaaaataatggatataatttatattaaggtccaaattattttattcacaggataatcatggtctctgataaaagatgcccacatttctgtgtactcacagttgttgtatatttttcaatttcaattttgaaagtaaactcaacacattgttttcccattttacctccactacctactcgccagacaaaaatatagatttctctaaaaacacatacaaagaaaatgtctttccttaaaacatgatcttattgacatgaaggtagtttgagcaagggtatgtaataaaataaatggctctcaacctgcatcaatttttatactatagttaaaaaatttatagaggacaacctatgtgttatgctgagatagactcagtaatcatttgtttgcaaattgattatttttttctcatccatccagaaagtacagtgcataacaacaacacttaacaagtgcagaggaacctgtcctgtagtatataataaaaaatgattgtcaccttgctgatctttccatttaaacatgcatgatctccagtactttgtacaatgtatagtatattaaatacatttatgtgtaattttgtgtgtatttttatatggtataattaaaattattacatttatgtgattgtaattcacaaaaagtactacttactatattctgtagagtgtgttgtgaatgtttttacctgtgtttgagcattatggtgtaggtttaatagatgaatatttgccttcagtctctgctcaggtattaatgtgtagtaatttttggtgctttctttttaatctgtgataatctggtgttctgaatgttcaaaaataaatttggttgaatacgca

SEQ ID NO: 23090 - DNA, 1718 bp, Homo sapiens
  source 1..1718: mol_type = unassigned DNA
tacagctcccgtcactagctttttctcctcaagcctgcactgcacaccaactgggacggagggtgcagatgaataaaggcaaatccatcaccaaaagacagtcggcccaatatgtcaagacctctgatcactagatcccctgcatctccactgaacaaccaaggcatccctactccagcacaactcacaaaatccaatgcgcctgtccacattgatgtgggcggccacatgtacaccagcagcctggccaccctcaccaaataccctgaatccagaatcggaagactttttgatggtacagagcccattgttttggacagtctcaaacagcactatttcattgacagagatggacagatgttcagatatatcttgaattttctacgaacatccaaactcctcattcctgatgatttcaaggactacactttgttatatgaagaggcaaaatattttcagcttcagcccatgttgttggagatggaaagatggaagcaggacagagaaactggtcgattttcaaggccctgtgagtgcctcgtcgtgcgtgtggccccagacctcggagaaaggatcacgctaagcggtgacaaatccttgatagaagaagtatttccagagatcggcgacgtgatgtgtaactctgtcaatgcaggctggaatcacgactcgacgcacgtcatcaggtttccactaaatggctactgtcacctcaactcagtccaggtcctcgagaggttgcagcaaagaggatttgaaatcgtgggctcctgtgggggaggagtagactcgtcccagttcagcgaatacgtccttcggcgggaactgaggcggacgccccgtgtaccctccgtcatccggataaagcaagagcctctggactaaatggacatatttcttatgcaaaaaggaaaacacacacaaccaataactcaaacaaaaaagggacatttatgtgcagttgggacagcaaaccaagtcctggacgtaaaatcgaataaaagacacatttatatccaatagagaccacacctgtattcatatgggaacaattggaatagtgatatcctcaaggtgtaaaaaatatataaatatatatatatatgtcaaaaggtaggaaatgcaaaaaagaaaaaaaaaaaaggtgacagccgcagttggtgctgtgatggccgtgaagtgtcctgggccttccgaggcctctgacaaataaacaagccatgagtggtgaggacacagtctccttacagtttccattgccaacaacagccatccatatttcttttttcctttgtctttctttttcctttttttttaaaaaaacaaaacaaacaaaacaccttgaatcaagtttgtttgtatatggaggttccacgtctttctttaggcagggaccaggcaggacttcagaaaaaccctcatgagcacattgcaaagatgttagacatgaaattttaaatgtagtttgtacagaagtcacacttttttgtccacctcacagatgtgaactttactttgttttaaaactgatcagttttgccaaggggccagaattattccttgttagaattgctccagttcaagtctgctgctttcctacaatttttcaaattttataatgtattaaatacaataaactctgtttaaaaaataaggtctgtgtgaaacacacatgtgggggtgaggctggattaaagtgaaattttttctttttgaaa

SEQ ID NO: 23091 - DNA, 2164 bp, Homo sapiens
  source 1..2164: mol_type = unassigned DNA
ctggaccggcgcggacttgccccagacctacggggagcgccccaggtctttaatgacagcttaaatgtggctgttggaaaagtcgaaagggatgtggctgacgtggggcgtgtttcgctcctttgcaagagtcggaaagggagttgggagccgcgcggctggccccaggcccccgcgcctcgccgccagcaagtaggtgggggagccgccgccgccgccagccccatcccgctcccaagcctcgcccgctgcgccctggccgcgggcgccgagagggtgcggggcctcgccgtgcctcctccaccctgctcattaacctgcctgctccgctccgctccgggcggccccagacacgggtttcccgcggcagcacccgcggcccgcccggcgcagccgccgccccgaccccccggctccggggggcaatgagggggcagtggaaggggcactgctcctcgggcattacttagagaaacgagaccgtcccgccctctcgccggccctccctctctcccgcccgggcccgcgcaattctccgccagagggacagtcggcccaatatgtcaagacctctgatcactagatcccctgcatctccactgaacaaccaaggcatccctactccagcacaactcacaaaatccaatgcgcctgtccacattgatgtgggcggccacatgtacaccagcagcctggccaccctcaccaaataccctgaatccagaatcggaagactttttgatggtacagagcccattgttttggacagtctcaaacagcactatttcattgacagagatggacagatgttcagatatatcttgaattttctacgaacatccaaactcctcattcctgatgatttcaaggactacactttgttatatgaagaggcaaaatattttcagcttcagcccatgttgttggagatggaaagatggaagcaggacagagaaactggtcgattttcaaggccctgtgagtgcctcgtcgtgcgtgtggccccagacctcggagaaaggatcacgctaagcggtgacaaatccttgatagaagaagtatttccagagatcggcgacgtgatgtgtaactctgtcaatgcaggctggaatcacgactcgacgcacgtcatcaggtttccactaaatggctactgtcacctcaactcagtccaggtcctcgagaggttgcagcaaagaggatttgaaatcgtgggctcctgtgggggaggagtagactcgtcccagttcagcgaatacgtccttcggcgggaactgaggcggacgccccgtgtaccctccgtcatccggataaagcaagagcctctggactaaatggacatatttcttatgcaaaaaggaaaacacacacaaccaataactcaaacaaaaaagggacatttatgtgcagttgggacagcaaaccaagtcctggacgtaaaatcgaataaaagacacatttatatccaatagagaccacacctgtattcatatgggaacaattggaatagtgatatcctcaaggtgtaaaaaatatataaatatatatatatatgtcaaaaggtaggaaatgcaaaaaagaaaaaaaaaaaaggtgacagccgcagttggtgctgtgatggccgtgaagtgtcctgggccttccgaggcctctgacaaataaacaagccatgagtggtgaggacacagtctccttacagtttccattgccaacaacagccatccatatttcttttttcctttgtctttctttttcctttttttttaaaaaaacaaaacaaacaaaacaccttgaatcaagtttgtttgtatatggaggttccacgtctttctttaggcagggaccaggcaggacttcagaaaaaccctcatgagcacattgcaaagatgttagacatgaaattttaaatgtagtttgtacagaagtcacacttttttgtccacctcacagatgtgaactttactttgttttaaaactgatcagttttgccaaggggccagaattattccttgttagaattgctccagttcaagtctgctgctttcctacaatttttcaaattttataatgtattaaatacaataaactctgtttaaaaaataaggtctgtgtgaaacacacatgtgggggtgaggctggattaaagtgaaattttttctttttg

SEQ ID NO: 23092 - DNA, 3428 bp, Homo sapiens
  source 1..3428: mol_type = unassigned DNA
atggcgagaatgcctggcagcggggactgtaacaccagcgcgggcggcagcgccagcgctgccgccgccgccgccgagaacaatggggagcggggcgagggcgagcgcggcgcggggggccgcggccgccgccacagccgtccgcactactgcagcgcgggcgaggaggaggaggaagaggaggaggaggacgagatccaggaggtgcagataacgggggacgaggaggaggaggaggacggaggtggggggctggaggaggacgaggaggaggaggaagaggaggagatggggctggactgggacgagcccctggagcccgaggactcggccggggaggagctggagcccgagccggtccatatgatcaatatggaccagagcgccgcgctggagcccgaggcgccgccgcgactgctggcgccccgggcccgcggtgggccgcccggggacggctccgagctggaccccgacgtgctgcagcgccccgagcgggcccggctgagcgagaacacccggctggccacccgctacgccgtgcgcatcttccgggagtacctgagcgagaaggcgcagagcccggacttcgagaccatggacaagggggcgctgtgccgcgtgctgcgctccttctatgccgaggcccgctccaaaagcggccagctctacagcaagtcgtcgctcatcagcatccgcagctccctcaaccgctacctcaatgagcccccgtactgccgcacgctcgacctcaccaaggaccccgagctgcgcagcgccaacctgacgctggccgcggtcatccgcaagctcgaggagcagggcgccgggccggtggtgcagaagcaagccatcacgcgcgccgacctgcgcaagctgtacacctccagcgtcttcagcaccaacacgcccttcgggctgctcaacaaggtctggttcgagacgtgcatgtacttctgtacccgcggccgcgagaaccagcgtgagttggaggaggactcttttgggctggccatggacgaggacggtcgcaagttcgtctacttcaagtccctcgggccctaccacaagtcgcgctcgtcgtcgtggagcaagaagcgcgccgagagcagcgacgaggagaacttgccccgcatgtatgagacgggcaccgagttctgcccctacgccagcttcgtcaagtacctgtcgaaacgcaaccctctctgcaaggcgttcttccagcggccccgggaccactgcagcgagggcgatgtgacctggtacgagaacaaagccatcggcaagaacttgctaggcactcggatgcagatgctctccaaggcggccaagctctccaagacctacaccaaccactgcatcggcgccgtctccatcgccacgctcaacagcatcgcgggcattggcaccaagctgggctcgcccgccccgcagggctgctacgccgaggctctgaacggggcggcacggcaccactcccaccacccccccacccatccctcccaccaccaccgcccccagccgccctcgctggggaacacttacatcctccccaaagacagccaggtcgggcccgacgtgaaatccgaggctgcgcccaagcgcgccctgtacgagtctgtgttcgggtcgggggaaatctgcggccccacttcccccaaaagactttgtatccgcccctcggagcctgtggatgcggtggtggtggtttccgtgaaacacgaccccctgcctcttcttccagaagccaatgggcacagaagcaccaattctcccacaatagtttcacctgctattgtttcccccacccaggacagtcggcccaatatgtcaagacctctgatcactagatcccctgcatctccactgaacaaccaaggcatccctactccagcacaactcacaaaatccaatgcgcctgtccacattgatgtgggcggccacatgtacaccagcagcctggccaccctcaccaaataccctgaatccagaatcggaagactttttgatggtacagagcccattgttttggacagtctcaaacagcactatttcattgacagagatggacagatgttcagatatatcttgaattttctacgaacatccaaactcctcattcctgatgatttcaaggactacactttgttatatgaagaggcaaaatattttcagcttcagcccatgttgttggagatggaaagatggaagcaggacagagaaactggtcgattttcaaggccctgtgagtgcctcgtcgtgcgtgtggccccagacctcggagaaaggatcacgctaagcggtgacaaatccttgatagaagaagtatttccagagatcggcgacgtgatgtgtaactctgtcaatgcaggctggaatcacgactcgacgcacgtcatcaggtttccactaaatggctactgtcacctcaactcagtccaggtcctcgagaggttgcagcaaagaggatttgaaatcgtgggctcctgtgggggaggagtagactcgtcccagttcagcgaatacgtccttcggcgggaactgaggcggacgccccgtgtaccctccgtcatccggataaagcaagagcctctggactaaatggacatatttcttatgcaaaaaggaaaacacacacaaccaataactcaaacaaaaaagggacatttatgtgcagttgggacagcaaaccaagtcctggacgtaaaatcgaataaaagacacatttatatccaatagagaccacacctgtattcatatgggaacaattggaatagtgatatcctcaaggtgtaaaaaatatataaatatatatatatatgtcaaaaggtaggaaatgcaaaaaagaaaaaaaaaaaaggtgacagccgcagttggtgctgtgatggccgtgaagtgtcctgggccttccgaggcctctgacaaataaacaagccatgagtggtgaggacacagtctccttacagtttccattgccaacaacagccatccatatttcttttttcctttgtctttctttttcctttttttttaaaaaaacaaaacaaacaaaacaccttgaatcaagtttgtttgtatatggaggttccacgtctttctttaggcagggaccaggcaggacttcagaaaaaccctcatgagcacattgcaaagatgttagacatgaaattttaaatgtagtttgtacagaagtcacacttttttgtccacctcacagatgtgaactttactttgttttaaaactgatcagttttgccaaggggccagaattattccttgttagaattgctccagttcaagtctgctgctttcctacaatttttcaaattttataatgtattaaatacaataaactctgtttaaaaaataaggtctgtgtgaaacacacatgtgggggtgaggctggattaaagtgaaattttttctttttg

SEQ ID NO: 23093 - DNA, 1747 bp, Homo sapiens
  source 1..1747: mol_type = unassigned DNA
ccaccacctgcctcaccagtagctgggactacagctcccgtcactagctttttctcctcaagcctgcactgcacaccaactgggacggagggtgcagatgaataaaggcaaatccatcaccaaaagacagtcggcccaatatgtcaagacctctgatcactagatcccctgcatctccactgaacaaccaaggcatccctactccagcacaactcacaaaatccaatgcgcctgtccacattgatgtgggcggccacatgtacaccagcagcctggccaccctcaccaaataccctgaatccagaatcggaagactttttgatggtacagagcccattgttttggacagtctcaaacagcactatttcattgacagagatggacagatgttcagatatatcttgaattttctacgaacatccaaactcctcattcctgatgatttcaaggactacactttgttatatgaagaggcaaaatattttcagcttcagcccatgttgttggagatggaaagatggaagcaggacagagaaactggtcgattttcaaggccctgtgagtgcctcgtcgtgcgtgtggccccagacctcggagaaaggatcacgctaagcggtgacaaatccttgatagaagaagtatttccagagatcggcgacgtgatgtgtaactctgtcaatgcaggctggaatcacgactcgacgcacgtcatcaggtttccactaaatggctactgtcacctcaactcagtccaggtcctcgagaggttgcagcaaagaggatttgaaatcgtgggctcctgtgggggaggagtagactcgtcccagttcagcgaatacgtccttcggcgggaactgaggcggacgccccgtgtaccctccgtcatccggataaagcaagagcctctggactaaatggacatatttcttatgcaaaaaggaaaacacacacaaccaataactcaaacaaaaaagggacatttatgtgcagttgggacagcaaaccaagtcctggacgtaaaatcgaataaaagacacatttatatccaatagagaccacacctgtattcatatgggaacaattggaatagtgatatcctcaaggtgtaaaaaatatataaatatatatatatatgtcaaaaggtaggaaatgcaaaaaagaaaaaaaaaaaaggtgacagccgcagttggtgctgtgatggccgtgaagtgtcctgggccttccgaggcctctgacaaataaacaagccatgagtggtgaggacacagtctccttacagtttccattgccaacaacagccatccatatttcttttttcctttgtctttctttttcctttttttttaaaaaaacaaaacaaacaaaacaccttgaatcaagtttgtttgtatatggaggttccacgtctttctttaggcagggaccaggcaggacttcagaaaaaccctcatgagcacattgcaaagatgttagacatgaaattttaaatgtagtttgtacagaagtcacacttttttgtccacctcacagatgtgaactttactttgttttaaaactgatcagttttgccaaggggccagaattattccttgttagaattgctccagttcaagtctgctgctttcctacaatttttcaaattttataatgtattaaatacaataaactctgtttaaaaaataaggtctgtgtgaaacacacatgtgggggtgaggctggattaaagtgaaattttttctttttgaaa

SEQ ID NO: 23094 - DNA, 4163 bp, Homo sapiens
  source 1..4163: mol_type = unassigned DNA
acaccttgcctcccctctggcagctgaaatagcggaggtgggataaatgccctccccagccgagaaaagctggaacccactccggccggggaggctggaaagaaaactggcccctaggcgcacaacggacggcttaagacgttgccctctgcggggcggaagtggggtgcggacagcggaagttatcgctccggccccgcctccgcccccggctggcgtgagctgggtgtttcctgcctctctcagtccgggtttggagactcctgcgtcctccgacttttcatggaagagatgtcaggagaaagtgtggtgagctcagcggtgccagcggctgctacccgcaccacttccttcaagggcacgagccccagctccaaatacgtgaagctgaatgtgggtggagccctctactataccaccatgcagacgctgaccaagcaggacaccatgctgaaggccatgttcagcgggcgcatggaagtgctcaccgacagtgaaggctggatcctcattgaccgctgtgggaagcactttggtacgatactcaactaccttcgagacggggcggtgcctttacccgagagccgccgggagatcgaggagctgctagcagaagccaagtactacctagtccaaggcctggtggaagagtgccaggcggccctacaaaacaaagatacttatgagcctttctgcaaggtccctgtgatcacctcatccaaggaagaacaaaaacttatagcgacttcaaataagccagccgtgaagttgctctacaacagaagtaacaacaaatactcatataccagcaattctgacgacaatatgttgaaaaacattgaactgtttgataagctgtctctgcgctttaacggaagggtcctgttcataaaggatgttattggggatgaaatctgctgctggtccttttatggtcagggccggaagattgctgaagtctgttgtacctccatcgtctatgccactgagaagaaacagaccaaggtggagtttcccgaagcccggatttatgaggagaccctgaacattttgctgtatgaggcccaggatggccggggacctgacaatgcgctcctggaggccacaggcggggcggcggggcgctcccaccacctggacgaggacgaggagcgggagcggatcgagcgcgtgcggaggatccacatcaagcgccctgatgaccgggcccacctccaccagtgagcaggcaagagaccgagccgccctcctctcaccgcccccactccctgccgtgctacacccagatcctgtgcaggctgccgggccccttctgcttcccttggagcctggagatacttttgtaacaagccagatgattattttggtattgcttgacaaggcaaattgattgtcttgacccaggcgtatgacccctgtcgttgaacaagctgtgtctaagatctctacttttcatgagaatctgagactctttggagccaggctttctcggttctcagaggaaaagtatgaatgagtgtgaagtgtatgtgagaacttttgtttgcaatatttatttttgtgggtgtcgacttcctatgtgggctttttgggtgacactcccttaagggttcagtttgacaattctgagagttgtcctgcagttggaggccaccagaggtatctgagctccctgcttcctatttcataatcctccagccccagcaggtccactcctggttcctgtgtgtttggcccgggcacaatccccactgctttgctagacgtgctttctgccatgtggctttgggcctagagcttgttgataattgcagcttgtggcagtggaaatatggctgaatgagcgtctaaatcgttgagaccagtgcaactttgggtgcaaggctttgtttagggatcaagccttttgccaccttgggctggtctttggcctggtgctcactgggaccccatatgtctgcgtaggagcagaactttccatggcagtaagtgtccagctctgtttctggttctttccccaactccagccccgtccagttgttctcctgattgacccgactccactccaggaaggccatctgaccctgtgacaggcatagctcataaactacccctccctgggatcccgctcctcttcagcctccttccccatgaagctgggctaactttctaagtcattttgcttagaaattcagtgtggcccataccctttgtcctcccagcctggcatccaggcagggacaccctcacaccaccagccccagggagcttccctgctataaacacagacccccttgtctttgcctctgatttttacacagtgtagagtggccagcagtgaacaggttgaggatgtgcgggtagatagataactttgggtctggtttgtgtctgtgttcatgtttgtttaagggatatgtgtgactgtgggtggggacgtgtgcttgtggggcacaggtggcggcccctgctggagcccggctgggcgcagcgcctatgtaggacgggtgttctcagtgacctacctcccaggctcctctgcacctgcaaaggaacaggagtgagtcgtgactgacaggggtggttgagactagactaggtagagtagttaccaggagatgtgaatgtgcgtcaggtgatggatgggtttgtcaagggaatcgttaccgttttataccaaaggtattaacatgggcagcctttgacacatgtattccaaaaacgagtttatattttcaaacggtttttacagcttagactttgtacttactgccctgcctgtgacagttgtatgccttcattttgtatccaacagcaaagtctacaataaaactttaaaacaatcatgactgaatgtcaaaatcgtgtattgggcagatgctttttaaactgtcgtgtgagaaacttttatattaggccatttggattttattaagtgctaaggaaagagggcttacaaaatgtttcgtaaatattttatactgtttaagtgttaaacaccaaccctgtctttcttttgggttgagcttttttagaaagtcgaagtgaatgttggccaggaaaatggaaaagccattgtataaatttttttttgaggcggagtcttgctctattggccaggctggagtgtagtggcaccatctccacttaccacaacttgtgcctcctgggttcaagcgattctgctgcctcagcctcccgagtagctgggattgcaggtacccatcagcccatgcccagctaattttgtatttttagtagagatggggtttcaccatgttggccaggctggtcttgaactcctgaccctgtgatccgaccaccttggcctcccaaagtgctgggattacaggtgtgagtcaccacacctggctgcatagtgttttaaatgtttgtgtgaagaatgagtttgtggaacaatttgatttgctgtggcctctatgcctaatgagctagtgtttctggcagctctctctacccaactttgcacttgtagttttgagtctttgtctctctggaatatgaacaggtttataaaacattccatggtgaacaattctgtcggctgcattatagccatgagtgaatagacagcattggctggtccaagctctgttattgagtatacaaggaactgatttttcttatgttagcactaagggcaaaaaccaatatttataatgtaagcactatccaggtaaaacactggcccaagatttggtaaagagatttcattgcaatgtaataactacagttttttacaaattggaacagctttggtgtgtcgtaatcaagggttttttttgtttgtttgtttcaaataagccatctgattgtggtgactggggcccatgtccaagacaattcctggcatattctgtcaccctcccgtggggcgatcactgtgtggggaccccattccccagttaaagtgtgtctctgtaccttacaacagcgattcaggacccaagtgtgaacaacactcagcccgccctctggagcgtgtgctgtctttagggccctacccaaagtcactgtaacagttaagtgtgtcattaacctttctgtctctttgcgccataaaaaaatgctcaaagttttagatgtagccactgtatgttgtacaaacgttggcgacatgtaaaataaaagtcataaaatgc

SEQ ID NO: 23095 - DNA, 2467 bp, Homo sapiens
  source 1..2467: mol_type = unassigned DNA
gctggcgtgagctgggtgtttcctgcctctctcagtccgggtttggagactcctgcgtcctccgacttttcatggaagagatgtcaggagaaagtgtggtgagctcagcggtgccagcggctgctacccgcaccacttccttcaagggcacgagccccagctccaaatacgtgaagctgaatgtgggtggagccctctactataccaccatgcagacgctgaccaagcaggacaccatgctgaaggccatgttcagcgggcgcatggaagtgctcaccgacagtgaagaacaaagatacttatgagcctttctgcaaggtccctgtgatcacctcatccaaggaagaacaaaaacttatagcgacttcaaataagccagccgtgaagttgctctacaacagaagtaacaacaaatactcatataccagcaattctgacgacaatatgttgaaaaacattgaactgtttgataagctgtctctgcgctttaacggaagggtcctgttcataaaggatgttattggggatgaaatctgctgctggtccttttatggtcagggccggaagattgctgaagtctgttgtacctccatcgtctatgccactgagaagaaacagaccaaggtggagtttcccgaagcccggatttatgaggagaccctgaacattttgctgtatgaggcccaggatggccggggacctgacaatgcgctcctggaggccacaggcggggcggcggggcgctcccaccacctggacgaggacgaggagcgggagcggatcgagcgcgtgcggaggatccacatcaagcgccctgatgaccgggcccacctccaccagtgagcaggcaagagaccgagccgccctcctctcaccgcccccactccctgccgtgctacacccagatcctgtgcaggctgccgggccccttctgcttcccttggagcctggagatacttttgtaacaagccagatgattattttggtattgcttgacaaggcaaattgattgtcttgacccaggcgtatgacccctgtcgttgaacaagctgtgtctaagatctctacttttcatgagaatctgagactctttggagccaggctttctcggttctcagaggaaaagtatgaatgagtgtgaagtgtatgtgagaacttttgtttgcaatatttatttttgtgggtgtcgacttcctatgtgggctttttgggtgacactcccttaagggttcagtttgacaattctgagagttgtcctgcagttggaggccaccagaggtatctgagctccctgcttcctatttcataatcctccagccccagcaggtccactcctggttcctgtgtgtttggcccgggcacaatccccactgctttgctagacgtgctttctgccatgtggctttgggcctagagcttgttgataattgcagcttgtggcagtggaaatatggctgaatgagcgtctaaatcgttgagaccagtgcaactttgggtgcaaggctttgtttagggatcaagccttttgccaccttgggctggtctttggcctggtgctcactgggaccccatatgtctgcgtaggagcagaactttccatggcagtaagtgtccagctctgtttctggttctttccccaactccagccccgtccagttgttctcctgattgacccgactccactccaggaaggccatctgaccctgtgacaggcatagctcataaactacccctccctgggatcccgctcctcttcagcctccttccccatgaagctgggctaactttctaagtcattttgcttagaaattcagtgtggcccataccctttgtcctcccagcctggcatccaggcagggacaccctcacaccaccagccccagggagcttccctgctataaacacagacccccttgtctttgcctctgatttttacacagtgtagagtggccagcagtgaacaggttgaggatgtgcgggtagatagataactttgggtctggtttgtgtctgtgttcatgtttgtttaagggatatgtgtgactgtgggtggggacgtgtgcttgtggggcacaggtggcggcccctgctggagcccggctgggcgcagcgcctatgtaggacgggtgttctcagtgacctacctcccaggctcctctgcacctgcaaaggaacaggagtgagtcgtgactgacaggggtggttgagactagactaggtagagtagttaccaggagatgtgaatgtgcgtcaggtgatggatgggtttgtcaagggaatcgttaccgttttataccaaaggtattaacatgggcagcctttgacacatgtattccaaaaacgagtttatattttcaaacggtttttacagcttagactttgtacttactgccctgcctgtgacagttgtatgccttcattttgtatccaacagcaaagtctacaataaaactttaaaacaatcatg

SEQ ID NO: 23096 - DNA, 1030 bp, Homo sapiens
  source 1..1030: mol_type = unassigned DNA
ttagatattgcaggagtcccttctggagtggttatggcaacttctactccctgcagaagtctggatttttgccaacccttggcactgtccaaccttttaattattgcaaatctggctggatcctcattgaccgctgtgggaagcactttggtacgatactcaactaccttcgagacggggcggtgcctttacccgagagccgccgggagatcgaggagctgctagcagaagccaagtactacctagtccaaggcctggtggaagagtgccaggcggccctacaaaacaaagatacttatgagcctttctgcaaggtccctgtgatcacctcatccaaggaagaacaaaaacttatagcgacttcaaataagccagccgtgaagttgctctacaacagaagtaacaacaaatactcatataccagcaattctgacgacaatatgttgaaaaacattgaactgtttgataagctgtctctgcgctttaacggaagggtcctgttcataaaggatgttattggggatgaaatctgctgctggtccttttatggtcagggccggaagattgctgaagtctgttgtacctccatcgtctatgccactgagaagaaacagaccaaggtggagtttcccgaagcccggatttatgaggagaccctgaacattttgctgtatgaggcccaggatggccggggacctgacaatgcgctcctggaggccacaggcggggcggcggggcgctcccaccacctggacgaggacgaggagcgggagcggatcgagcgcgtgcggaggatccacatcaagcgccctgatgaccgggcccacctccaccagtgagcaggcaagagaccgagccgccctcctctcaccgcccccactccctgccgtgctacacccagatcctgtgcaggctgccgggccccttctgcttcccttggagcctggagatacttttgtaacaagccagatgattattttggtattgcttgacaaggcaaattgattgtcttgacccaggcgtatgaccc

SEQ ID NO: 23097 - DNA, 866 bp, Homo sapiens
  source 1..866: mol_type = unassigned DNA
agatgtcaggagaaagtgtggtgagctcagcggtgccagcggctgctacccgcaccacttccttcaagggcacgagccccagctccaaatacgtgaagctgaatgtgggtggagccctctactataccaccatgcagacgctgaccaagcaggacaccatgctgaaggccatgttcagcgggcgcatggaagtgctcaccgacagtgaaggctggatcctcattgaccgctgtgggaagcactttggtacgatactcaactaccttcgagacggggcggtgcctttacccgagagccgccgggagatcgaggagctgctagcagaagccaagtactacctagtccaaggcctggtggaagagtgccaggcggccctacaaaacaaagatacttatgagcctttctgcaaggtccctgtgatcacctcatccaaggaagaacaaaaacttatagcgacttcaaataagccagccgtgaagttgctctacaacagaagtaacaacaaatactcatataccagggtcctgttcataaaggatgttattggggatgaaatctgctgctggtccttttatggtcagggccggaagattgctgaagtctgttgtacctccatcgtctatgccactgagaagaaacagaccaaggtggagtttcccgaagcccggatttatgaggagaccctgaacattttgctgtatgaggcccaggatggccggggacctgacaatgcgctcctggaggccacaggcggggcggcggggcgctcccaccacctggacgaggacgaggagcgggagcggatcgagcgcgtgcggaggatccacatcaagcgccctgatgaccgggcccacctccaccagtga

SEQ ID NO: 23098 - DNA, 5355 bp, Homo sapiens
  source 1..5355: mol_type = unassigned DNA
attctcccagtacagttcatcacagttttggttaaattcagagtttacgtcatgacgtgtaaatacggctgacagttaagccacagagtgtacagtgattattttctttcttctataactttaagtttgccagagttagggattgcctcattgttttgttcacttggttttctaaatatatgttcctacttcagccccacgttctcagcggtctcatagtggtgtgttcagacacatcagaggttctgtttcatctttgtcttggagacatgcccctgggtctcgtttctgttagtctaaggttagacctccaggactgacctcctaattctttcctcttagtgtctctggctttatccttttgttctactttctcagaagttttatttttcaccttttcaacccttctatcaaaattttcatttctgcttcgtctttctaacttcaggagccttttcttgctgtccgaatgccctgctttccacagcgtgctcatcttgtttcctaggaggccgtatctgctctcaactgtctgatgattctgtttgttttctttcttctcccttcattatctgactcctcctcttttcctgtctttgttttggttttgttctcatgttaaagaggcttttcacatgtaatctgatgatgcttggctgtctgttgaaggaatgagagactctgaaagctgtttgtgcatggaaggtccttgttgtccactgggctgcattgtgggtgataaggcagactttttcagcgggacccccaactgtcagaatctgtaagccattttgggggaagcaggtggtgttcctgaagaggaatcctctactctcctcctgcctgacgggtctaggcctggccggctgcctttggggatctggaaggggaaggagctggggttgctcatcacttagtgtgatgttcacttgtccccccgttttcagaatcgcagctcagccctgtcctctaccgtgcaaaccactgcaggaagatggccctttcttctgcctgcatggggacggagatggatttggggatctttccagtgcttccgcccactggtttcagctttccccctctccttggttaacgctcacctgtgacctttctaccctcaaatttttgactttttttactggtctgctgacctcacttctcccattctttttccccttatgggtttatgcttttttttttaattcctctgcagtcatggtagtggggttttaggagcttttgattaaaacacgtttctgctgccacgtcaagggtttatttttgagtggcttcctgggctgtggaaaatgtgtcatcattgttagtacttactcagcatcctggcctatcatggtcatagccaaagagcagacttactgggaaattcaactccctgtcttcccccatctagttcactggtggtgagaatccttctctcttcccagccatgactgccccatctcccctcgccagagcctgtccagccggtcaactttaaaaatgcagtgctaggcaggcctcctaggctgaaagcatgttttgttccagcagaacaaagatacttatgagcctttctgcaaggtccctgtgatcacctcatccaaggaagaacaaaaacttatagcgacttcaaataaggtatgttggaggcacccttgtggaatttcttttgctaccagaaatgatggaggttcttctgaataacttttgaaataaaaacatgtataattgcctgagtgaggcctgataatgggttcacagtgggaagctacaggtcatcttttgtgcccctgctattgggtcatgtggtccccctctccagccagcaagctatgcttgtctgcctcttctgatgcagggcagggccccagccctatgggaagctagtagttcattgcatctgcctgccaagtaactctcttcttcttcttttaaaacaacccacagccagccgtgaagttgctctacaacagaagtaacaacaaatactcatataccaggtaaggcgtcagccgggaaagacagctccatttactaggaaaacctccactcacaccagccaggcccagctcttcttcgtaccttcagatgaggatgacccctctgtacctctctgcctggatagataagtagacagatggatacaggggtataactctgagctataattcacacatatcataaaagtcatctttctagagtgtacagttattattatattcacaatatgtggtttttatatattcacaagttgtgaggccataacgactatctaattttagaactttttcactgcctgaaaagaaaccctctattcgttagcagtcactccccattttccctcaaccattgcttccccaaccccacagccctaggtaaccactaatctgttttctgtcttgatgaatttgcctgttctggacatttttatgtgaatggaattgcataatatatggccttttgtgaccagattccttcattcagcataatgagattacctaagaggttttcaaggtttatccatgttgtagcatgaatcaatacttcattcctttttatggcagaataatattccacagtgtagaccacattttctttacccattcatcagttgatggacatttgggttgtttgcactttttggctattgtgtgtaatgctgttatgaacattcatgcaaagtctctatgtggacttacgttttcatttctctgggaacagaattgctgggtcatgtggtaattctatgtttaatcattcgaggacctgccaaactgttttctaaagtggctgcaccattttacattcccaccagcaatatatgcaggtttctagaatgccatttggcccttgaaaacatgtggctctaactcaggaacttgagggatgcagggaggatttaatcaggttactcaagatctttaaaaagacctaggatatagagtctcccttgggcagtgccattctgctcctcttggggctcggtgaggtgctctcctccacctggtgcctgtgcccagaggctgtcactcaagcacaatggttaggagcactcaggcttaggggccagggctgtcttttggggggcgtgtctgccatttattaggttcagccttgagcaattacctaatttctctgatcctcactttccttcttgagtgatggagattggagtgcctttgtcatgggattattgtgaggttgaaatgaggtagtggagaaagtgggctcagtagggccctgcgtgtagaagggcccagcaaatgatggcagtttttaccagcttgtggtcaccgtatcaaatgctcttttgcagcaattctgacgacaatatgttgaaaaacattgaactgtttgataagctgtctctgcgctttaacggaagggtcctgttcataaaggatgttattggggatgaaatctgctgctggtccttttatggtcagggccggaagattgctgaagtctgttgtacctccatcgtctatgccactgagaagaaacagaccaaggtggagtttcccgaagcccggatttatgaggagaccctgaacattttgctgtatgaggcccaggatggccggggacctgacaatgcgctcctggaggccacaggcggggcggcggggcgctcccaccacctggacgaggacgaggagcgggagcggatcgagcgcgtgcggaggatccacatcaagcgccctgatgaccgggcccacctccaccagtgagcaggcaagagaccgagccgccctcctctcaccgcccccactccctgccgtgctacacccagatcctgtgcaggctgccgggccccttctgcttcccttggagcctggagatacttttgtaacaagccagatgattattttggtattgcttgacaaggcaaattgattgtcttgacccaggcgtatgacccctgtcgttgaacaagctgtgtctaagatctctacttttcatgagaatctgagactctttggagccaggctttctcggttctcagaggaaaagtatgaatgagtgtgaagtgtatgtgagaacttttgtttgcaatatttatttttgtgggtgtcgacttcctatgtgggctttttgggtgacactcccttaagggttcagtttgacaattctgagagttgtcctgcagttggaggccaccagaggtatctgagctccctgcttcctatttcataatcctccagccccagcaggtccactcctggttcctgtgtgtttggcccgggcacaatccccactgctttgctagacgtgctttctgccatgtggctttgggcctagagcttgttgataattgcagcttgtggcagtggaaatatggctgaatgagcgtctaaatcgttgagaccagtgcaactttgggtgcaaggctttgtttagggatcaagccttttgccaccttgggctggtctttggcctggtgctcactgggaccccatatgtctgcgtaggagcagaactttccatggcagtaagtgtccagctctgtttctggttctttccccaactccagccccgtccagttgttctcctgattgacccgactccactccaggaaggccatctgaccctgtgacaggcatagctcataaactacccctccctgggatcccgctcctcttcagcctccttccccatgaagctgggctaactttctaagtcattttgcttagaaattcagtgtggcccataccctttgtcctcccagcctggcatccaggcagggacaccctcacaccaccagccccagggagcttccctgctataaacacagacccccttgtctttgcctctgatttttacacagtgtagagtggccagcagtgaacaggttgaggatgtgcgggtagatagataactttgggtctggtttgtgtctgtgttcatgtttgtttaagggatatgtgtgactgtgggtggggacgtgtgcttgtggggcacaggtggcggcccctgctggagcccggctgggcgcagcgcctatgtaggacgggtgttctcagtgacctacctcccaggctcctctgcacctgcaaaggaacaggagtgagtcgtgactgacaggggtggttgagactagactaggtagagtagttaccaggagatgtgaatgtgcgtcaggtgatggatgggtttgtcaagggaatcgttaccgttttataccaaaggtattaacatgggcagcctttgacacatgtattccaaaaacgagtttatattttcaaacggtttttacagcttagactttgtacttactgccctgcctgtgacagttgtatgccttcattttgtatccaacagcaaagtctacaataaaactttaaaacaatcatg

SEQ ID NO: 23099 - DNA, 1721 bp, Homo sapiens
  source 1..1721: mol_type = unassigned DNA
gcagctgcccggcgccggcttccgggtggtgcgagcgagatggggcggagggccggtcttgcagagtagctgcggtgagtgggcgtgtgcgccgagcggtctggcccaagggctgggggccggccgagggtcttcgggagcaggccgcagggcgcggagagatcctgggatcgccgtccgccgctgctacccggcatgtcggcggaggcctcgggcccggctgccgccgcggccccgtccctggaagcccccaagccctcgggtctcgagcctggccccgccgcctacggtctcaagccgctgaccccgaacagcaaatacgtgaagctgaacgtgggcggctcgttgcactacaccacgctgcgcaccctcacgggacaggacaccatgctcaaagccatgttcagcggccgcgtggaggtgctgaccgatgccggaggttgggtgctgattgaccggagcggccgtcactttggtacaatcctcaattacctgcgggatgggtctgtgccactgccggagagtacgagagaactgggggagctgctgggcgaagcacgctactacctggtgcagggcctgattgaggactgccagctggcgctgcagcaaaaaagggagacgctgtccccgctgtgcctcatccccatggtgacatctccccgggaggagcagcagctcctggccagcacctccaagcccgtggtgaagctcctgcacaaccgcagtaacaacaagtactcctacaccagcacttcagatgacaacctacttaagaacatcgagctgttcgacaagctggccctgcgcttccacgggcggctactcttcctcaaggatgtcctgggggacgagatctgctgctggtctttctacgggcagggccgcaaaatcgccgaggtgtgctgcacctccattgtctatgctacggagaagaagcagaccaaggtggaatttccagaggcccggatcttcgaggagaccctgaacatcctcatctacgagactccccggggcccagacccagccctcctggaggccacagggggagcagctggagctggtggggctggccgcggggaggatgaagagaaccgagagcaccgtgtccgcaggatccatgtccggcgccatatcacccacgacgagcgtcctcatggccaacaaattgtcttcaaggactgacctctgaccctccccctgccttcctcttgccttgggacccagtccctctctctttccctccccttcccagacttttgccccggctctgctggccaagtcgtgggtcctcctctgtcccttcattgcatggcacagctcactttggcccttctccacccatcccaaccccattgctaacaacatggtacattccggccccaccactcagagccttccgaagccaacacttgtccccaccctggccctgcgtccttccctctccagctggttaagagggatttagaattccctttctctttttttagtgcatcgtccatgccaaagtgtgcggcccttcctgacatcaccacagtctgagcagcctcccgcgtcctgcagggtagtccgccccctcctccccaccatcctccctacctccttaactttgtactagactggcctgggcctgcccagctcagcgttatcagtctgtttcatattatttattattttaattttctattaaattattgaaataaagttaagttgagaaactg

SEQ ID NO: 23100 - DNA, 2528 bp, Homo sapiens
  source 1..2528: mol_type = unassigned DNA
gggattgggtgctaggtcccacgacattagctgggattctaagacctttgctcagctgctgcggccaccactgacacgccctctgctcctcaaatacggagaacagttcagtgttcctgcctgaggatctctgcatttgccttccctctgcctggaactcttccctcacatccgcttcccagcttcagctcggcatcacctcctcagagaggccttccatccttggtgcccgggcaccactgctacccgttttggcctctgttttttttttttttttcaaaggacgttatgttgcccaggctagagtgcaacggtccgatcacggattactgcagcttccaactcctggcttcaagcgctccttctgcctcggcctcccgagtagctaggcttacaggctggggttacaggtgtgagccacagcgcccggccgctttggcctcctttaagagcttccctccgcgctttgttcgcagttctggtcacagtctgttcagtgcgcggggctgggaggcgggaaactgcccaatgcccagacctctctgtctgtttcccctcaagctcgtgaagctctctgacagcagagacccaatcacgaggtggagacttcgctttccacatcgggcagggggtcggccgcatcctcgatctggtcctggtgactcgagaccagagaggagcgcacgtcgacccgcccggggaacccgcaggccacacgccaaacctctacgggatcccccagcgaggccactgcgcatgctccatactcgcagccccgcccccattcaggggcggggccgcgcctgcgcagctgcccggcgccggcttccgggtggtgcgagcgagatggggcggagggccggtcttgcagagtagctgcggtgagtgggcgtgtgcgccgagcggtctggcccaagggctgggggccggccgagggtcttcgggagcaggccgcagggcgcggagagatcctgggatcgccgtccgccgctgctacccggcatgtcggcggaggcctcgggcccggctgccgccgcggccccgtccctggaagcccccaagccctcgggtctcgagcctggccccgccgcctacggtctcaagccgctgaccccgaacagcaaatacgtgaagctgaacgtgggcggctcgttgcactacaccacgctgcgcaccctcacgggacaggacaccatgctcaaagccatgttcagcggccgcgtggaggtgctgaccgatgccggaggttgggtgctgattgaccggagcggccgtcactttggtacaatcctcaattacctgcgggatgggtctgtgccactgccggagagtacgagagaactgggggagctgctgggcgaagcacgctactacctggtgcagggcctgattgaggactgccagctggcgctgcagcaaaaaagggagacgctgtccccgctgtgcctcatccccatggtgacatctccccgggaggagcagcagctcctggccagcacctccaagcccgtggtgaagctcctgcacaaccgcagtaacaacaagtactcctacaccagcacttcagatgacaacctacttaagaacatcgagctgttcgacaagctggccctgcgcttccacgggcggctactcttcctcaaggatgtcctgggggacgagatctgctgctggtctttctacgggcagggccgcaaaatcgccgaggtgtgctgcacctccattgtctatgctacggagaagaagcagaccaaggtggaatttccagaggcccggatcttcgaggagaccctgaacatcctcatctacgagactccccggggcccagacccagccctcctggaggccacagggggagcagctggagctggtggggctggccgcggggaggatgaagagaaccgagagcaccgtgtccgcaggatccatgtccggcgccatatcacccacgacgagcgtcctcatggccaacaaattgtcttcaaggactgacctctgaccctccccctgccttcctcttgccttgggacccagtccctctctctttccctccccttcccagacttttgccccggctctgctggccaagtcgtgggtcctcctctgtcccttcattgcatggcacagctcactttggcccttctccacccatcccaaccccattgctaacaacatggtacattccggccccaccactcagagccttccgaagccaacacttgtccccaccctggccctgcgtccttccctctccagctggttaagagggatttagaattccctttctctttttttagtgcatcgtccatgccaaagtgtgcggcccttcctgacatcaccacagtctgagcagcctcccgcgtcctgcagggtagtccgccccctcctccccaccatcctccctacctccttaactttgtactagactggcctgggcctgcccagctcagcgttatcagtctgtttcatattatttattattttaattttctattaaattattgaaataaagttaagttgagaaactg

SEQ ID NO: 23101 - DNA, 5645 bp, Homo sapiens
  source 1..5645: mol_type = unassigned DNA
ccgaggaggacgtgactcggagctgcctccgctttctccaagccatattcctttaagatgatgtaatagtcatttccctggatggtttcttgcctgcactgctgaaacaacagcatccgaactgcactgggaactgtggaaccacccagctccgccgccagagaagccggagccccgggccccccgccggcatctctgcgctgcgttggcctctggctcgcaccggctcccacctggctgggaacatgggagtccgtttgcccttgccggcaggtggggtggctacctgggaccctagcagggcacatctctccatctttctgcttctgggctttctgaaaagcttctaagtcctggtacctcttgcaactctcttctaaggatcctttccaaagatttctttttccatttttcttttcccctggggaagctttggttgaatattttctctgctttacttcttcaacccaacctcctctcatcagggcttaactttttttgcgacttgttttaacttaagatacggaatgaacacatatgtacctacatacatacataaatacaaataggcatttatataaatgcatatatataatagttattttccaagagcacacctctctggcacttttcattgatacctcggtcgtttacctgtttgggatttgacaagatccagactcagtttggctgtggattttgattgctttacaaatggttattattatttttttcacaagaactgggtctccagcactcactaagacggacatctgagtaactggggaattggcctgccttgcatgtgagcttgatggaagattggatatagacgagttgattatattttatgaagtagcagctcactaccatccaccatccagggtttaaactactttttcagcatcacttcacctgtggactcttatacattttgatttcttgggggaaaaatactgggataagaggaggtcattttttaataagttagcatccttttccctttcttacaagttgatccaaaggataaggctgtgactccattggattgcacctttaaatcaaaatagcagcagcagaagaaagggacaatggctctgagtggaaactgtagtcgttattatcctcgagaacaagggtccgcagttcccaactccttccctgaggtggtagagctgaatgtcgggggtcaagtttattttactcgccattccacattgataagcatccctcattccctcctgtggaaaatgttttccccaaagagagacacggctaatgatctagccaaggactccaagggaaggtttttcattgacagagatggattcttgttccgttatattctggactatctcagggacaggcaggtggtcctgcctgatcactttccagaaaaaggaagactgaaaagggaagctgaatacttccagctcccagacttggtcaaactcctgacccccgatgaaatcaagcaaagcccagatgaattctgccacagtgactttgaagatgcctcccaaggaagcgacacaagaatctgccccccttcctccctgctccctgccgaccgcaagtggggtttcattactgtgggttacagaggatcctgcaccttgggcagagagggacaggcagatgccaagtttcggagagttccccggattttggtttgtggaaggatttccttggcaaaagaagtctttggagaaactttgaatgaaagcagagaccctgatcgagccccagaaagatacacctccagattttatctcaaattcaagcacctggaaagggcttttgatatgttgtcagagtgtggattccacatggtggcctgtaactcatcggtgacagcatctttcatcaaccaatatacagatgacaagatctggtcaagctacactgaatatgtcttctaccgtgagccttccagatggtcaccctcacactgcgattgctgctgcaagaatggcaaaggtgacaaagaaggggagagcggcacgtcttgcaatgacctctccacatctagctgcgacagccagtctgaggccagctctccccaggagacggtcatctgtggtcccgtgacacgccagaccaacatccagactctggaccgtcccatcaagaagggccctgtccagctgatccaacagtcagagatgcggcggaaaagcgacttactccggactctgacttcaggctccagggaatcgaacatgagcagcaaaaaaaaagctgttaaagaaaagctctcaattgaggaggagctggagaaatgtatccaggatttcctaaaaatcaaaattccagatcggtttcctgagagaaaacatccttggcaatctgaacttttaaggaagtatcatctataagggagggctgggggcgggaaaagaaaaaaaaaagtcattttgaaattaacctcctaaaaggaattcatattttaaaggaaaaaaatacaactaatgatgcacatttcttagaacacaatagtccattgatatactactgcctactttacctagttcaccttaacatgtaaatccacagggtagatttctttctagatgtggaagtacaagaaaatcttttttagttatttgtttgtttacttcgtcccatgtgctaactatcttatatataatgagagccagctacgtaaaagtagctgagaggccttgggagtcatttatcccaaactgggttttttctctcatccttctacctccctcctttgaatgagggtatggtagaaaaagatctggcccaatggcataagtttggaatttttaattttggtttttccttttgtttatggggttggggggaatggcagatttatatgacttttcactcaaatctatatgtgccagtttatattgactccgtatgcatgagtatttgtgcaacacaagcacaactaagtatgtatatacacatgacgcacacgatgccagggcctagacctcccaagggctgtgctcctgctcccagcagccctctcttagaatatttcagatggatgagcttctgactctttcttaaaattcttttgggaagatttcccagcctttcttcacaacactttctaacatcaaatgactctcatcatcaacaaattgtattccttattgtgaaattaataccctcaggctccattttactgctttgctctttgtctgcattaagagaggatgaggagagctggtcaaacattccttgtgttaaaaaaatcaaacattcatatccacaaaattttctgctaaatgactccacactcagccttctctaccctgaactgaattatcacccttttctccatgttttcagagttcttactgcccacagtttaatggtgtggcctttccacataatccacattaagttctgtgttcctgtgttgttgtggaactaaggacaacacacagtacttgaataagggtccggccttttgtttgttttagagaaagttgtattccacacacaacctaataatttcttataaaaattttaaactacaaagctacatttttacttgcttgtagccgtttttgtttgcctttgggattcgggctttggctgtgcccatgctaggatttagctgtgtcatttttatgatgtctgtaacaacccaacaaggtaactgaagctccagagttaaggtttcagatttctaaatgaaactatctttttcaattacatcctgacttgtatagacacagccaaaaagaaactgttaatagccatccgtccatgtaactctgtattttactaaggtaccaatagctctttcatagacttgtgctacaagaaggttaaaagaccagttttattttcagcattcctcatgcatttcagtggtaaccaaaaaataatttgtcaattaatagttgtgtgccaagcactcctaatttgttttattgcgtgtgtgtgcatgtgtgtatgtgtatcacaggtaataaaggcaattggatgatatctgtaggaggaaaacaatgactaatttcttccttttgaaatctttcattgatgcacatttattatgtaagatgttctgtcttgatttctgttcttagtgatgattagtatatgaatatctttctgaatttttgtaattctcgccttcacactaggatgacagactcagctaatgtttccttgtcctgaaggtttgaatggagttgaaagttttacataagtgaaaaagaaagtttatcttgggagttgagttgtcaagagaattataatttatgaatttaagtggtattcttttctgtattaatatattagcagatatttggtcttaactacaacatagctttgtttgtaaacttaccagtatgtcttgattcttttcaatgtttcttgatagcacatggcaataccatcatcctaataacagaagatcttgcaaagaatcacagagcttaatgggtcaagaagttgaatttggggaaaatatcctgaaactcactttggtcaaatgattattgtgttgtcactggaagtactgtcaaagactttgggggtctaactaaaatggccaaagttccaacttccttaaatttcagacctgactgtaatggcctcaagatagagagatacccttataagagtaaagaattaagatgatagtcaacccaatatttctactacattctttaaacaggaaattaaacactgcaaaaggagtgttcgtggcagtgttcctctgacccctgacctgtcatgagttttctctgctctgacattccttatacatccagtgaacaaagctggaatagaaaacctgtttaaaaccatcacaacagcaatatttttattctgggccacctctcgactggcactcatcccatggtaaaatattcaagtaactaagacaacagcatggcatttatttgtgtgagtgtttatatagaaatgaacatagacctggccagtaaaaggctctgaggaggcttaaagtacctagtttgagtggagttatcaagtgaggtccaggtagcctgcaacactggaaatgagttctgggtaagtgagttataagagtacatgctctagtaactctggtagtcactgtgactcgggcatgtttccctgaagttaaaatagtttttagaactttttgtttaattctgaagaaaacaatatatatggtttacttctcgaacattggttatgacaagggccataaattgctaatataaagaagttagtagtattgagtggatacaatgaatggggaatcacatgtgtagagccccaacttagattgccttctgggaaatcccgcgatactaaaatccagtgagctttgggagatcattccctaaaggtatgtgggttgtctgaagtcagaaacatatttacaaagtccttctacccactatcaaaaatgaactgatctgcattcagcaggaaaaggggaagacaggaatgtaaaactactagatcatatggtattgtgattttctttcccctgctaggaaaaaattgcactgaaatgctgacaaaaaataatgaaatgaagtggcttccaaaatatgcactgatgttatcctttgtatttataggcacagttatcttactgaaaatgcatgcatggtgaattaaaataaaagggggaacaatgcacaaat

SEQ ID NO: 23102 - DNA, 2313 bp, Homo sapiens
  source 1..2313: mol_type = unassigned DNA
agcaattgctgcttactcgtaggtaggaggaggagtttctcagacctaggtgatggaggaagactgggaggcgctaaaatgagacagacggagtcccctctcctgtccacaaactacaatgcctacaatgcctcggtgtcagcatttactgtgattcaagcactgtgctaaagtgtttttcatatgtcatgaaaagttgtgccagaaaattatggtttgaacatgggcagttttctcctaccgtcagctatatccacaagcatcacatgaagtggagatctggcagctctgtgtatttcagtcaagttccacaatgaaacctgacaataatggtaaaaaccaatacggacatctgagtaactggggaattggcctgccttgcatgtgagcttgatggaagattggatatagacgagttgattatattttatgaagtagcagctcactaccatccaccatccagggtttaaactactttttcagcatcacttcacctgtggactcttatacattttgatttcttgggggaaaaatactgggataagaggaggtcattttttaataagttagcatccttttccctttcttacaagttgatccaaaggataaggctgtgactccattggattgcacctttaaatcaaaatagcagcagcagaagaaagggacaatggctctgagtggaaactgtagtcgttattatcctcgagaacaagggtccgcagttcccaactccttccctgaggtggtagagctgaatgtcgggggtcaagtttattttactcgccattccacattgataagcatccctcattccctcctgtggaaaatgttttccccaaagagagacacggctaatgatctagccaaggactccaagggaaggtttttcattgacagagatggattcttgttccgttatattctggactatctcagggacaggcaggtggtcctgcctgatcactttccagaaaaaggaagactgaaaagggaagctgaatacttccagctcccagacttggtcaaactcctgacccccgatgaaatcaagcaaagcccagatgaattctgccacagtgactttgaagatgcctcccaaggaagcgacacaagaatctgccccccttcctccctgctccctgccgaccgcaagtggggtttcattactgtgggttacagaggatcctgcaccttgggcagagagggacaggcagatgccaagtttcggagagttccccggattttggtttgtggaaggatttccttggcaaaagaagtctttggagaaactttgaatgaaagcagagaccctgatcgagccccagaaagatacacctccagattttatctcaaattcaagcacctggaaagggcttttgatatgttgtcagagtgtggattccacatggtggcctgtaactcatcggtgacagcatctttcatcaaccaatatacagatgacaagatctggtcaagctacactgaatatgtcttctaccgtgagccttccagatggtcaccctcacactgcgattgctgctgcaagaatggcaaaggtgacaaagaaggggagagcggcacgtcttgcaatgacctctccacatctagctgcgacagccagtctgaggccagctctccccaggagacggtcatctgtggtcccgtgacacgccagaccaacatccagactctggaccgtcccatcaagaagggccctgtccagctgatccaacagtcagagatgcggcggaaaagcgacttactccggactctgacttcaggctccagggaatcgaacatgagcagcaaaaaaaaagctgttaaagaaaagctctcaattgaggaggagctggagaaatgtatccaggatttcctaaaaatcaaaattccagatcggtttcctgagagaaaacatccttggcaatctgaacttttaaggaagtatcatctataagggagggctgggggcgggaaaagaaaaaaaaaagtcattttgaaattaacctcctaaaaggaattcatattttaaaggaaaaaaatacaactaatgatgcacatttcttagaacacaatagtccattgatatactactgcctactttacctagttcaccttaacatgtaaatccacagggtagatttctttctagatgtggaagtacaagaaaatcttttttagttatttgtttgtttacttcgtcccatgtgctaactatcttatatataatgagagccagctacgtaaaagtagctgagaggccttgggagtcatttatcccaaactgggttttttctctcatccttctacctc

SEQ ID NO: 23103 - DNA, 3696 bp, Homo sapiens
  source 1..3696: mol_type = unassigned DNA
tctccctgccgagaaatgggccggcccggctgcgcgcgggcagcagcggtggcggcggcggtccaagatggcggaactgcagctggacccggcgatggcggggctgggagggggcggcgggagtggggtgggcgacgggggtggcccagtccgcgggccccccagcccacgcccggctggccccacgccccgcgggcacggccgcccggctgccgccgtcgcgcagccgctggagccgggtcccggaccacccgagcgggcagggggcggcggcgcggcccgctgggtcaggctgaacgtgggaggcacctacttcgtgaccaccagacagaccttaggccgggagcccaagtcatttctctgccgcctctgctgccaggaggacccggagctggactcagacaaggatgagacaggagcctatctgattgacagggaccccacctactttggtcctatcctcaactacctccgccacgggaaactcatcatcactaaggagttggcagaagaaggtgtgctggaggaagcggagttttacaacatcgcgtcccttgtgcggctggttaaggaaaggatacgggacaatgagaacagaacttcacaaggccccgtgaagcacgtgtacagagtcctgcagtgtcaggaagaagagctcacgcagatggtgtccacgatgtccgacggctggaaattcgaacagctcatcagcatcggatcttcctataactacggcaatgaggatcaggcagaattcctctgtgttgtctccagagaactaaataattctaccaatggcatcgtcatagagccgagcgaaaaggcgaagattcttcaggagagaggatcgcggatgtaaactaagaccccgaaaactccagaccttcaggagagcagtcagcagagcccctctgtgaagtgaaacctcactcctgtccagtgaccgagccactgcaaagcacagctgatcctggccccctgtgaagaagtgttctggtcaaaactaaaggaactccctccccacctgcaggactccgaagacagtgcgacttctggctgcagaataccttttcagaaacctgctttcatttgcttagccagtattagaacagatctttacaacagcagctgggctgggttcccagtcggagcctttcggggatctgggggatgagggcggaaggcctagctccttggaaatggcctgtactttaaggacgctggagccaagaggattgttcccgtgccgtgccatggtttcaccctatgtgtgccacaatggacgttagcagctgcttcggaacaccgtccctcctatgcaccctccaagacgtgcagcagatgcaaagggttctagctgcagtttgtcgaattgaggttttaggtaaagcatagagttgccagagtaccccgcattcccatgaatagagcctccaaggaaagggaggatggggtgtcctttgttgtggttggaggttggtgatcattgctctggatttggggctcccggctgccaccacatgcagctttgcctcacctttctccagcagccgggaccctctggagagcttgttttccctccaagaagaggtttgagacaggcggcatcctgcactgagtcagacaagtgggagctgtaggaactgcacctgcagcctcttcttactccccattgaccctgtcttccttccctggctttttcaactggaccaaagatgaaggcacttatggaccctttgatggcttggagtggggaaggctgtttctttgaaagttgccaaatgtgttatgttgtgtctcagagagagttatttctgtgactctcttggaaatgccttgactgaatgtgcaatatttgtgtctcttggtttctaaccttggcggacctgctcccctctgtactgtccccagtggtatgtatgtatgtgctaggcagtctggggaccccctgtgtctctgaccacccccctgacccccgccattactttcttttctggagtgccatgctggcgaggatccggatgcggcagcaccctctttcgggctgcatccacagagtttgtgtccacactttctctccgagcatgtgggtctcgctgagcagtcatggaatgcggtagagccaggggaccctgtctgccccgaataactttcagtagtatggcagatggcacagagaaagggaaggggctctggggacttctccttctatgaaagcctcctcgagccaggtgctcctgggcaccttcagaagtgatgtcctgtgtgctccacagctcacctgcttgccaaggtacgtctgggtagtagtttctggaaatgactgcagactgtgccaaatgtcttttgagcttctgacctgaccatgcccagatggcataacttttccctaggaccctcagtctccttgtttctctgtatctgtagcatagcatagaacccggtatacaggggtttctgctgacacatcaacgtctacacacctatgcgccacattttacagctgtaaagtgttagatgaactgccgtcctcagtaaaagcagccaccccttcaagagtcacaggcatccatccagtcgtatctttcagagaaaaaaaaagttagatgtagccaaggaaagtagtgatcacgggaaggactgctctgagccgggtaggatggaggactttggaagaggcgctccttggccaggtccaatgagtaacatcagactgacagaggaaaagcagcttggtttgcggccttgtgcccagtctcgttgaggcgcttgtccctgtctgctttcctggggcatgcctgatcagcgtgggctggagctcctagaccaaccccagctttctcaccaggttcagcaaggaggcctgggggtcagacaccaatgttgagcacctcctgagggcgccgtttccttcattcctcttagattccatagttgccgccatgaaaagactgctcttgagccccaaggcacaggcacgtgctctgggaaatagacaggagtggtatttccgccctctcggagggctggtgttcaccaagtttccctcctcgctgcaacccaatgacacctgtattgttccagcgctccaggactctgggttcttaagatttctgggagcgttgttcacccaccccctttaggaaccaggctggtgttcttgcttgaaagcgttgtgccctctgagtgtctggctgatcacatcagagaggtctgcgtggcagtttggggctgtcacgtgaccagtgacccacactctctgctgcccagtactgccaagtggggagggtcctgcctttttctctgccccaggtctgggacgcaggtgatgccagccaggcccaggagtgcccagcatcccccaactgatgacacagtagcactgattctgtcttttcctcagaatctggcctttttccatggcaatgaggtggggcccagcctcctctaaagtgactttgtttctgcacagttgtaactgctcttggggatgtcagtgaggctgggagcagggagccacgggatgctgagagaggaggcccgagaggacaccccaccctccagcgtggcctttgatccagacttagggacgaggctgtcactggtgggcaccctctgttcctgtttgtgtgtttgaatagtctgaaatgctgtgactttttttgtgtgaataaagatatgaaacttctgaatctc

SEQ ID NO: 23104 - DNA, 3575 bp, Homo sapiens
  source 1..3575: mol_type = unassigned DNA
tccctgccgagaaatgggccggcccggctgcgcgcgggcagcagcggtggcggcggcggtccaagatggcggaactgcagctggacccggcgatggcggggctgggagggggcgccgggtcccggaccacccgagcgggcagggggcggcggcgcggcccgctgggtcaggctgaacgtgggaggcacctacttcgtgaccaccagacagaccttaggccgggagcccaagtcatttctctgccgcctctgctgccaggaggacccggagctggactcagacaaggatgagacaggagcctatctgattgacagggaccccacctactttggtcctatcctcaactacctccgccacgggaaactcatcatcactaaggagttggcagaagaaggtgtgctggaggaagcggagttttacaacatcgcgtcccttgtgcggctggttaaggaaaggatacgggacaatgagaacagaacttcacaaggccccgtgaagcacgtgtacagagtcctgcagtgtcaggaagaagagctcacgcagatggtgtccacgatgtccgacggctggaaattcgaacagctcatcagcatcggatcttcctataactacggcaatgaggatcaggcagaattcctctgtgttgtctccagagaactaaataattctaccaatggcatcgtcatagagccgagcgaaaaggcgaagattcttcaggagagaggatcgcggatgtaaactaagaccccgaaaactccagaccttcaggagagcagtcagcagagcccctctgtgaagtgaaacctcactcctgtccagtgaccgagccactgcaaagcacagctgatcctggccccctgtgaagaagtgttctggtcaaaactaaaggaactccctccccacctgcaggactccgaagacagtgcgacttctggctgcagaataccttttcagaaacctgctttcatttgcttagccagtattagaacagatctttacaacagcagctgggctgggttcccagtcggagcctttcggggatctgggggatgagggcggaaggcctagctccttggaaatggcctgtactttaaggacgctggagccaagaggattgttcccgtgccgtgccatggtttcaccctatgtgtgccacaatggacgttagcagctgcttcggaacaccgtccctcctatgcaccctccaagacgtgcagcagatgcaaagggttctagctgcagtttgtcgaattgaggttttaggtaaagcatagagttgccagagtaccccgcattcccatgaatagagcctccaaggaaagggaggatggggtgtcctttgttgtggttggaggttggtgatcattgctctggatttggggctcccggctgccaccacatgcagctttgcctcacctttctccagcagccgggaccctctggagagcttgttttccctccaagaagaggtttgagacaggcggcatcctgcactgagtcagacaagtgggagctgtaggaactgcacctgcagcctcttcttactccccattgaccctgtcttccttccctggctttttcaactggaccaaagatgaaggcacttatggaccctttgatggcttggagtggggaaggctgtttctttgaaagttgccaaatgtgttatgttgtgtctcagagagagttatttctgtgactctcttggaaatgccttgactgaatgtgcaatatttgtgtctcttggtttctaaccttggcggacctgctcccctctgtactgtccccagtggtatgtatgtatgtgctaggcagtctggggaccccctgtgtctctgaccacccccctgacccccgccattactttcttttctggagtgccatgctggcgaggatccggatgcggcagcaccctctttcgggctgcatccacagagtttgtgtccacactttctctccgagcatgtgggtctcgctgagcagtcatggaatgcggtagagccaggggaccctgtctgccccgaataactttcagtagtatggcagatggcacagagaaagggaaggggctctggggacttctccttctatgaaagcctcctcgagccaggtgctcctgggcaccttcagaagtgatgtcctgtgtgctccacagctcacctgcttgccaaggtacgtctgggtagtagtttctggaaatgactgcagactgtgccaaatgtcttttgagcttctgacctgaccatgcccagatggcataacttttccctaggaccctcagtctccttgtttctctgtatctgtagcatagcatagaacccggtatacaggggtttctgctgacacatcaacgtctacacacctatgcgccacattttacagctgtaaagtgttagatgaactgccgtcctcagtaaaagcagccaccccttcaagagtcacaggcatccatccagtcgtatctttcagagaaaaaaaaagttagatgtagccaaggaaagtagtgatcacgggaaggactgctctgagccgggtaggatggaggactttggaagaggcgctccttggccaggtccaatgagtaacatcagactgacagaggaaaagcagcttggtttgcggccttgtgcccagtctcgttgaggcgcttgtccctgtctgctttcctggggcatgcctgatcagcgtgggctggagctcctagaccaaccccagctttctcaccaggttcagcaaggaggcctgggggtcagacaccaatgttgagcacctcctgagggcgccgtttccttcattcctcttagattccatagttgccgccatgaaaagactgctcttgagccccaaggcacaggcacgtgctctgggaaatagacaggagtggtatttccgccctctcggagggctggtgttcaccaagtttccctcctcgctgcaacccaatgacacctgtattgttccagcgctccaggactctgggttcttaagatttctgggagcgttgttcacccaccccctttaggaaccaggctggtgttcttgcttgaaagcgttgtgccctctgagtgtctggctgatcacatcagagaggtctgcgtggcagtttggggctgtcacgtgaccagtgacccacactctctgctgcccagtactgccaagtggggagggtcctgcctttttctctgccccaggtctgggacgcaggtgatgccagccaggcccaggagtgcccagcatcccccaactgatgacacagtagcactgattctgtcttttcctcagaatctggcctttttccatggcaatgaggtggggcccagcctcctctaaagtgactttgtttctgcacagttgtaactgctcttggggatgtcagtgaggctgggagcagggagccacgggatgctgagagaggaggcccgagaggacaccccaccctccagcgtggcctttgatccagacttagggacgaggctgtcactggtgggcaccctctgttcctgtttgtgtgtttgaatagtctgaaatgctgtgactttttttgtgtgaataaagatatgaaacttctgaatctc

SEQ ID NO: 23105 - DNA, 3855 bp, Homo sapiens
  source 1..3855: mol_type = unassigned DNA
gtcggtggcagcggagcacggagaagaggcccgggcggcccggcggcctggaggccgcgaaaggtggaggccgggccgcccttgtgcaccgcaggattgacccgggaaggggcagaagctagcgagccccgcccggccgccgggaaggtgggggaagccccgtgcaccccccgccctccggccgccgccgccccgctggccctgcagccgtcgccgctgcctcgggctacagccccgggctcggcggtcccggctggggaaggagggcggcgagcgcgtccggagccgccggagatggcgggagggcactgcggcagcttccccgcggcggcggccggcagcggcgagatcgtccaactgaacgtaggggggaccagatttagtacctcaagacaaactcttatgtggattccagattcttttttttccagtttgctgagtgggagaatttcaacacttcgagatgaaactggtgctatatttattgatagagatccagcagcatttgcacccattttaaattttcttcggacaaaagaactagacttaaggggagtgagtattaatgttctcaggcatgaagcagaattttacgggatcactccattagtaagaaggcttctcttatgtgaagaattggagcgttcctcttgtggcagtgtcctttttcatggttacttgcccccaccaggtattcctagtcgtaaaataaacaacacagtcagatctgctgattctaggaatggtctaaattctacagaaggtgaagcccggggaaatggtacacagcctgttctctctggaacgggagaagaaactgttaggctaggatttcctgtggatccacgaaaggtgctaatagtagctggccatcacaactggattgtagctgcatatgcccattttgctgtgtgttacagaatcaaagaatcttcaggatggcagcaagtgtttacgagcccatatttggattggactatcgaacgagtagctttaaatgcaaaggtggttggagggccacatggagacaaagacaaaatggttgctgttgcctcagagagtagcatcatcttgtggagtgttcaggatgggggaagtggaagtgaaattggagtgttcagcctgggtgttcctgtagatgctctcttctttattggtaaccagttggtggccacgagtcatacagggaaagtgggagtgtggaatgctgtcactcagcactggcaggttcaagatgttgttcctataactagttatgacactgctggatcattccttctgcttggatgtaacaatggatcaatatattacatagatatgcagaagttccccttgcgaatgaaagataatgatcttcttgtaactgaactgtatcatgatccttcaaatgatgctattactgctctgagtgtttacctcacacccaaaacaagtgtcagtggtaactggatcgagatcgcctatggtacgagctctggagcagtacgagtgattgtacaacacccagagacagttgggtcaggtcctcagctttttcagactttcacagttcaccgaagtcccgtaacaaaaatcatgctatcagagaagcatcttgtatcagtctgtgcagataataatcatgtccggacgtggacagtaacacgattcagaggaatgatctctactcagccaggttctactcctttagcgtcattcaagatactatccctggaggagacagaaagtcatggtagctattcctctggaaatgacataggaccttttggagagcgagacgatcaacaggtgtttatccagaaagttgttcccatcaccaacaaactatttgtaagactctcatcgactggaaaaagaatatgtgagatccaggctgttgactgtactacaatatcctcatttacagtgagggaatgtgagggatccagtaggatgggctcaagaccaaggcgctacttgttcacaggccatacaaatggcagtattcaaatgtgggatctgaccactgctatggatatggttaacaaaagtgaagataaggatgtaggtggtccaaccgaagaagagctactcaaattactcgatcaatgtgatttgagcacatctcgctgtgctactcctaacatcagtccagcaacttccgtagttcagcatagccacttacgagaatcaaattctagccttcagcttcagcaccatgataccacccatgaagcagctacttacggttccatgaggccttacagagaaagtcctttattagcaagggcaagaaggactgagagctttcacagttatagggacttccagactattaatttgaacagaaatgtagaaagagctgtccctgaaaatggtaacttgggtccaatacaagctgaagtgaaaggggcaacaggggaatgtaatatatctgagagaaagtctcctggagtagaaataaaaagtttgagagaattggatagtggattggaagtgcataaaatagctgaaggtttttcagaatccaagaaaaggtcatcagaagatgaaaatgaaaataaaatagagtttaggaagaaaggaggatttgaagggggaggattccttggaagaaagaaagttccctatctggcgtcatcaccaagtacttccgatggaggaactgactcacctggtactgcgtccccatctcctacaaagactactccatctcctcggcataaaaaaagtgattcttcaggtcaggagtacagcttgtgaaaactcaccaaaatgaatagttgtttcgttacatttagatgaaagttaaactttactgaatttcagtacattagtttttacactaaaactttacaagataaaattggacttcatttagtatctttttaacagaattacttggaataatgagatacaataatcatatctcttttgacattttggaaatttttttaattttacaagtacatttaacagatcatttataaagcaggagtccattttaacacttaccgactttttttggtttggaaacatattaccacgtcttaataggatggtgcccatataggtgagcatccctttagatcatgggaaccagcagactgcattcctaatcttcattatgcctgagacttgtcttacaatgttacctttaagtgaatcacataattgtctttggaacttggtctcccaacacttattgtgattgcaaagtgtttaccagatatttgatgaggtgctatgtttgtgaaaaacatatcatgtaattcaaaaacactattgatattgaataccagataccactatgtagtaagtcttttaggatgattttaatttagtcgtgcgtcattttctgattctcatcattgggagatcttaaatcttagcaagcattagcaatattaaatgccaaaattccattgaaactttcaagttggagcaattgtctgtgtttgaaaagatgaaataaaaataataatcaagggcaaagctttgagtgcccagaagggaaagctgtaccagttgctaacctgtcttgtttcaggagccaccatgtttttttttcagtgttaacaacaatcatgataattaaattaaaacactagtttgttcacttgtaggactgcagttctgaattttgggttaaaggttttggctgctgtaagaatgtgaatttgaatgtattttgaattgtaagagcaaaagaacgtttttgtacaattttttttcatttaattggaatgatcttcaggtttctacaaatagggtaattgtaaatttaaagcattagcatttattggtgaataatgtatatatccccattccaagaaatataagtgagtgaagttgaaataaaatctttaaaattta

SEQ ID NO: 23106 - DNA, 1017 bp, Homo sapiens
  source 1..1017: mol_type = unassigned DNA
gtcggtggcagcggagcacggagaagaggcccgggcggcccggcggcctggaggccgcgaaaggtggaggccgggccgcccttgtgcaccgcaggattgacccgggaaggggcagaagctagcgagccccgcccggccgccgggaaggtgggggaagccccgtgcaccccccgccctccggccgccgccgccccgctggccctgcagccgtcgccgctgcctcgggctacagccccgggctcggcggtcccggctggggaaggagggcggcgagcgcgtccggagccgccggagatggcgggagggcactgcggcagcttccccgcggcggcggccggcagcggcgagatcgtccaactgaacgtaggggggaccagatttagtacctcaagacaaactcttatgtggattccagattcttttttttccagtttgctgagtgggagaatttcaacacttcgagatgaaactggtgctatatttattgatagagatccagcagcatttgcacccattttaaattttcttcggacaaaagaactagacttaaggggagtgagtattaatgttctcaggcatgaagcagaattttacgggatcactccattagtaagaaggcttctcttatgtgaagaattggagcgttcctcttgtggcagtgtcctttttcatggttacttgcccccaccaggtattcctagtcgtaaaataaacaacacagtcagatctgctgattctaggaatggtctaaattctacagaaggtgaagcccggggaaatggtacacagcctgttctctctggaacgggagaagaaactgttaggctaggatttcctgtggatccacgaaaggtgctaatagtagctggccatcacaactggattgtagctgcatatgcccattttgctgtgtgttacagagtgttttggctgggcacggtgggtcacgcctgtaatcccagcactttgggaggccgagatgggtggagttcaagatcagcccgaccaacatggtga

SEQ ID NO: 23107 - DNA, 1905 bp, Homo sapiens
  source 1..1905: mol_type = unassigned DNA
gtcggtggcagcggagcacggagaagaggcccgggcggcccggcggcctggaggccgcgaaaggtggaggccgggccgcccttgtgcaccgcaggattgacccgggaaggggcagaagctagcgagccccgcccggccgccgggaaggtgggggaagccccgtgcaccccccgccctccggccgccgccgccccgctggccctgcagccgtcgccgctgcctcgggctacagccccgggctcggcggtcccggctggggaaggagggcggcgagcgcgtccggagccgccggagatggcgggagggcactgcggcagcttccccgcggcggcggccggcagcggcgagatcgtccaactgaacgtaggggggaccagatttagtacctcaagacaaactcttatgtggattccagattcttttttttccagtttgctgagtgggagaatttcaacacttcgagatgaaactggtgctatatttattgatagagatccagcagcatttgcacccattttaaattttcttcggacaaaagaactagacttaaggggagtgagtattaatgttctcaggcatgaagcagaattttacgggatcactccattagtaagaaggcttctcttatgtgaagaattggagcgttcctcttgtggcagtgtcctttttcatggttacttgcccccaccaggtattcctagtcgtaaaataaacaacacagtcagatctgctgattctaggaatggtctaaattctacagaaggtgaagcccggggaaatggtacacagcctgttctctctggaacgggagaagaaactgttaggctaggatttcctgtggatccacgaaaggtgctaatagtagctggccatcacaactggattgtagctgcatatgcccattttgctgtgtgttacagaatcaaagaatcttcaggatggcagcaagtgtttacgagcccatatttggattggactatcgaacgagtagctttaaatgcaaaggtggttggagggccacatggagacaaagacaaaatggttgctgttgcctcagagagtagcatcatcttgtggagtgttcaggatgggggaagtggaagtgaaattggagtgttcagcctgggtgttcctgtagatgctctcttctttattggtaaccagttggtggccacgagtcatacagggaaagtgggagtgtggaatgctgtcactcagcactggcaggttcaagatgttgttcctataactagttatgacactgctggatcattccttctgcttggatgtaacaatggatcaatatattacatagatatgcagaagttccccttgcgaatgaaagataatgatcttcttgtaactgaactgtatcatgatccttcaaatgatgctattactgctctgagtgtttacctcacacccaaaacaagtgtcagtggtaactggatcgagatcgcctatggtacgagctctggagcagtacgagtgattgtacaacacccagagacagttgggtcaggtcctcagctttttcagactttcacagttcaccgaagtcccgtaacaaaaatcatgctatcagagaagcatcttgtatcagtctgtgcagataataatcatgtccggacgtggacagtaacacgattcagaggaatgatctctactcagccaggttctactcctttagcgtcattcaagatactatccctggaggagacagaaagtcatggtagctattcctctggaaatgacataggaccttttggagagcgagacgatcaacaggtgtttatccagaaagttgttcccatcaccaacaaactatttgtaagactctcatcgactggaaaaagtctgtgtggtgtcagtttggtttctagatccagccaagagcccacataa

SEQ ID NO: 23108 - DNA, 751 bp, Homo sapiens
  source 1..751: mol_type = unassigned DNA
atttagtacctcaagacaaactcttatgtggattccagattcttttttttccagtttgctgagtgggagaatttcaacacttcgagatgaaactggtgctatatttattgatagagatccagcagcatttgcacccattttaaattttcttcggacaaaagaactagacttaaggggagtgagtattaatgttctcaggcatgaagcagaattttacgggatcactccattagtaagaaggcttctcttatgtgaagaattggagcgttcctcttgtggcagtgtcctttttcatggttacttgcccccaccaggtattcctagtcgtaaaataaacaacacagtcagatctgctgattctaggaatggtctaaattctacagaaggtgaagcccggggaaatggtacacagcctgttctctctggaacgggagaagaaactgttaggctaggatttcctgtggatccacgaaaggtgctaatagtagctggccatcacaactggattgtagctgcatatgcccattttgctgtgtgttacagagtgttttggctgggcacggtgggtcacgcctgtaatcccagcactttgggaggccgagatgggtggagttcaagatcagcccgaccaacatggtgaaaccccatctctactgaagatacaaaaattagccaggtgtggtgatgcatgcctgtaatcccagctactcgggaggctgaggcaggagaatcacttgaacccaggaggtgg

SEQ ID NO: 23109 - DNA, 589 bp, Homo sapiens
  source 1..589: mol_type = unassigned DNA
tgctctgagtgtttacctcacacccaaaacaagtgtcagtggtaactggatcgagatcgcctatggtacgagctctggagcagtacgagtgattgtacaacacccagagacagttgggtcaggtcctcagctttttcagactttcacagttcaccgaagtcccgtaacaaaaatcatgctatcagagaagcatcttgtatcagtctgtgcagataataatcatgtccggacgtggacagtaacacgattcagaggaatgatctctactcagccaggttctactcctttagcgtcattcaagatactatccctggaggagacagaaagtcatggtagctattcctctggaaatgacataggaccttttggagagcgagacgatcaacaggtgtttatccagaaagttgttcccatcaccaacaaactatttgtaagactctcatcgactggaaaaagtctgtgtggtgtcagtttggtttctagatccagccaagagcccacataactaaaagggcatttggagaatatgtgagatccaggctgttgactgtactacaatatcctcatttacagtgagggaatgtgaggg

SEQ ID NO: 23110 - DNA, 4873 bp, Homo sapiens
  source 1..4873: mol_type = unassigned DNA
agctgggcgcgagcgggtcggcgttgagggagccaccgccctcccgcctgcgcactgcctctcgcccccctccggccagcccgcagccggccgcgtcatgccaggcgctgctcggcggtagggagtgcccggggccgccgcctccgcccgcccgaagccgcgcccactgcccagagccagagggatggtggtagtcacggggcgggagccagacagccgtcgtcaggacggtgccatgtccagctctgacgccgaagacgactttctggagccggccacgccgacggccacgcaggcggggcacgcgctgcccctgctgccacaggagtttcctgaggttgttccccttaacatcggaggggctcacttcactacacgcctgtccacactgcggtgctacgaagacaccatgttggcagccatgttcagtgggcggcactacatccccacggactccgagggccggtacttcatcgaccgagatggcacacactttggagatgtgctgaatttcctgcgctcaggggacctcccacccagggagcgtgttcgagctgtgtacaaagaggcccagtactatgccatcgggcccctcctggagcagctggagaacatgcagccactgaagggcgagaaggtgcgccaagcgtttctgggactcatgccctattacaaagaccacttggagcggattgtggagatcgcccggctgcgtgcggtccagcggaaggcccgctttgccaagctcaaggtctgtgtcttcaaggaggagatgcccatcaccccctatgagtgtccgctcctcaactccctgcgatttgagcggagtgagagtgacgggcagctttttgagcaccactgtgaagtggatgtgtcttttgggccctgggaggctgtggctgatgtttatgacctgctgcactgcctggtcacggacctctcggcccagggtctcaccgtggaccaccagtgcatcggggtgtgtgacaagcacctcgtgaaccactactactgcaagcgccccatctatgagttcaagatcacatggtggtgagtagccccggtaggcgagagtcccatcagggaggatgtccaccttgcttggtggctctgggagtaagatccctgaaggggctgctgactgccccagaatctgccgaggtgagaacagcatcctgaggcacagctcccaggggacagaggtgtagctccaatctccctgactgcacctcagggttgggctcagggcttgcggcctgcaggcactccagccagcgctcacctggcctttcctcaaggcatggtagtctttccttgaggctgatagctagggcttgaccaggaagtcccgagaagttttgtcaccttcttgaccttgcaagagagtttctgcccattttagagccacgttaccaaatcgatgtaggcctaatcacttcctcaaccctgttcaagcgtccctcccttgtgctcagtatattggtgtgaacacggaacatgatgggggatttacctgaccagccaccccatagcccctggctgaagaagaaagagcatcttctctcccactgcaccccttctcctccaagaatagttgcccacattcccaaaatgtggaaagacttttcttttccttccggaacatgttcttcaccaccttttggagatttaaccatagctgccaaagctatgcacccagttggccttagaaaaccacaatgtttacagccctgtcttagggccgcggcttctcttatcttccaccaccttccttgcttgcagggttatcttctcacagggctggaatgcaaatttcagaggcttcttttgaagattccccaagtcaagcaggcaagatgcctagatcttctgttatctttgacatgtaacatcctttttagaggctcagaacacctccttggctgctatctcatgtgttagaatccagtttgtggtgaacctctttggaaggggaccccctctctttaaaccctgttcctctgtcctggtaacattctccttctaggagagcctctcttctgagaaggtaaaggaagggctgggtgagacacacagctatcctaggagccgtaggaagacaaaacttcccttttgttttactcctcactcctctatttttgttttactcacttctttatattttgttttactcctcactcctgtatattttggtttacttactcctctatttcagaaattgaaaaagatccccaaggatctgttactactgcatttccttcttgctctgtctacagcctaggccaactagtcagggtctggacatgcatctcctaaaggaagaactgtgtagcaccattgatcacaatgtaacatttccatgctgcattaagggtgtctctctctaatcatgattgtacctgtctcttcctgggtaaagggagatttttttttttaatgtgtaaagaattgatgcgagccaggaacatgtctgtagtcccagctacttgggcacacgcctgtagtccaggccactcgagcacacacctgtagtaccagctactctggaggctgaggcaggaggatcacttgagcccaggagattaagactgtagtatactatgatcgtgcctgtggctagccactgtgctccagcctgggcaacaccatcgtaaaaataaataaataaataaataaattggggaggacagcctcactggtatcagacttacaggaccagatagacaagatgggtataaggggagctgaagtctgtgttcatatgaggaagagaagaccaagccctgggactttggctgaattcctccgtggggctggacggcagtgatctcctgttccctatgtgtaaacaaagattccagggcgtggttttgcactcctgttgtactcttttagaggtggaaaagaggtggatactgagatctaagaggaaaggatagtcattcacgttctgagatatgcgctctctctattgttctcgtacacaaagggatagtctcttttctggagctgatgtccctgcttggaggttagccccaaaacatggctcttgtattgttctaagagaaaaggctttcattttggttcttctgattggtgttacctactgcctaatatgtgttcattttttgacagagaggcagactattgaaaaagtctgtgtgaacagagagcagttcattaagcccattgctttcagtaatgtggccttgaccccttctgcttcccccttctcccatggagcatggcagggcttggttatttagagtccatacatgcaagccattgagagacttgtttgctcaaatgcaagtttgctcaaaaacaggtcctgaaggcttgcttaggattacagggatgctgggtaagaacaccgttcctctctctcgctggagaaatccctgtttctctgactccctttgtgatcctcacagtaatgtattctgtgccactgtaggacacaaggctctgggccagtagaacaggcagagaggtgacactgggcagcaagctgagagctctttctaaatggagtgaaggaattcagtggcctagtttcgccattctctaatgagaaaccaaggccaggctgaaaagtgcaattagatgtggtggattgtggtaacggcctccagataaaggggttatccctgtggaagtgacttttccccatttgatcccttttcaactctaaatggccaggcccagaacagaagaagggttgggtctggaaggaaggctccaaaggatgaaagcttctccctgatcataaggaagtgcatctttatagaattgttgtgcataatgtcagtaaatccctctcacttgacaagggactggattcatcttgccttgagacgggccagtagttatcagtgagtcaaagcaaagtgaaagtttcaggagatgggaccaatggtgcaatgctcgccataacaaaattccttaaaaataaaaaagctaatgttatagcaacaaaaaaagactgaagcaaaaccacactgaaatgcatcccactccaggagaggaattcttagcgtaacactctaaataaatggaaggaatcatcaccttccttattttacctctgccttgttcaccaggctgcccagtgcttaccatgcagaaagcagtcagctgtactctggaagtttctgttcttctttcctggggcttaggatattctgggagctgtctgagccttgtgcctaaggcttatcaggtgatataatcttcctgttctgggctgcttgctggaggaataggaagtgacatttataagacacaggcggtgtgagcatccatgtgtggtcttggtctaaaccagctcttgaacaggttaaagcaaacagcaataacaaaacaaaaactactgatgctgagcgttttgatcctagtaatatttcaaatattgtccttctgcatatgttctatccatatttgattccaatatacattattaagctttcttgggtactattttgctggggctcttgcgtgaaggtggtacctgtctcatgatccttaaaagagagaggcttttttcatccaaagctgtagtgttgggaactggggtgggagaggcactttttggaattctgaaagaatcatatctgtgtatatacatactgagtggggaaggatgggggttggcaggggttgagggaggtgggaacaaacagtgagtatgggaacaggcagtcacctcgagtgtgggaggtcacctgggtccgtcgtcttccttctgtatggtgttgggtttatgtacacactataacacttcctgtgtgagttcatgtacctgtctgtgagtgctttggtgtattgagcctcagtacactccaagggcattaaagtcaagaactagaacctg

SEQ ID NO: 23111 - DNA, 4042 bp, Homo sapiens
  source 1..4042: mol_type = unassigned DNA
aacgtgcgttcgctggcggtgccgggggcggggcgagcaggagggtgggtgtgaggcgggagctggccgcggagcccagacctacccgggcgaagcgggcgagcggtggtttggacgccggcggagacgcgggcgagtggttagcaggaagaagatgagccttaagtctgaacgccgaggaattcatgtggatcaatcggatctcctgtgcaagaaaggatgtggttactacggcaaccctgcctggcagggtttctgctccaagtgctggagggaagagtaccacaaagccaggcagaagcagattcaggaggactgggagctggcggagcgggtcttgctctgttaccctggctggagtgcaatggtgcaatttcaacttactgcaacctctgcttcctgggctcaagtgatcctcctgcttcagcctcccaatgtgctgggattacaggcactccagcgggaggaagaagaggcctttgccagcagtcagagcagccaaggggcccaatccctcacattctccaagtttgaagaaaagaaaaccaacgagaagacccgcaaggttaccacagtgaagaaattcttcagtgcatcttccagggtcggatcaaagaaggaaattcaggaagcaaaagctcccagtccttccataaaccggcaaaccagcattgaaacggatagagtgtctaaggagttcatagaatttctcaagaccttccacaagacaggccaagaaatctataaacagaccaagctgtttttggaaggaatgcattacaaaagggatctaagcattgaagaacagtcagagtgtgctcaggatttctaccacaatgtggccgaaaggatgcaaactcgtgggaaagagaggagatttcaccatgttggccaggctggtcttgaactcctgacctcaggcgatccacctgcctcagcctcccaaagtgctgggaatacaggagtagagccaccgcacccagctgtgcctccagaaagagtcgagaagataatggatcagattgaaaagtacatcatgactcgtctctataaatatgtattctgtccagaaactactgatgatgagaagaaagatcttgccattcaaaagagaatcagagccctgcgctgggttacgcctcagatgctgtgtgtccctgttaatgaagacatcccagaagtgtctgatatggtggtgaaggcgatcacagatatcattgaaatggattccaagcgtgtgcctcgagacaagctggcctgcatcaccaagtgcagcaagcacatcttcaatgccatcaagatcaccaagaatgagccggcgtcagcggatgacttcctccccaccctcatctacattgttttgaagggcaaccccccacgccttcagtctaatatccagtatatcacgcgcttctgcaatccaagccgactgatgactggagaggatggctactatttcaccaatctgtgctgtgctgtggctttcattgagaagctagacgcccagtctttgaatctaagtcaggaggattttgatcgctacatgtctggccagacctctcccaggaagcaagaagctgagagttggtctcctgatgcttgcttaggcgtcaagcaaatgtataagaacttggatctcttgtctcagttgaatgaacgacaagaaaggatcatgaatgaagccaagaaactggaaaaagacctcatagattggacagatggaattgcaagagaagttcaagacatcgttgagaaatacccactggaaattaagcctccgaatcaaccgttagcagctattgactctgaaaacgttgaaaatgataaacttcctccaccactgcaacctcaagtttatgcaggatgatcacaatttagtggagagtatttatttgagcctaaattgtaggtagcccttactacactcaactgattgggatctagaatgtaactaaattgcttataaatgtcagcattttttaaaggtacagtatatggggattgtttcgtttttcctagcaggggaaccttagttaataataaaatactacttatttgagttactgatacagattcatttaaggcttgtgtgcaaattttgtctcaatcttttttccctccatgattttcctatgtgcttcctctggcattcactgtggttttggtaaataattgccttttaaaggattaaacaaatgaatgctacaaagtgtatgttcaagaaaattaaatggtaccactcttccacagtttggaataattttataattgtaaagatagaaattatattgataagtaaatatgtaaaattgtaaatatgtaaaaaaaagaatggtgtctgctgtgcatggcattttatatgttaattttttagtttaaaatgaagtatattgaatgtttgcctttagcaccattttatttggtttgtcccactaaaatgactcgagaagtgtttagacaaactccccttaagatgtgcactccatctttaagaacgtgttagccttaactttgaggttctatatagtcagagactatgacaccactaaggttcagaataaagtttaggccacataaaattgctgtttaatgtagtcgatggaagactttaaactatgcttctagcttatttttccctcattcattcagcaaatctctattgagttcttcagtgagaaggagcaggcactgggcctggaatggaaggcgggaatgaatgggcctctgatggtgagaggtgacggggtccctcagctgtgagatgcaaggggcgccttgcagcctccataatatacatttgactttgcaaacgtctagacatgttttctgaacctttttcaggacatttcaacctcgggactattcatattagtggcctgagaggtgtttgttgtggggccaccctgtgcatggtagaatgttcagcagcattcctgccatccatatccattaggtgccagtagcacccccgctagagctgtgaaaaattctctccagacatagtcagatgtctcctggggccatatcacccctccgttaagaaccactgatgtcttttacaaaccaggagttatcctcctggtggttaatatggtgtaaccaaagaatcttgcactcaatgcacagtgtgatgttaactaaaacgagttaaatatttaggaggcttgacagctacctgcattgtagaaccttttcttatctcagtggaaccttctataacctaaatataccattgatgattcttcttccattcagtgacatccacagattatgcagctatacttgtgaaatcgtgcatgaggccccagggcaccgttctagaacaacgtcacttcacacaggcagctgagaaaggttctcttgcttttccagtatcttcctaaggatggagcccaaaattgcagagcagtaactttggaataaaaccagggtgggtataaaacttcttattcttaaatttacatataagatctattaagcttgacacatctgtgtcatcacgcactgaagacaggaagcagttcactgagtcagctggttcccaagctcgcacagaaggtgataagttactatcaaatgccagtgagaatcttcttatagaataacctgggcccaagtgattttagtacaaaacttgcccttctttggtttaattttctatgtgcttttaggtgtgaatccagatatgcggtcttaattcctttggaaatacacagttcgtttagttactgtacactctgtttgttcaataaactgcatatcaacttcccacaaaagctgacttttttgggtctcttacatataaagtaggttattgagttgatttttttggaggtatctcatattggtcgaattcttctggtatggactcttgccttatatagaggcttctatttctcttaagtcagcatcaatacaacggccggagtttctgtttttgcaataagaagatgttggtattttatgtagggtaaatgtgactggaatacacctttggaacggaattctttatcaataaagtttcacaatccgtccctcttcc

SEQ ID NO: 23112 - DNA, 3925 bp, Homo sapiens
  source 1..3925: mol_type = unassigned DNA
aacgtgcgttcgctggcggtgccgggggcggggcgagcaggagggtgggtgtgaggcgggagctggccgcggagcccagacctacccgggcgaagcgggcgagcggtggtttggacgccggcggagacgcgggcgagtggttagcaggaagaagatgagccttaagtctgaacgccgaggaattcatgtggatcaatcggatctcctgtgcaagaaaggatgtggttactacggcaaccctgcctggcagggtttctgctccaagtgctggagggaagagtaccacaaagccaggcagaagcagattcaggaggactgggagctggcggagcgggtcttgctctgttaccctggctggagtgcaatggtgcaatttcaacttactgcaacctctgcttcctgggctcaagtgatcctcctgcttcagcctcccaatgtgctgggattacaggcactccagcgggaggaagaagaggcctttgccagcagtcagagcagccaaggggcccaatccctcacattctccaagtttgaagaaaagaaaaccaacgagaagacccgcaaggttaccacagtgaagaaattcttcagtgcatcttccagggtcggatcaaagaaggaaattcaggaagcaaaagctcccagtccttccataaaccggcaaaccagcattgaaacggatagagtgtctaaggagttcatagaatttctcaagaccttccacaagacaggccaagaaatctataaacagaccaagctgtttttggaaggaatgcattacaaaagggatctaagcattgaagaacagtcagagtgtgctcaggatttctaccacaatgtggccgaaaggatgcaaactcgtgggaaagtgcctccagaaagagtcgagaagataatggatcagattgaaaagtacatcatgactcgtctctataaatatgtattctgtccagaaactactgatgatgagaagaaagatcttgccattcaaaagagaatcagagccctgcgctgggttacgcctcagatgctgtgtgtccctgttaatgaagacatcccagaagtgtctgatatggtggtgaaggcgatcacagatatcattgaaatggattccaagcgtgtgcctcgagacaagctggcctgcatcaccaagtgcagcaagcacatcttcaatgccatcaagatcaccaagaatgagccggcgtcagcggatgacttcctccccaccctcatctacattgttttgaagggcaaccccccacgccttcagtctaatatccagtatatcacgcgcttctgcaatccaagccgactgatgactggagaggatggctactatttcaccaatctgtgctgtgctgtggctttcattgagaagctagacgcccagtctttgaatctaagtcaggaggattttgatcgctacatgtctggccagacctctcccaggaagcaagaagctgagagttggtctcctgatgcttgcttaggcgtcaagcaaatgtataagaacttggatctcttgtctcagttgaatgaacgacaagaaaggatcatgaatgaagccaagaaactggaaaaagacctcatagattggacagatggaattgcaagagaagttcaagacatcgttgagaaatacccactggaaattaagcctccgaatcaaccgttagcagctattgactctgaaaacgttgaaaatgataaacttcctccaccactgcaacctcaagtttatgcaggatgatcacaatttagtggagagtatttatttgagcctaaattgtaggtagcccttactacactcaactgattgggatctagaatgtaactaaattgcttataaatgtcagcattttttaaaggtacagtatatggggattgtttcgtttttcctagcaggggaaccttagttaataataaaatactacttatttgagttactgatacagattcatttaaggcttgtgtgcaaattttgtctcaatcttttttccctccatgattttcctatgtgcttcctctggcattcactgtggttttggtaaataattgccttttaaaggattaaacaaatgaatgctacaaagtgtatgttcaagaaaattaaatggtaccactcttccacagtttggaataattttataattgtaaagatagaaattatattgataagtaaatatgtaaaattgtaaatatgtaaaaaaaagaatggtgtctgctgtgcatggcattttatatgttaattttttagtttaaaatgaagtatattgaatgtttgcctttagcaccattttatttggtttgtcccactaaaatgactcgagaagtgtttagacaaactccccttaagatgtgcactccatctttaagaacgtgttagccttaactttgaggttctatatagtcagagactatgacaccactaaggttcagaataaagtttaggccacataaaattgctgtttaatgtagtcgatggaagactttaaactatgcttctagcttatttttccctcattcattcagcaaatctctattgagttcttcagtgagaaggagcaggcactgggcctggaatggaaggcgggaatgaatgggcctctgatggtgagaggtgacggggtccctcagctgtgagatgcaaggggcgccttgcagcctccataatatacatttgactttgcaaacgtctagacatgttttctgaacctttttcaggacatttcaacctcgggactattcatattagtggcctgagaggtgtttgttgtggggccaccctgtgcatggtagaatgttcagcagcattcctgccatccatatccattaggtgccagtagcacccccgctagagctgtgaaaaattctctccagacatagtcagatgtctcctggggccatatcacccctccgttaagaaccactgatgtcttttacaaaccaggagttatcctcctggtggttaatatggtgtaaccaaagaatcttgcactcaatgcacagtgtgatgttaactaaaacgagttaaatatttaggaggcttgacagctacctgcattgtagaaccttttcttatctcagtggaaccttctataacctaaatataccattgatgattcttcttccattcagtgacatccacagattatgcagctatacttgtgaaatcgtgcatgaggccccagggcaccgttctagaacaacgtcacttcacacaggcagctgagaaaggttctcttgcttttccagtatcttcctaaggatggagcccaaaattgcagagcagtaactttggaataaaaccagggtgggtataaaacttcttattcttaaatttacatataagatctattaagcttgacacatctgtgtcatcacgcactgaagacaggaagcagttcactgagtcagctggttcccaagctcgcacagaaggtgataagttactatcaaatgccagtgagaatcttcttatagaataacctgggcccaagtgattttagtacaaaacttgcccttctttggtttaattttctatgtgcttttaggtgtgaatccagatatgcggtcttaattcctttggaaatacacagttcgtttagttactgtacactctgtttgttcaataaactgcatatcaacttcccacaaaagctgacttttttgggtctcttacatataaagtaggttattgagttgatttttttggaggtatctcatattggtcgaattcttctggtatggactcttgccttatatagaggcttctatttctcttaagtcagcatcaatacaacggccggagtttctgtttttgcaataagaagatgttggtattttatgtagggtaaatgtgactggaatacacctttggaacggaattctttatcaataaagtttcacaatccgtccctcttcc

SEQ ID NO: 23113 - DNA, 1902 bp, Homo sapiens
  source 1..1902: mol_type = unassigned DNA
agacctacccgggcgaagcgggcgagcggtggtttggacgccggcggagacgcgggcgagaaaactgtggatttagttactccactctgccatgtctttccaccactgcctgcacatttgagaccaaggatagagattgggaaaaattgatagttctcctgcctcagagtttggctcctgcactctcatttcagccatagctgcagacaaagcacacgattgctgggcactgtggctcaagagaaggaggagatgtggttagcaggaagaagatgagccttaagtctgaacgccgaggaattcatgtggatcaatcggatctcctgtgcaagaaaggatgtggttactacggcaaccctgcctggcagggtttctgctccaagtgctggagggaagagtaccacaaagccaggcagaagcagattcaggaggactgggagctggcggagcgactccagcgggaggaagaagaggcctttgccagcagtcagagcagccaaggggcccaatccctcacattctccaagtttgaagaaaagaaaaccaacgagaagacccgcaaggttaccacagtgaagaaattcttcagtgcatcttccagggtcggatcaaagaaggaaattcaggaagcaaaagctcccagtccttccataaaccggcaaaccagcattgaaacggatagagtgtctaaggagttcatagaatttctcaagaccttccacaagacaggccaagaaatctataaacagaccaagctgtttttggaaggaatgcattacaaaagggatctaagcattgaagaacagtcagagtgtgctcaggatttctaccacaatgtggccgaaaggatgcaaactcgtgggaaagtgcctccagaaagagtcgagaagataatggatcagattgaaaagtacatcatgactcgtctctataaatatgtattctgtccagaaactactgatgatgagaagaaagatcttgccattcaaaagagaatcagagccctgcgctgggttacgcctcagatgctgtgtgtccctgttaatgaagacatcccagaagtgtctgatatggtggtgaaggcgatcacagatatcattgaaatggattccaagcgtgtgcctcgagacaagctggcctgcatcaccaagtgcagcaagcacatcttcaatgccatcaagatcaccaagaatgagccggcgtcagcggatgacttcctccccaccctcatctacattgttttgaagggcaaccccccacgccttcagtctaatatccagtatatcacgcgcttctgcaatccaagccgactgatgactggagaggatggctactatttcaccaatctgtgctgtgctgtggctttcattgagaagctagacgcccagtctttgaatctaagtcaggaggattttgatcgctacatgtctggccagacctctcccaggaagcaagaagctgagagttggtctcctgatgcttgcttaggcgtcaagcaaatgtataagaacttggatctcttgtctcagttgaatgaacgacaagaaaggatcatgaatgaagccaagaaactggaaaaagacctcatagattggacagatggaattgcaagagaagttcaagacatcgttgagaaatacccactggaaattaagcctccgaatcaaccgttagcagctattgactctgaaaacgttgaaaatgataaacttcctccaccactgcaacctcaagtttatgcaggatgatcacaatttagtggagagtatttatttgagcctaaattgtaggtagcccttactacactcaactgattgggatctagaatgtaactaaattgcttataaatgtcagcattttttaaaggtacagtatatggggattgtttcgtttttcctagca

SEQ ID NO: 23114 - DNA, 3805 bp, Homo sapiens
  source 1..3805: mol_type = unassigned DNA
aacgtgcgttcgctggcggtgccgggggcggggcgagcaggagggtgggtgtgaggcgggagctggccgcggagcccagacctacccgggcgaagcgggcgagcggtggtttggacgccggcggagacgcgggcgagtggttagcaggaagaagatgagccttaagtctgaacgccgaggaattcatgtggatcaatcggatctcctgtgcaagaaaggatgtggttactacggcaaccctgcctggcagggtttctgctccaagtgctggagggaagagtaccacaaagccaggcagaagcagattcaggaggactgggagctggcggagcgactccagcgggaggaagaagaggcctttgccagcagtcagagcagccaaggggcccaatccctcacattctccaagtttgaagaaaagaaaaccaacgagaagacccgcaaggttaccacagtgaagaaattcttcagtgcatcttccagggtcggatcaaagaaggaaattcaggaagcaaaagctcccagtccttccataaaccggcaaaccagcattgaaacggatagagtgtctaaggagttcatagaatttctcaagaccttccacaagacaggccaagaaatctataaacagaccaagctgtttttggaaggaatgcattacaaaagggatctaagcattgaagaacagtcagagtgtgctcaggatttctaccacaatgtggccgaaaggatgcaaactcgtgggaaagtgcctccagaaagagtcgagaagataatggatcagattgaaaagtacatcatgactcgtctctataaatatgtattctgtccagaaactactgatgatgagaagaaagatcttgccattcaaaagagaatcagagccctgcgctgggttacgcctcagatgctgtgtgtccctgttaatgaagacatcccagaagtgtctgatatggtggtgaaggcgatcacagatatcattgaaatggattccaagcgtgtgcctcgagacaagctggcctgcatcaccaagtgcagcaagcacatcttcaatgccatcaagatcaccaagaatgagccggcgtcagcggatgacttcctccccaccctcatctacattgttttgaagggcaaccccccacgccttcagtctaatatccagtatatcacgcgcttctgcaatccaagccgactgatgactggagaggatggctactatttcaccaatctgtgctgtgctgtggctttcattgagaagctagacgcccagtctttgaatctaagtcaggaggattttgatcgctacatgtctggccagacctctcccaggaagcaagaagctgagagttggtctcctgatgcttgcttaggcgtcaagcaaatgtataagaacttggatctcttgtctcagttgaatgaacgacaagaaaggatcatgaatgaagccaagaaactggaaaaagacctcatagattggacagatggaattgcaagagaagttcaagacatcgttgagaaatacccactggaaattaagcctccgaatcaaccgttagcagctattgactctgaaaacgttgaaaatgataaacttcctccaccactgcaacctcaagtttatgcaggatgatcacaatttagtggagagtatttatttgagcctaaattgtaggtagcccttactacactcaactgattgggatctagaatgtaactaaattgcttataaatgtcagcattttttaaaggtacagtatatggggattgtttcgtttttcctagcaggggaaccttagttaataataaaatactacttatttgagttactgatacagattcatttaaggcttgtgtgcaaattttgtctcaatcttttttccctccatgattttcctatgtgcttcctctggcattcactgtggttttggtaaataattgccttttaaaggattaaacaaatgaatgctacaaagtgtatgttcaagaaaattaaatggtaccactcttccacagtttggaataattttataattgtaaagatagaaattatattgataagtaaatatgtaaaattgtaaatatgtaaaaaaaagaatggtgtctgctgtgcatggcattttatatgttaattttttagtttaaaatgaagtatattgaatgtttgcctttagcaccattttatttggtttgtcccactaaaatgactcgagaagtgtttagacaaactccccttaagatgtgcactccatctttaagaacgtgttagccttaactttgaggttctatatagtcagagactatgacaccactaaggttcagaataaagtttaggccacataaaattgctgtttaatgtagtcgatggaagactttaaactatgcttctagcttatttttccctcattcattcagcaaatctctattgagttcttcagtgagaaggagcaggcactgggcctggaatggaaggcgggaatgaatgggcctctgatggtgagaggtgacggggtccctcagctgtgagatgcaaggggcgccttgcagcctccataatatacatttgactttgcaaacgtctagacatgttttctgaacctttttcaggacatttcaacctcgggactattcatattagtggcctgagaggtgtttgttgtggggccaccctgtgcatggtagaatgttcagcagcattcctgccatccatatccattaggtgccagtagcacccccgctagagctgtgaaaaattctctccagacatagtcagatgtctcctggggccatatcacccctccgttaagaaccactgatgtcttttacaaaccaggagttatcctcctggtggttaatatggtgtaaccaaagaatcttgcactcaatgcacagtgtgatgttaactaaaacgagttaaatatttaggaggcttgacagctacctgcattgtagaaccttttcttatctcagtggaaccttctataacctaaatataccattgatgattcttcttccattcagtgacatccacagattatgcagctatacttgtgaaatcgtgcatgaggccccagggcaccgttctagaacaacgtcacttcacacaggcagctgagaaaggttctcttgcttttccagtatcttcctaaggatggagcccaaaattgcagagcagtaactttggaataaaaccagggtgggtataaaacttcttattcttaaatttacatataagatctattaagcttgacacatctgtgtcatcacgcactgaagacaggaagcagttcactgagtcagctggttcccaagctcgcacagaaggtgataagttactatcaaatgccagtgagaatcttcttatagaataacctgggcccaagtgattttagtacaaaacttgcccttctttggtttaattttctatgtgcttttaggtgtgaatccagatatgcggtcttaattcctttggaaatacacagttcgtttagttactgtacactctgtttgttcaataaactgcatatcaacttcccacaaaagctgacttttttgggtctcttacatataaagtaggttattgagttgatttttttggaggtatctcatattggtcgaattcttctggtatggactcttgccttatatagaggcttctatttctcttaagtcagcatcaatacaacggccggagtttctgtttttgcaataagaagatgttggtattttatgtagggtaaatgtgactggaatacacctttggaacggaattctttatcaataaagtttcacaatccgtccctcttcc

SEQ ID NO: 23115 - DNA, 1224 bp, Homo sapiens
  source 1..1224: mol_type = unassigned DNA
atgagccttaagtctgaacgccgaggaattcatgtggatcaatcggatctcctgtgcaagaaaggatgtggttactacggcaaccctgcctggcagggtttctgctccaagtgctggagggaagagtaccacaaagccaggcagaagcagattcaggaggactgggagctggcggagcgactccagcgggaggaagaagaggcctttgccagcagtcagagcagccaaggggcccaatccctcacattctccaagtttgaagaaaagaaaaccaacgagaagacccgcaaggttaccacagtgaagaaattcttcagtgcatcttccagggtcggatcaaagaagcctccagaaagagtcgagaagataatggatcagattgaaaagtacatcatgactcgtctctataaatatgtattctgtccagaaactactgatgatgagaagaaagatcttgccattcaaaagagaatcagagccctgcgctgggttacgcctcagatgctgtgtgtccctgttaatgaagacatcccagaagtgtctgatatggtggtgaaggcgatcacagatatcattgaaatggattccaagcgtgtgcctcgagacaagctggcctgcatcaccaagtgcagcaagcacatcttcaatgccatcaagatcaccaagaatgagccggcgtcagcggatgacttcctccccaccctcatctacattgttttgaagggcaaccccccacgccttcagtctaatatccagtatatcacgcgcttctgcaatccaagccgactgatgactggagaggatggctactatttcaccaatctgtgctgtgctgtggctttcattgagaagctagacgcccagtctttgaatctaagtcaggaggattttgatcgctacatgtctggccagacctctcccaggaagcaagaagctgagagttggtctcctgatgcttgcttaggcgtcaagcaaatgtataagaacttggatctcttgtctcagttgaatgaacgacaagaaaggatcatgaatgaagccaagaaactggaaaaagacctcatagattggacagatggaattgcaagagaagttcaagacatcgttgagaaatacccactggaaattaagcctccgaatcaaccgttagcagctattgactctgaaaacgttgaaaatgataaacttcctccaccactgcaacctcaagtttatgcaggatga

SEQ ID NO: 23116 - DNA, 1160 bp, Homo sapiens
  source 1..1160: mol_type = unassigned DNA
cgcccccctccggccagcccgcagccggccgcgtcatgccaggcgctgctcggcggtagggagtgcccggggccgccgcctccgcccgcccgaagccgcgcccactgcccagagccagagggatggtggtagtcacggggcgggagccagacagccgtcgtcaggacggtgccatgtccagctctgacgccgaagacgactttctggagccggccacgccgacggccacgcaggcggggcacgcgctgcccctgctgccacaggagtttcctgaggttgttccccttaacatcggaggggctcacttcactacacgcctgtccacactgcggtgctacgaagacaccatgttggcagccatgttcagtgggcggcactacatccccacggactccgagggccggtacttcatcgaccgagatggcacacactttggagatgtgctgaatttcctgcgctcaggggacctcccacccagggagcgtgttcgagctgtgtacaaagaggcccagtactatgccatcgggcccctcctggagcagctggagaacatgcagccactgaagggcgagaaggtgcgccaagcgtttctgggactcatgccctattacaaagaccacttggagcggattgtggagatcgcccggctgcgtgcggtccagcggaaggcccgctttgccaagctcaaggtctgtgtcttcaaggaggagatgcccatcaccccctatgagtgtccgctcctcaactccctgcgatttgagcggagtgagagtgacgggcagctttttgagcaccactgtgaagtggatgtgtcttttgggccctgggaggctgtggctgatgtttatgacctgctgcactgcctggtcacggacctctcggcccagggtctcaccgtggaccaccagtgcatcggggtgtgtgacaagcacctcgtgaaccactactactgcaagcgccccatctatgagttcaagatcacatggtgaaattgaaaaagatccccaaggatctgttactactgcatttccttcttgctctgtctacagcctaggccaactagtcagggtctggacatgcatctcctaaaggaagaactgtgtagcaccattgatcacaatgtaacatttccatgctgcattaagggtgtctctctctaa

SEQ ID NO: 23117 - DNA, 2001 bp, Homo sapiens
  source 1..2001: mol_type = unassigned DNA
gataaatagcctgtcctgcaacctggcttaaaacagggaaagccggagttaggcaacagagtgcctagctttctcagtcattcaaacacaagcacggaagaagagattgcactgaccagaggaccgccagggtgtgatgctccgtagtcgcagggatgaaggaaaaccatgggcggagcttgtcatggacagctcctaggtggacataaatggaaactcattggttctggggcacggcgggaagagggagacggccctggacggccgcaccaagaatttcacaacccaaacccgactagaaagcctggggctcccaatattacaagtctgttcttgacaaggaagttgggatgacagaactactgtatgaaaactcagaaatgctcagaagtgcagacctttggttctgttttcttcctcatcagataggaattttttttaactacgcacagaatcacacttgcgaagtcttcttttccttcttgttactttatttagaagctgtgaactcaagaagtaggtcccatgttgaatctacatgtgcgcaggtgattcttttagccaagtcatttccacactcatgcccaagtctggagatacacaggtgcgggtttctgacaacatcaagatatgaaaggttatggccacaccgtgcccttgtcagatggaggtaaggccttctgcatcatctactccgtcattggcattcccttcaccctcctgttcctgacggctgtggtccagcgcatcaccgtgcacgtcacccgcaggccggtcctctacttccacatccgctggggcttctccaagcaggtggtggccatcgtccatgccgtgctccttgggtttgtcactgtgtcctgcttcttcttcatcccggccgctgtcttctcagtcctggaggatgactggaacttcctggaatccttttatttttgttttatttccctgagcaccattggcctgggggattatgtgcctggggaaggctacaatcaaaaattcagagagctctataagattgggatcacgtgttacctgctacttggccttattgccatgttggtagttctggaaaccttctgtgaactccatgagctgaaaaaattcagaaaaatgttctatgtgaagaaggacaaggacgaggatcaggtgcacatcatagagcatgaccaactgtccttctcctcgatcacagaccaggcagctggcatgaaagaggaccagaagcaaaatgagccttttgtggccacccagtcatctgcctgcgtggatggccctgcaaaccattgagcgtaggatttgttgcattatgctagagcaccagggtcagggtgcaaggaagaggcttaagtatgttcatttttatcagaatgcaaaagcgaaaattatgtcactttaagaaatagctactgtttgcaatgtcttattaaaaaacaacaaaaaaagacaaatggaacaaagaagctgtgaccccagcaggatgtctaatatgtgaggaaatgagatgtccacctaaaattcatatgtgacaaaattatctcgaccttacataggaggagaatacttgaagcagtatgctgctgtggttagaagcagattttatacttttaactggaaactttggggtttgcatttagatcatttagctgatggctaaatagcaaaatttatatttagaagcaaaaaaaaaaagcatagagatgtgttttataaataggtttatgtgtactggtttgcatgtacccacccaaaatgattatttttgtagaatctaagttaaacttactatttataatgcataggtaaccattaactatgtacatataaagtataaatatgtttatattctgtacatatggtttaggtcaccagatcctagtgtagttctgaaactaagactatagatattttgtttcttttgatttctctttatactaaagaatccagagttgctacaataaaataaggggaataataaacttgagagtgaataaccat

SEQ ID NO: 23118 - DNA, 2161 bp, Homo sapiens
  source 1..2161: mol_type = unassigned DNA
gcaggaagacggcgctgcccggaggagcggggcgggcgggcgcgcgggggagcgggcggcgggcgggagccaggcccgggcgggggcgggggcggcggggccagaagaggcggcgggccgcgctccggccggtctgcggcgttggccttggcggcggcggtggagaagatgctgcagtccctggccggcagctcgtgcgtgcgcctggtggagcggcaccgctcggcctggtgcttcggcttcctggtgctgggctacttgctctacctggtcttcggcgcagtggtcttctcctcggtggagctgccctatgaggacctgctgcgccaggagctgcgcaagctgaagcgacgcttcttggaggagcacgagtgcctgtctgagcagcagctggagcagttcctgggccgggtgctggaggccagcaactacggcgtgtcggtgctcagcaacgcctcgggcaactggaactgggacttcacctccgcgctcttcttcgccagcaccgtgctctccaccacaggttatggccacaccgtgcccttgtcagatggaggtaaggccttctgcatcatctactccgtcattggcattcccttcaccctcctgttcctgacggctgtggtccagcgcatcaccgtgcacgtcacccgcaggccggtcctctacttccacatccgctggggcttctccaagcaggtggtggccatcgtccatgccgtgctccttgggtttgtcactgtgtcctgcttcttcttcatcccggccgctgtcttctcagtcctggaggatgactggaacttcctggaatccttttatttttgttttatttccctgagcaccattggcctgggggattatgtgcctggggaaggctacaatcaaaaattcagagagctctataagattgggatcacgtgttacctgctacttggccttattgccatgttggtagttctggaaaccttctgtgaactccatgagctgaaaaaattcagaaaaatgttctatgtgaagaaggacaaggacgaggatcaggtgcacatcatagagcatgaccaactgtccttctcctcgatcacagaccaggcagctggcatgaaagaggaccagaagcaaaatgagccttttgtggccacccagtcatctgcctgcgtggatggccctgcaaaccattgagcgtaggatttgttgcattatgctagagcaccagggtcagggtgcaaggaagaggcttaagtatgttcatttttatcagaatgcaaaagcgaaaattatgtcactttaagaaatagctactgtttgcaatgtcttattaaaaaacaacaaaaaaagacaaatggaacaaagaagctgtgaccccagcaggatgtctaatatgtgaggaaatgagatgtccacctaaaattcatatgtgacaaaattatctcgaccttacataggaggagaatacttgaagcagtatgctgctgtggttagaagcagattttatacttttaactggaaactttggggtttgcatttagatcatttagctgatggctaaatagcaaaatttatatttagaagcaaaaaaaaaaagcatagagatgtgttttataaataggtttatgtgtactggtttgcatgtacccacccaaaatgattatttttgtagaatctaagttaaacttactatttataatgcataggtaaccattaactatgtacatataaagtataaatatgtttatattctgtacatatggtttaggtcaccagatcctagtgtagttctgaaactaagactatagatattttgtttcttttgatttctctttatactaaagaatccagagttgctacaataaaataaggggaataataaacttgagagtgaataaccatagtattctgctgcaataaatgtttctaccctcttgcgatagaatggtgtcagatgtctaacatgtttataaacatttttttgaattgaacaggttatgaaaaggatttattaaaaggttaagatactttgttttgaaagtacattgtgatttgcagccacctagcactaaagcatagaacttaaacacgaatccctaaatgaacagattatgttacattaatctgagaattttaaatttagaagctaaaataaataaaaatcacagctggttgt

SEQ ID NO: 23119 - DNA, 726 bp, Homo sapiens
  source 1..726: mol_type = unassigned DNA
gtcctgagggttttatctcctgatttggttagaagattgttgaatctggctgtgagagcctttcaagtgcctaaaggagagagcttgaacttccctgagagtacaccaggttatggccacaccgtgcccttgtcagatggaggtaaggccttctgcatcatctactccgtcattggcattcccttcaccctcctgttcctgacggctgtggtccagcgcatcaccgtgcacgtcacccgcaggccggtcctctacttccacatccgctggggcttctccaagcaggtggtggccatcgtccatgccgtgctccttgggtttgtcactgtgtcctgcttcttcttcatcccggccgctgtcttctcagtcctggaggatgactggaacttcctggaatccttttatttttgttttatttccctgagcaccattggcctgggggattatgtgcctggggaaggctacaatcaaaaattcagagagctctataagattgggatcacgtgttacctgctacttggccttattgccatgttggtagttctggaaaccttctgtgaactccatgagctgaaaaaattcagaaaaatgttctatgtgaagaaggacaaggacgaggatcaggtgcacatcatagagcatgaccaactgtccttctcctcgatcacagaccaggcagctggcatgaaagaggaccagaagcaaaatgagccttttgtggccacc

SEQ ID NO: 23120 - DNA, 2396 bp, Homo sapiens
  source 1..2396: mol_type = unassigned DNA
gcaaggcatggagcctgcactttactctgaatgttggtggcgccttcagagcattgttagcaagggtccatgtgatcacactgacacctgagagagtgacacaccatgtacatggctggtatatggaggatggatttaagggggacaggactgaaggctgtcgcagtgattcagtggccgttcccgcagcagcaccggtgtgccagcccaagagcgccactaacgggcaacccccggctccggctccgactccaactccgcgcctgtccatttcctcccgagccacagtggtagccaggatggaaggcacctcccaagggggcttgcagaccgtcatgaagtggaagacggtggttgccatctttgtggttgtggtggtctaccttgtcactggcggtcttgtcttccgggcattggagcagccctttgagagcagccagaagaataccatcgccttggagaaggcggaattcctgcgggatcatgtctgtgtgagcccccaggagctggagacgttgatccagcatgctcttgatgctgacaatgcgggagtcagtccaataggaaactcttccaacaacagcagccactgggacctcggcagtgcctttttctttgctggaactgtcattacgaccatagggtatgggaatattgctccgagcactgaaggaggcaaaatcttttgtattttatatgccatctttggaattccactctttggtttcttattggctggaattggagaccaacttggaaccatctttgggaaaagcattgcaagagtggagaaggtctttcgaaaaaagcaagtgagtcagaccaagatccgggtcatctcaaccatcctgttcatcttggccggctgcattgtgtttgtgacgatccctgctgtcatctttaagtacatcgagggctggacggccttggagtccatttactttgtggtggtcactctgaccacggtgggctttggtgattttgtggcagggggaaacgctggcatcaattatcgggagtggtataagcccctagtgtggttttggatccttgttggccttgcctactttgcagctgtcctcagtatgatcggagattggctacgggttctgtccaaaaagacaaaagaagaggtgggtgaaatcaaggcccatgcggcagagtggaaggccaatgtcacggctgagttccgggagacacggcgaaggctcagcgtggagatccacgataagctgcagcgggcggccaccatccgcagcatggagcgccggcggctgggcctggaccagcgggcccactcactggacatgctgtcccccgagaagcgctctgtctttgctgccctggacaccggccgcttcaaggcctcatcccaggagagcatcaacaaccggcccaacaacctgcgcctgaaggggccggagcagctgaacaagcatgggcagggtgcgtccgaggacaacatcatcaacaagttcgggtccacctccagactcaccaagaggaaaaacaaggacctcaaaaagaccttgcccgaggacgttcagaaaatctacaagaccttccggaattactccctggacgaggagaagaaagaggaggagacggaaaagatgtgtaactcagacaactccagcacagccatgctgacggactgtatccagcagcacgctgagttggagaacggaatgatacccacggacaccaaagaccgggagccggagaacaactcattacttgaagacagaaactaaatgtgaaggacattggtcttggactgagcgttgtgtgtgtgtgtgtgtgtgtttttaatattcacactgagacatgtgccttaaacagactttttagtccaaaattacatagcattgaagaatatatttcactgtgccataaacaactgaaagcttgctctgccaaaaggaatcagagaacaagaacttcatttcagatagcaaacgcaggacacaccaagagtgtccgtgcacgtagccggttctggccgtacatgttaagggcatttcagtggcagtgctgtacccctgggcagtgctacctgggcacacacgtagacaagggcagctattccttagaccagcctcctgaaagaaacaggtgtgtctttttagtggagtcgtagtaatatgtgcacacacagaaggggacctgattgggtgggagctggttatgtgtaactagcgttggagttgacattttggcatgtgctctgagcttgaattttgataccaaccattcagtgcatcatacctagtctttctatgctccaaatgaatgtctgtggggacctgagagcacctggaatttgttggaagcagatcagagcacacgtacgaaaaggtgcaattgcttttctcatgacaaaagaaaaaaaataa

SEQ ID NO: 23121 - DNA, 2725 bp, Homo sapiens
  source 1..2725: mol_type = unassigned DNA
gtgtgcgggtgtgtgtgtgcgggagtgtgtgcgcacacgccttcgggggctggagtgacactgcagtgggcttctccgtagccccagccttcaggctgcgcagcccctaacctgccggcaccgcttttgggaagcagcttggctcttccatctccccaagccttcctctccatcctttcatccacccctcgccgatcttactttttcttttacccacggggccgcggccggccaccccctggccggtgcaaacacccaagccctctccagttctcccccaagctaatattttcccacctgtctttttctggggttcctccacgagccagtccaaggctcccccatcctcggaaattgttttgttggactgctaaaccgaggcgtgtaaagcttgaggactttattattatttgggttcttttcatttcttccccttctgggcaacgaagcaatgaaatttccaatcgagacgccaagaaaacaggtgaactgggatcctaaagtggccgttcccgcagcagcaccggtgtgccagcccaagagcgccactaacgggcaacccccggctccggctccgactccaactccgcgcctgtccatttcctcccgagccacagtggtagccaggatggaaggcacctcccaagggggcttgcagaccgtcatgaagtggaagacggtggttgccatctttgtggttgtggtggtctaccttgtcactggcggtcttgtcttccgggcattggagcagccctttgagagcagccagaagaataccatcgccttggagaaggcggaattcctgcgggatcatgtctgtgtgagcccccaggagctggagacgttgatccagcatgctcttgatgctgacaatgcgggagtcagtccaataggaaactcttccaacaacagcagccactgggacctcggcagtgcctttttctttgctggaactgtcattacgaccatagggtatgggaatattgctccgagcactgaaggaggcaaaatcttttgtattttatatgccatctttggaattccactctttggtttcttattggctggaattggagaccaacttggaaccatctttgggaaaagcattgcaagagtggagaaggtctttcgaaaaaagcaagtgagtcagaccaagatccgggtcatctcaaccatcctgttcatcttggccggctgcattgtgtttgtgacgatccctgctgtcatctttaagtacatcgagggctggacggccttggagtccatttactttgtggtggtcactctgaccacggtgggctttggtgattttgtggcagggggaaacgctggcatcaattatcgggagtggtataagcccctagtgtggttttggatccttgttggccttgcctactttgcagctgtcctcagtatgatcggagattggctacgggttctgtccaaaaagacaaaagaagaggtgggtgaaatcaaggcccatgcggcagagtggaaggccaatgtcacggctgagttccgggagacacggcgaaggctcagcgtggagatccacgataagctgcagcgggcggccaccatccgcagcatggagcgccggcggctgggcctggaccagcgggcccactcactggacatgctgtcccccgagaagcgctctgtctttgctgccctggacaccggccgcttcaaggcctcatcccaggagagcatcaacaaccggcccaacaacctgcgcctgaaggggccggagcagctgaacaagcatgggcagggtgcgtccgaggacaacatcatcaacaagttcgggtccacctccagactcaccaagaggaaaaacaaggacctcaaaaagaccttgcccgaggacgttcagaaaatctacaagaccttccggaattactccctggacgaggagaagaaagaggaggagacggaaaagatgtgtaactcagacaactccagcacagccatgctgacggactgtatccagcagcacgctgagttggagaacggaatgatacccacggacaccaaagaccgggagccggagaacaactcattacttgaagacagaaactaaatgtgaaggacattggtcttggactgagcgttgtgtgtgtgtgtgtgtgtgtttttaatattcacactgagacatgtgccttaaacagactttttagtccaaaattacatagcattgaagaatatatttcactgtgccataaacaactgaaagcttgctctgccaaaaggaatcagagaacaagaacttcatttcagatagcaaacgcaggacacaccaagagtgtccgtgcacgtagccggttctggccgtacatgttaagggcatttcagtggcagtgctgtacccctgggcagtgctacctgggcacacacgtagacaagggcagctattccttagaccagcctcctgaaagaaacaggtgtgtctttttagtggagtcgtagtaatatgtgcacacacagaaggggacctgattgggtgggagctggttatgtgtaactagcgttggagttgacattttggcatgtgctctgagcttgaattttgataccaaccattcagtgcatcatacctagtctttctatgctccaaatgaatgtctgtggggacctgagagcacctggaatttgttggaagcagatcagagcacacgtacgaaaaggtgcaattgcttttctcatgacaaaagaaaaaaaataa

SEQ ID NO: 23122 - DNA, 4835 bp, Homo sapiens
  source 1..4835: mol_type = unassigned DNA
gcaggcatcgtctcctccggtctcacagctaccccgggctggagcgtggggagggggtaagggagccagccaactcggggaaacttcgttgccagagatgactggggttttcgggctttcccagccttcccatgccgggccacacggcattcattaaagtggtggggcaactattggtgcgctccagccgggcaggttttgagctgcagagacccgtgcccggtagcagcgctttgccaccgagtgcacccaggacgcagtggccgccagcccgggtctcctgctgggggccggcgagtgcagggagactttgcgccacgatgttttgttttcctgccgcaggaacgctaggcagtctctttccaccagacttaacccgcctgaagcaatagccatggaagttgcggcggcacagagggagacagaaccgcttggagcggcatctttcttggatgttttttctctacacagacttctttctttccttggtggccgttcccgcagcagcaccggtgtgccagcccaagagcgccactaacgggcaacccccggctccggctccgactccaactccgcgcctgtccatttcctcccgagccacagtggtagccaggatggaaggcacctcccaagggggcttgcagaccgtcatgaagtggaagacggtggttgccatctttgtggttgtggtggtctaccttgtcactggcggtcttgtcttccgggcattggagcagccctttgagagcagccagaagaataccatcgccttggagaaggcggaattcctgcgggatcatgtctgtgtgagcccccaggagctggagacgttgatccagcatgctcttgatgctgacaatgcgggagtcagtccaataggaaactcttccaacaacagcagccactgggacctcggcagtgcctttttctttgctggaactgtcattacgaccatagggtatgggaatattgctccgagcactgaaggaggcaaaatcttttgtattttatatgccatctttggaattccactctttggtttcttattggctggaattggagaccaacttggaaccatctttgggaaaagcattgcaagagtggagaaggtctttcgaaaaaagcaagtgagtcagaccaagatccgggtcatctcaaccatcctgttcatcttggccggctgcattgtgtttgtgacgatccctgctgtcatctttaagtacatcgagggctggacggccttggagtccatttactttgtggtggtcactctgaccacggtgggctttggtgattttgtggcagggggaaacgctggcatcaattatcgggagtggtataagcccctagtgtggttttggatccttgttggccttgcctactttgcagctgtcctcagtatgatcggagattggctacgggttctgtccaaaaagacaaaagaagaggtgggtgaaatcaaggcccatgcggcagagtggaaggccaatgtcacggctgagttccgggagacacggcgaaggctcagcgtggagatccacgataagctgcagcgggcggccaccatccgcagcatggagcgccggcggctgggcctggaccagcgggcccactcactggacatgctgtcccccgagaagcgctctgtctttgctgccctggacaccggccgcttcaaggcctcatcccaggagagcatcaacaaccggcccaacaacctgcgcctgaaggggccggagcagctgaacaagcatgggcagggtgcgtccgaggacaacatcatcaacaagttcgggtccacctccagactcaccaagaggaaaaacaaggacctcaaaaagaccttgcccgaggacgttcagaaaatctacaagaccttccggaattactccctggacgaggagaagaaagaggaggagacggaaaagatgtgtaactcagacaactccagcacagccatgctgacggactgtatccagcagcacgctgagttggagaacggaatgatacccacggacaccaaagaccgggagccggagaacaactcattacttgaagacagaaactaaatgtgaaggacattggtcttggactgagcgttgtgtgtgtgtgtgtgtgtgtttttaatattcacactgagacatgtgccttaaacagactttttagtccaaaattacatagcattgaagaatatatttcactgtgccataaacaactgaaagcttgctctgccaaaaggaatcagagaacaagaacttcatttcagatagcaaacgcaggacacaccaagagtgtccgtgcacgtagccggttctggccgtacatgttaagggcatttcagtggcagtgctgtacccctgggcagtgctacctgggcacacacgtagacaagggcagctattccttagaccagcctcctgaaagaaacaggtgtgtctttttagtggagtcgtagtaatatgtgcacacacagaaggggacctgattgggtgggagctggttatgtgtaactagcgttggagttgacattttggcatgtgctctgagcttgaattttgataccaaccattcagtgcatcatacctagtctttctatgctccaaatgaatgtctgtggggacctgagagcacctggaatttgttggaagcagatcagagcacacgtacgaaaaggtgcaattgcttttctcatgacaaaagaaaaaaaataatcacaaacacatcacactgtggatatcaccttaaccaatgacagaagcctgctgagtttggtctttctcacaggggtaggtagtccacatgaactggcgagcagtggtgaaaacatgacatcaactgctgcgtggttaaaggccaatcatgcattttcctcagtgggtgcaatggtgacaataaactgatttggaaatgtccatgtactttggttataacttgttttgataagaggggtagaaataccaaaacaattgccttgcatgatgccagtggcttgctgttctgtctagctgatcctacatttttacaaaagtagacatcctgcatttctgagacacactgaggaggaccatggcatctttccatctcagggctttttgtcccttgggtgtcttagggtagacatagtgataagatccaatctcgctatctccaaacaaaaagaaaatgtaccccttgtacagtaagcttgaaatgtttttattgcttgcagcgtaagtgccattaattccatttaacaatgatacttagaaatatttaaaatatttcattttacttttatgtttgggcattcctttattctgaaaaagtcaccactgctccttgcttgtttctacatctcacatcggttactcactaaaactggaacaccctagactgattgttcccaggcaaacgataagctaacacatcataattatgattggtctgtgaggctagaacatcccgcagaggaaagtcggggaatggctagtcataggttgcatgatgattttaaatgggtttgtatcagaaaggggaaaatacatactcctgtgtatgcctcagtctttatcataattggctggttcacagctagctctttgggccacacgtgaaagcatttggacctggcaacaccaggcagttgctggttatgggtgttctaggctcactgctaccttttacagagttcacgggattttacgtaactaacccgcagtgtggatttaccaaaagatcacagcactagcggagacttccagaaactgtctcatgctttctgacctccagggaaagttgtacccacgacatcctcaaccactggtaccatggaagacctgtccctgcccatttctcaaaaatgcacagctcttccctgcctggagcacatgaagtcccatctccctgtccccagacctttaggctctgttgaagttctggcattgcttatgagacccttcctgtccaaggaaggtctaagtcaactcctccattggactggagatgaggctcactggtgacatcctgtgtcgactcagtaataaatagtcacttgggaggcgatgtttatgcaggtgtggatgttgagttttactatgggaatcattccagcctgacaaaatgtgttttaaggaataggtagataactgggacttcctctgttattctaacaagtcgaagcttcctaattaaactgtccatggatctcacttatttggtttccactctgtgttatctggtacgttctttgtagcagtgtgttaaaattccaggccctacggccaaatctggcagaggcttccctctcatttatccagtgccttctgtgggccaggcacaggattaggcactttatgaacgtcagctcattgaaacttcacgacactatgtgggaagtatttgcaaacccattatatacacaaggacacagaggctcagggaagctatgttatttatccaatggcacacagcaagaaagtggtagagctggtattcaaagtctgaccaaagtctgctttcaacttcactacagtgtctgtgtcatgcatccttgtgattgtgtgtgtttgtgtgtatgtgtgtctttctagcttcatggacacagcttacagatgtggggagcagatatggtggaatctccaccaccaagagggcacaaggtctttgtgtaaacatggctcaaagggttgcccctgcagacacctactgtacatttatttggttttggaaattttgtatgtggcaccctttaaaaaatgccctttgaaagcactcttttgcactttacttgctaactttgtagaaactctgcatacagcaggaataaaatagttcaaagcactaagctgcatactcta

SEQ ID NO: 23123 - DNA, 2037 bp, Homo sapiens
  source 1..2037: mol_type = unassigned DNA
gaaaggagcgcttccccggactcggctcggctccgaggctctgaagccgacgccgccagctcagccccgggggcgggagcaggactgcccgcacagcccgcacctaggaggcgccgatcccgaacgcctcatgggacgcccccgggggctctctccacgccttgctgccgcgtcccggtcctaggcgcccgggatccacggcccaccccgcccgcagcccgcggcctgtctggagaggagtatgaggcccggggccccgcggacgccggccaccgggcggcaggggcctagctgcggagccccgcgcccgagagcggcgggtaaggagccgcgggagccggcgaggcgtcggggcgcgcagaggagcgcccctgcccgggcacccgctgggccacgggactcgcgtgtggcctgagcgccggggaggaggcggaggcgcccctctgtccgggctctgggaaggcgacgaggggctctgcgaaggcggcgaggggctccgcggcggccccggacccctggccaccatcctcacgctcctgctcccgccggggggatgtcgtggcccgggccccgagcgccgccccggccccggggctgagctccggaccatgtcctcccgcagcccccggcccccgccccgccgtagccgccgccgcctgccgcgcccctcctgctgctgctgctgctgccgccgttcgcacctcaacgaggacaccggccgcttcgtgctgctggcggcgctcatcggcctctacctggtggcgggtgccacagtcttctcggcgctcgagagccccggcgaggcggaggcgcgggcgcgctggggcgccacgctgcgcaacttcagcgctgcgcacggcgtggccgagccagagctgcgcgccttcctccggcactacgaggccgcgctggccgccggcgtccgcgccgacgcgctgcgcccgcgctgggacttccccggcgccttctacttcgtgggcaccgtggtgtcaaccataggtttcggcatgaccacccccgcgacggtgggcgggaaggccttcctcatcgcctacgggctgttcggctgcgctgggaccatcctgttcttcaacctcttcctggagcgcatcatctcgctgctggccttcatcatgcgcgcctgccgggagcgccagctgcgccgcagcggcctgctgcccgccaccttccgccgcggctccgcgctctcggaggccgacagcctggcgggctggaagccctcggtgtaccacgtgctgctcatcctgggcctgttcgccgtgctgctgtcctgctgcgcctcggccatgtacaccagcgtggagggctgggactacgtggactcgctctacttctgcttcgtcaccttcagcaccatcggcttcggggacctggtgagcagccagcacgccgcctaccggaaccaggggctctaccgcctgggcaacttcctcttcatcctgctcggcgtgtgctgcatttactcgctcttcaacgtcatctccatcctcatcaagcaggtgctcaactggatgctgcgcaagctgagctgccgctgctgcgcgcgctgctgcccggctcctggcgcgcccctggcccggcgcaatgccatcaccccaggctcccggctgcgccgccgcctggccgcgctcggtgccgaccccgcggcccgcgacagcgacgccgagggccgccgcctctcgggcgagctcatctccatgcgcgacctcacggcctccaacaaggtgtcgctggcgctgctgcagaagcagctgtcggagacggccaacggctacccgcgcagcgtgtgcgtcaacacgcgccagaacggcttctcgggcggcgtgggcgcgctgggcatcatgaacaaccggctggccgagaccagcgcctccaggtagaccgcccgtccgcccgcgccggggaccctctccaggccgcggggccgccgggcgtggtttgcttctctcagtcactgctggcgctttcttaatctttatccaataaaatgaaacaaaaaaaatttttttaaagaaa

SEQ ID NO: 23124 - DNA, 2522 bp, Homo sapiens
  source 1..2522: mol_type = unassigned DNA
cgggaaactcgagttggctcgagcttgccctgaagacgcgccacgccccctcccctatctgagccggacagggagccggggtggaaactgcgcccgcatcccagcgccaagcagacgtgaactctgcgcccgttccccgggaccttcagcgttaaggagaactccgaggagagcagggggagtggaggggaacggcggcgacaaagcggatttgaaactaggagtcaaggaggacgtggggagctggcgccacaggagctaccgaggcggcggccgggggagcctcgcggcctgcgggagagcccggcggtcatgggcgagccggcggtggggcgcccgggagctggctgagcgccggggcccttatttcccgggggtgtgggcgagactccgccgacgcccggtgccgtgggcctgggggctgcccccgggggcccggccatggctggccggggtttcagctggggcccgggccacctgaacgaggacaacgcgcgctttctgctgctggccgcgctcatcgtgctctacctgctgggcggcgccgccgtcttctccgcgctggagctggcgcacgagcgccaggccaagcagcgctgggaggagcgcctggccaacttcagccgcggccacaacctgagccgcgacgagctgcgcggcttcctccgccactacgaggaggccactcgggccggcatccgcgtggacaacgtccgcccgcgctgggacttcaccggcgccttctacttcgtgggcaccgtcgtttccaccatagggtttgggatgacaactccggcgacagtaggaggaaaaatctttctgatcttttacggccttgttgggtgttccagcaccatcttgttcttcaacctcttcctggagcgcctgatcaccatcatcgcctacatcatgaagtcgtgccaccagcggcagctccggagacgaggggccctgccccaggagagcctgaaggatgcggggcagtgtgaggtggacagcctggccggctggaagccctccgtgtactacgtcatgctgatcctatgcacagcctccatcctcatctcttgctgcgcctcagccatgtacacccccattgaaggctggagctactttgactcactctacttctgttttgtggctttcagcaccattggctttggggacctggtcagcagccagaacgcccactatgagagccaaggcctctatcgctttgccaacttcgtcttcatcctcatgggtgtctgctgcatctactccttgttcaatgtcatctctatcctcatcaaacagtccttgaactggatcctgaggaaaatggacagcgggtgctgcccgcaatgccagagaggactcttgcgatcacgcaggaacgtggtgatgccaggcagcgtccggaaccgctgcaacatctccatagagacagacggggtggcagagagtgacacggacgggcgccggctctcaggggagatgatctccatgaaggacttgctggcagccaacaaggcctcgttggccatcctgcagaagcaactgtctgagatggccaacggctgcccccaccagaccagcacactggcccgggacaatgaattctcagggggggtgggagcctttgcaatcatgaacaacaggttggcagagaccagtggggacaggtagaagccaggagtggatgctgggcagaggccagagtagaatggaggatgattgccgcccaggggacgagctcagccctgcgccttggctctgttccttctgggagctgttcccgggagcctccgcaagcatctttagaaatctgatctcggctccaaccaacagccaccttccagggatggggggcctgaagcctcgatgcttgtctcctgatccttattctttaagtctaaattcagtcttttcaaaacaaatcacaaaagcagcattagacattgccttgtttcattaatcttgtttcagagctttagctgcctgaggagataggttttccttaagccttgatttcctgaagctctctctgttccttatttgggaacaaaaattgcgaagactcatctttccctagaactctgaatggatgaatttttaaaagtggggagaatgtttggggatgtgtctgggctttctttttgccaggcttccttcaaagcatacctgccaatggtgtctgcatagggaaaatgtctgttgtactctttatacctgtttctgttttttgttgtccctttctttttatttttaaggccttaatgcctggctgtggcgtctgtgagacctcaatgtaataagaaaattaaattcagcttcaggcctttaaactgcagcaagatggtggtgtaggggtgtgggacggggagagactcacttttgtaactaaagaacatagcttaacattttccctttgaatggtcacacagaccatttcatttttaccagggcttggggacccaatgcaaagatgatgactatttaataaaatggaaaatttaataaatcctcattttattaactaa

SEQ ID NO: 23125 - DNA, 1320 bp, Homo sapiens
  source 1..1320: mol_type = unassigned DNA
ggttcccggcagtcgccccgcctcgcccgtcacaaccctgccgcgtggggccggggttggagggggcggagcgcgcggtccgggcacacggagcaggttgggaccgcggcgggtaccggggccggggcgccatgcggaggccgagcgtgcgcgcggccgggctggtcctgtgcaccctgtgttacctgctggtgggcgctgctgtcttcgacgcgctcgagtccgaggcggaaagcggccgccagcgactgctggtccagaagcggggcgctctccggaggaagttcggcttctcggccgaggactaccgcgagctggagcgcctggcgctccaggctgagccccaccgcgccggccgccagtggaagttccccggctccttctacttcgccatcaccgtcatcactaccatcgagtacggccacgccgcgccgggtacggactccggcaaggtcttctgcatgttctacgcgctcctgggcatcccgctgacgctggtcactttccagagcctgggcgaacggctgaacgcggtggtgcggcgcctcctgttggcggccaagtgctgcctgggcctgcggtggacgtgcgtgtccacggagaacctggtggtggccgggctgctggcgtgtgccgccaccctggccctcggggccgtcgccttctcgcacttcgagggctggaccttcttccacgcctactactactgcttcatcaccctcaccaccatcggcttcggcgacttcgtggcactgcagagcggcgaggcgctgcagaggaagctcccctacgtggccttcagcttcctctacatcctcctggggctcacggtcattggcgccttcctcaacctggtggtcctgcgcttcctcgttgccagcgccgactggcccgagcgcgctgcccgcacccccagcccgcgccccccgggggcgcccgagagccgtggcctctggctgccccgccgcccggcccgctccgtgggctccgcctctgtcttctgccacgtgcacaagctggagaggtgcgcccgcgacaacctgggcttttcgcccccctcgagcccgggggtcgtgcgtggcgggcaggctcccaggcttggggcccggtggaagtccatctgacaaccccacccaggccagggtcgaatctggaatgggagggtctggcttcagctatcagggcaccctccccagggattggaaacggatgacgggcctctaggcggtcttctgccacgagcagtttctcattactgtctgtggctaagtcccctccctcctttccaaaaatatattacagtcacaccataagcacaaa

SEQ ID NO: 23126 - DNA, 789 bp, Homo sapiens
  source 1..789: mol_type = unassigned DNA
atgcccagtgctgggctctgcagctgctggggtggccgggtgctgcccctgctgctggcctatgtctgctacctgctgctcggtgccactatcttccagctgctagagaggcaggcggaggctcagtccagggaccagtttcagttggagaagctgcgcttcctggagaactacacctgcctggaccagtgggccatggagcagtttgtgcaggtcatcatggaagcctgggtgaaaggtgtgaaccccaaaggcaactctaccaaccccagcaactgggactttggcagcagtttcttctttgcaggcacagtcgtcactaccataggatatgggaacctggcacccagcacagaggcaggtcaggtcttctgtgtcttctatgccctgttgggcatcccgcttaacgtgatcttcctcaaccacctgggcacagggctgcgtgcccatctggccgccattgaaagatgggaggaccgtcccaggcgctcccaggtactgcaagtcctgggcctggctctgttcctgaccctggggacgctggtcattctcatcttcccacccatggtcttcagccatgtggagggctggagcttcagcgagggcttctactttgctttcatcactctcagcaccattggctttggggactatgttgttggtctgaggcaaggctgtggagccaaggcggctccaggcaggagacccaggagaggctctacagcagcaagaggagtccaagtcacaccccaggacttccccatatccaagaaaggactgggaagctga

SEQ ID NO: 23127 - DNA, 1248 bp, Homo sapiens
  source 1..1248: mol_type = unassigned DNA
gtcctggccacagcatgcccagtgctgggctctgcagctgctggggtggccgggtgctgcccctgctgctggcctatgtctgctacctgctgctcggtgccactatcttccagctgctagagaggcaggcggaggctcagtccagggaccagtttcagttggagaagctgcgcttcctggagaactacacctgcctggaccagtgggccatggagcagtttgtgcaggtcatcatggaagcctgggtgaaaggtgtgaaccccaaaggcaactctaccaaccccagcaactgggactttggcagcagtttcttctttgcaggcacagtcgtcactaccataggatatgggaacctggcacccagcacagaggcaggtcaggtcttctgtgtcttctatgccctgttgggcatcccgcttaacgtgatcttcctcaaccacctgggcacagggctgcgtgcccatctggccgccattgaaagatgggaggaccgtcccaggcgctcccaggtactgcaagtcctgggcctggctctgttcctgaccctggggacgctggtcattctcatcttcccacccatggtcttcagccatgtggagggctggagcttcagcgagggcttctactttgctttcatcactctcagcaccattggctttggggactatgttgttggcacagaccccagcaagcattatatctcagtgtatcggagcctggcagccatctggatcctcctgggcctggcgtggctggcgctgatcctcccactgggccccctgcttctgcacagatgctgccagctctggctgctcagtctgaggcaaggctgtggagccaaggcggctccaggcaggagacccaggagaggctctacagcagcaagaggagtccaagtcacaccccaggacttccccatatccaagaaaggactgggaagctgaggacccacggactcttcacacagcctagacgcttcctccactccaggtagagggatttcgggggccttctcagaagcaaggagtggacaagcctcttggttaaggctcctcttacctcccaagctcatggacaagtggcaatcagctggggtccctcttttggggtacaaaggaaaggacagaggtgtgggagacccaaggtggtcttgagattgacagacagcaagtccttggagatagcccccgagtccaagaacttaggcaggggccccaagacaataaagttggtctctactatctccta

SEQ ID NO: 23128 - DNA, 1272 bp, Homo sapiens
  source 1..1272: mol_type = unassigned DNA
atgcccagtgctgggctctgcagctgctggggtggccgggtgctgcccctgctgctggcctatgtctgctacctgctgctcggtgccactatcttccagctgctagagaggcaggcggaggctcagtccagggaccagtttcagttggagaagctgcgcttcctggagaactacacctgcctggaccagtgggccatggagcagtttgtgcaggtcatcatggaagcctgggtgaaaggtgtgaaccccaaaggcaactctaccaaccccagcaactgggactttggcagcagtttcttctttgcaggcacagtcgtcactaccataggatatgggaacctggcacccagcacagaggcaggtcaggtcttctgtgtcttctatgccctgttgggcatcccgcttaacgtgatcttcctcaaccacctgggcacagggctgcgtgcccatctggccgccattgaaagatgggaggaccgtcccaggcgctcccaggtactgcaagtcctgggcctggctctgttcctgaccctggggacgctggtcattctcatcttcccacccatggtcttcagccatgtggagggctggagcttcagcgagggcttctactttgctttcatcactctcagcaccattggctttggggactatgttgttggccacccccttaacttcatcactccctctgggctcctgccttctcaagagcctttccaaacaccccatgggaagccagagagccagcagatcccaggatccttccagaaagtgagctccatgaacgtctggcctctctcaggaatgcattctccaggtctggcctttcccctgccagactgcaacatccctgaccaggagagatttagaccactccatcccggggcctggaaattttggcctttgcctctcccatcatccaacagcaagtgggctcctatgtggctgggttcctctgcacaggtctgaggcaaggctgtggagccaaggcggctccaggcaggagacccaggagaggctctacagcagcaagaggagtccaagtcacaccccaggacttccccatatccaagaaaggactgggaagctgaggacccacggactcttcacacagcctagacgcttcctccactccaggtagagggatttcgggggccttctcagaagcaaggagtggacaagcctcttggttaaggctcctcttacctcccaagctcatggacaagtggcaatcagctggggtccctcttttggggtacaaaggaaaggaca

SEQ ID NO: 23129 - DNA, 981 bp, Homo sapiens
  source 1..981: mol_type = unassigned DNA
tctcccccatagccagccccacggccctggcagggtcctggccacagcatgcccagtgctgggctctgcagctgctggggtggccgggtgctgcccctgctgctggcctatgtctgctacctgctgctcggtgccactatcttccagctgctagagaggcaggcggaggctcagtccagggaccagtttcagttggagaagctgcgcttcctggagaactacacctgcctggaccagtgggccatggagcagtttgtgcaggtcatcatggaagcctgggtgaaaggtgtgaaccccaaaggcaactctaccaaccccagcaactgggactttggcagcagtttcttctttgcaggcacagtcgtcactaccataggatatgggaacctggcacccagcacagaggcaggtcaggtcttctgtgtcttctatgccctgttgggcatcccgcttaacgtgatcttcctcaaccacctgggcacagggctgcgtgcccatctggccgccattgaaagatgggaggaccgtcccaggcgctcccaggtactgcaagtcctgggcctggctctgttcctgaccctggggacgctggtcattctcatcttcccacccatggtcttcagccatgtggagggctggagcttcagcgagggcttctactttgctttcatcactctcagcaccattggctttggggactatgttgttggcacagaccccagcaagcattatatctcagtgtatcggagcctggcagccatctggatcctcctgggcctggcgtggctggcgctgatcctcccactgggccccctgcttctgcacagatgctgccagctctggctgctcagtaggggcctcggcgtcaaggatggggcagcctctgaccccagtgggctccccaggcctcagaagatccccatctctgcatgaggcccccggggggggcccagaaacccctttcatcctccccagtcccac

SEQ ID NO: 23130 - DNA, 889 bp, Homo sapiens
  source 1..889: mol_type = unassigned DNA
cagccttcaagggtgaagacgctgggggcggccgagagagcccactggggcctggacagagtgagcacacctatccgatttagcccagaaacatctatccaacttggagacagagagagagacatgaagcactcaggagaacctgctgctagagaggcaggcggaggctcagtccagggaccagtttcagttggagaagctgcgcttcctggagaactacacctgcctggaccagtgggccatggagcagtttgtgcaggtcatcatggaagcctgggtgaaaggtgtgaaccccaaaggcaactctaccaaccccagcaactgggactttggcagcagtttcttctttgcaggcacagtcgtcactaccataggatatgggaacctggcacccagcacagaggcaggtcaggtcttctgtgtcttctatgccctgttgggcatcccgcttaacgtgatcttcctcaaccacctgggcacagggctgcgtgcccatctggccgccattgaaagatgggaggaccgtcccaggcgctcccaggtactgcaagtcctgggcctggctctgttcctgaccctggggacgctggtcattctcatcttcccacccatggtcttcagccatgtggagggctggagcttcagcgagggcttctactttgctttcatcactctcagcaccattggctttggggactatgttgttggtctgaggcaaggctgtggagccaaggcggctccaggcaggagacccaggagaggctctacagcagcaagaggagtccaagtcacaccccaggacttccccatatccaagaaaggactgggaagctgaggacccacggactcttcacacagcctagacgcttcctccactccaggtagaggg

SEQ ID NO: 23131 - DNA, 1658 bp, Homo sapiens
  source 1..1658: mol_type = unassigned DNA
acacatttgaggcggggccagatgcccacagttcagagcctctttttgtcccggggattggatcccagggctgggtggggccaggctgtcccattccccaacactcctcctccccggcgaaaccgggcaccagcaggcgtttgcgagaggagatacgagctggacgcctggcccttccctcccaccgggtcctagtccaccgctcccggcgccggctccccgcctctcccgctatgtaccgaccgcgagcccgggcggctcccgagggcagggtccggggctgcgcggtgcccagcaccgtgctcctgctgctcgcctacctggcttacctggcgctgggcaccggcgtgttctggacgctggagggccgcgcggcgcaggactccagccgcagcttccagcgcgacaagtgggagctgttgcagaacttcacgtgtctggaccgcccggcgctggactcgctgatccgggatgtcgtccaagcatacaaaaacggagccagcctcctcagcaacaccaccagcatggggcgctgggagctcgtgggctccttcttcttttctgtgtccaccatcaccaccattggctatggcaacctgagccccaacacgatggctgcccgcctcttctgcatcttctttgcccttgtggggatcccactcaacctcgtggtgctcaaccgactggggcatctcatgcagcagggagtaaaccactgggccagcaggctggggggcacctggcaggatcctgacaaggcgcggtggctggcgggctctggcgccctcctctcgggcctcctgctcttcctgctgctgccaccgctgctcttctcccacatggagggctggagctacacagagggcttctacttcgccttcatcaccctcagcaccgtgggcttcggcgactacgtgattggaatgaacccctcccagaggtacccactgtggtacaagaacatggtgtccctgtggatcctctttgggatggcatggctggccttgatcatcaaactcatcctctcccagctggagacgccagggagggtatgttcctgctgccaccacagctctaaggaagacttcaagtcccaaagctggagacagggacctgaccgggagccagagtcccactccccacagcaaggatgctatccagagggacccatgggaatcatacagcatctggaaccttctgctcacgctgcaggctgtggcaaggacagctagttatactccattctttggtcgtcgtcctcggtagcaagacccctgattttaagctttgcacatgtccacccaaactaaagactacattttccatccaccctagaggctgggtgcagctatatgattaattctgcccaatagggtatacagagacatgtcctgggtgacatgggatgtgactttcgggtgtcggggcagcatgcccttctcccccacttccttactttagcgggctgcaatgccgccgatatgatggctgggagctctggcagccatacggcaccatgaagtagcggcaatgtttgagcggcacaataagataggaagagtctggatctctgatgatcacagagccatcctaacaaacggaatatcacccgacctcctttatgtgagagagaaataaacatcttatgtaaaatacca

SEQ ID NO: 23132 - DNA, 1706 bp, Homo sapiens
  source 1..1706: mol_type = unassigned DNA
attccccaacactcctcctccccggcgaaaccgggcaccagcaggcgtttgcgagaggagatacgagctggacgcctggcccttccctcccaccgggtcctagtccaccgctcccggcgccggctccccgcctctcccgctatgtaccgaccgcgagcccgggcggctcccgagggcagggtccggggctgcgcggtgcccagcaccgtgctcctgctgctcgcctacctggcttacctggcgctgggcaccggcgtgttctggacgctggagggccgcgcggcgcaggactccagccgcagcttccagcgcgacaagtgggagctgttgcagaacttcacgtgtctggaccgcccggcgctggactcgctgatccgggatgtcgtccaagcatacaaaaacggagccagcctcctcagcaacaccaccagcatggggcgctgggagctcgtgggctccttcttcttttctgtgtccaccatcaccaccattggctatggcaacctgagccccaacacgatggctgcccgcctcttctgcatcttctttgcccttgtggggatcccactcaacctcgtggtgctcaaccgactggggcatctcatgcagcagggagtaaaccactgggccagcaggctggggggcacctggcaggatcctgacaaggcgcggtggctggcgggctctggcgccctcctctcgggcctcctgctcttcctgctgctgccaccgctgctcttctcccacatggagggctggagctacacagagggcttctacttcgccttcatcaccctcagcaccgtgggcttcggcgactacgtgattgcaagctgcctcatttcagatacgagaaaaccaaacagagactggcaaacactagagcggacatcgaaatcctctgggggcttgttaaaatacagatttctggccgggcacggtggctcacacctgtaattctaacactttgggaggccgaggaatgaacccctcccagaggtacccactgtggtacaagaacatggtgtccctgtggatcctctttgggatggcatggctggccttgatcatcaaactcatcctctcccagctggagacgccagggagggtatgttcctgctgccaccacagctctaaggaagacttcaagtcccaaagctggagacagggacctgaccgggagccagagtcccactccccacagcaaggatgctatccagagggacccatgggaatcatacagcatctggaaccttctgctcacgctgcaggctgtggcaaggacagctagttatactccattctttggtcgtcgtcctcggtagcaagacccctgattttaagctttgcacatgtccacccaaactaaagactacattttccatccaccctagaggctgggtgcagctatatgattaattctgcccaatagggtatacagagacatgtcctgggtgacatgggatgtgactttcgggtgtcggggcagcatgcccttctcccccacttccttactttagcgggctgcaatgccgccgatatgatggctgggagctctggcagccatacggcaccatgaagtagcggcaatgtttgagcggcacaataagataggaagagtctggatctctgatgatcacagagccatcctaacaaacggaatatcacccgacctcctttatgtgagagagaaataaacatcttat

SEQ ID NO: 23133 - DNA, 1155 bp, Homo sapiens
  source 1..1155: mol_type = unassigned DNA
atggaggtctcggggcacccccaggccaggagatgctgcccagaggccctgggaaagctcttccctggcctctgcttcctctgctttctggtgacctacgccctggtgggtgctgtggtcttctctgccattgaggacggccaggtcctggtggcagcagatgatggagagtttgagaagttcttggaggagctctgcagaatcttgaactgcagtgaaacagtggtggaagacagaaaacaggatctccaggggcatctgcagaaggtgaagcctcagtggtttaacaggaccacacactggtccttcctgagctcgctctttttctgctgcacggtgttcagcaccgtgggctatggctacatctaccccgtcaccaggcttggcaagtacttgtgcatgctctatgctctctttggtatccccctgatgttcctcgttctcacggacacaggcgacatcctggcaaccatcttatctacatcttataatcggttccgaaaattccctttctttacccgccccctcctctccaagtggtgccccaaatctctcttcaagaaaaaaccggaccccaagcccgcagatgaagctgtccctcagatcatcatcagtgctgaagagcttccaggccccaaacttggcacatgtccttcacgcccaagctgcagcatggagctgtttgagagatctcatgcgctagagaaacagaacacactgcaactgcccccacaagccatggagaggagtaactcgtgtcccgaactggtgttgggaagactctcatactccatcatcagcaacctggatgaagttggacagcaggtggagaggttggacatccccctccccatcattgcccttattgtttttgcctacatttcctgtgcagctgccatcctccccttctgggagacacagttggatttcgagaatgccttctatttctgctttgtcacactcaccaccattgggtttggggatactgttttagaacaccctaacttcttcctgttcttctccatttatatcatcgttggaatggagattgtgttcattgctttcaagttggtgcaaaacaggctgattgacatatacaaaaatgttatgctattctttgcaaaagggaagttttaccaccttgttaaaaagtga

SEQ ID NO: 23134 - DNA, 2496 bp, Homo sapiens
  source 1..2496: mol_type = unassigned DNA
aagaaaccttggaggaagaacggcattaaagatcaaaagcatgatgactcctgatgaaaacatcaccaaatgatgaacccacgagcaaaaagggatttctacttggcggcacctgacttgctggatcctaaatctgccgctcagaactccaaaccgaggctctcgttttccacgaaacccacagtgcttgcttcccgggtggagagtgacacgaccattaatgttatgaaatggaagacggtctccacgatattcctggtggttgtcctctatctgatcatcggagccaccgtgttcaaagcattggagcagcctcatgagatttcacagaggaccaccattgtgatccagaagcaaacattcatatcccaacattcctgtgtcaattcgacggagctggatgaactcattcaggatttggaaacatctcaccacgcacagaaggcggcaaaatattctgtatcatctatgccttactgggaattcccctctttggttttctcttggctggagttggagatcagctaggcaccatatttggaaaaggaattgccaaagtggaagatacgtttattaagtggaatgttagtcagaccaagattcgcatcatctcaacaatcatatttatactatttggctgtgtactctttgtggctctgcctgcgatcatattcaaacacatagaaggctggagtgccctggacgccatttattttgtggttatcactctaacaactattggatttggtgactacgttgcaggtggatccgatattgaatatctggacttctataagcctgtcgtgtggttctggatccttgtagggcttgcttactttgctgctgtcctgagcatgattggagattggctccgagtgatatctaaaaagacaaaagaagaggtgggagagttcagagcacacgctgctgagtggacagccaacgtcacagccgaattcaaagaaaccaggaggcgactgagtgtggagatttatgacaagttccagcgggccacctccatcaagcggaagctctcggcagaactggctggaaaccacaatcaggagctgactccttgtaggaggaccctgtcagtgaaccacctgaccagcgagagggatgtcttgcctcccttactgaagactgagagtatctatctgaatggtttgacgccacactgtgctggtgaagagattgctgtgattgagaacatcaaatagccctctctttaaataaccttaggcatagccataggtgaggacttctctatgctctttatgactgttgctggtagcattttttaaattgtgcatgagctcaaagggggaacaaaatagatacacccatcatggtcatctatcatcaagagaatttggaattctgagccagcactttctttctgatgatgcttgttgaacggtccactttctttgatgagtggaatgacaagcaatgtctgatgcctttttgtgcccagactgttttcctctctctttccctaatgtgccataaggcctcagaatgaatgagaattgtttctggtaacaatgtagctttgagggatcagttcttaacttttcagggtctacctaactgagcctagatatggaccatttatggatgacaacaattttttttttgtaaatgacaagaaattcttatgcagccttttacctaagaaattttctgtcagtgccttatcttatgaagaaacagaacctctctagctaatgtgtggtttctccttccctgcccccacccctaggctcacctctgcagtcttttaccccagttctcccatttgaataccataccttgctggaaacagtgtgtaaaatgactgaagtgatgatgcccgaagatgaaatagatgccaaattagatggacattgaagcaacactcagcgttgcctagcgttaaaggcactgcagagaaatgaggtgcagaggtggcccctctgagtatttatttgactcaggtaccagtggtacatatatacagtgtaattatgaccaggctggtaaaattggctgctcgcaaacaatccccttttttcctggcagtatttggaatttatcatttattaataactatacatttttaaaatgcagaaagaaaataatttccctaaatataattgcaaactgatttcttttacttttttgtgtgtgggggtgggagctgtatctgaataagtggcattcagattagggtcttgaaaaataaacccagaatctttaaaagaagcaaataaactaatagacgcttattttccaaaatttaaatttaagctagaaatgtaaatattcaattaatttgttaaaagtacttttataaagttaaaaaaaatccaaccaaaattttagaaagtcaggctcttttagaaagaaagctacacccatttcctcaaataactgttccgaaaatttatatggtggaatgcgccatgtataaactgtgaattgtattgacaaataaagtttgtaattaaagtc

SEQ ID NO: 23135 - DNA, 1491 bp, Homo sapiens
  source 1..1491: mol_type = unassigned DNA
ggcctccgcctcgccctctgcccagcccgccggtgtcccctccttcccgcgatttcgtttcttctcacgctcccccccccgccccctcccgcgtccagccccgctctccccaccttgtaaaacaaagccggggaaaatgcctgcccgtgcagctcggagcgcgcagcccgtctctgaataagaatggcggcacctgacttgctggatcctaaatctgccgctcagaactccaaaccgaggctctcgttttccacgaaacccacagtgcttgcttcccgggtggagagtgacacgaccattaatgttatgaaatggaagacggtctccacgatattcctggtggttgtcctctatctgatcatcggagccaccgtgttcaaagcattggagcagcctcatgagatttcacagaggaccaccattgtgatccagaagcaaacattcatatcccaacattcctgtgtcaattcgacggagctggatgaactcattcagcaaatagtggcagcaataaatgcagggattataccgttaggaaacacctccaatcaaatcagtcactgggatttgggaagttccttcttctttgctggcactgttattacaaccataggatttggaaacatctcaccacgcacagaaggcggcaaaatattctgtatcatctatgccttactgggaattcccctctttggttttctcttggctggagttggagatcagctaggcaccatatttggaaaaggaattgccaaagtggaagatacgtttattaagtggaatgttagtcagaccaagattcgcatcatctcaacaatcatatttatactatttggctgtgtactctttgtggctctgcctgcgatcatattcaaacacatagaaggctggagtgccctggacgccatttattttgtggttatcactctaacaactattggatttggtgactacgttgcaggtggatccgatattgaatatctggacttctataagcctgtcgtgtggttctggatccttgtagggcttgcttactttgctgctgtcctgagcatgattggagattggctccgagtgatatctaaaaagacaaaagaagaggtgggagagttcagagcacacgctgctgagtggacagccaacgtcacagccgaattcaaagaaaccaggaggcgactgagtgtggagatttatgacaagttccagcgggccacctccatcaagcggaagctctcggcagaactggctggaaaccacaatcaggagctgactccttgtaggaggaccctgtcagtgaaccacctgaccagcgagagggatgtcttgcctcccttactgaagactgagagtatctatctgaatggtttgacgccacactgtgctggtgaagagattgctgtgattgagaacatcaaatagccctctctttaaataaccttaggcatagccataggtgaggacttctctatgctctttatgactgttgctggt

SEQ ID NO: 23136 - DNA, 1410 bp, Homo sapiens
  source 1..1410: mol_type = unassigned DNA
gaaaccttggaggaagaacggcattaaagatcaaaagcatgatgactcctgatgaaaacatcaccaaatgatgaacccacgagcaaaaagggatttctacttggcggcacctgacttgctggatcctaaatctgccgctcagaactccaaaccgaggctctcgttttccacgaaacccacagtgcttgcttcccgggtggagagtgacacgaccattaatgttatgaaatggaagacggtctccacgatattcctggtggttgtcctctatctgatcatcggagccaccgtgttcaaagcattggagcagcctcatgagatttcacagaggaccaccattgtgatccagaagcaaacattcatatcccaacattcctgtgtcaattcgacggagctggatgaactcattcagcaaatagtggcagcaataaatgcagggattataccgttaggaaacacctccaatcaaatcagtcactgggatttgggaagttccttcttctttgctggcactgttattacaaccataggatttggaaacatctcaccacgcacagaaggcggcaaaatattctgtatcatctatgccttactgggaattcccctctttggttttctcttggctggagttggagatcagctaggcaccatatttggaaaaggaattgccaaagtggaagatacgtttattaagtggaatgttagtcagaccaagattcgcatcatctcaacaatcatatttatactatttggctgtgtactctttgtggctctgcctgcgatcatattcaaacacatagaaggctggagtgccctggacgccatttattttgtggttatcactctaacaactattggatttggtgactacgttgcaggtggatccgatattgaatatctggacttctataagcctgtcgtgtggttctggatccttgtagggcttgcttactttgctgctgtcctgagcatgattggagattggctccgagtgatatctaaaaagacaaaagaagaggtgggagagttcagagcacacgctgctgagtggacagccaacgtcacagccgaattcaaagaaaccaggaggcgactgagtgtggagatttatgacaagttccagcgggccacctccatcaagcggaagctctcggcagaactggctggaaaccacaatcaggagctgactccttgtaggaggaccctgtcagtgaaccacctgaccagcgagagggatgtcttgcctcccttactgaagactgagagtatctatctgaatggtttgacgccacactgtgctggtgaagagattgctgtgattgagaacatcaaatagccctctctttaaataaccttaggcatagccataggtgaggacttctctatgctctttatgactgttgctggtag

SEQ ID NO: 23137 - DNA, 3379 bp, Homo sapiens
  source 1..3379: mol_type = unassigned DNA
ccttgtaaaacaaagccggggaaaatgcctgcccgtgcagctcggagcgcgcagcccgtctctgaataagaagtgagtacaatggcgtgtttgtaaaaaaaagcttcaagtccgtctttttcaaaaaacattttgaatgctgcatgcctcatgcttcccagcgcctcgcgggagagacccggctatagagcaggagtggcggcacctgacttgctggatcctaaatctgccgctcagaactccaaaccgaggctctcgttttccacgaaacccacagtgcttgcttcccgggtggagagtgacacgaccattaatgttatgaaatggaagacggtctccacgatattcctggtggttgtcctctatctgatcatcggagccaccgtgttcaaagcattggagcagcctcatgagatttcacagaggaccaccattgtgatccagaagcaaacattcatatcccaacattcctgtgtcaattcgacggagctggatgaactcattcagcaaatagtggcagcaataaatgcagggattataccgttaggaaacacctccaatcaaatcagtcactgggatttgggaagttccttcttctttgctggcactgttattacaaccataggatttggaaacatctcaccacgcacagaaggcggcaaaatattctgtatcatctatgccttactgggaattcccctctttggttttctcttggctggagttggagatcagctaggcaccatatttggaaaaggaattgccaaagtggaagatacgtttattaagtggaatgttagtcagaccaagattcgcatcatctcaacaatcatatttatactatttggctgtgtactctttgtggctctgcctgcgatcatattcaaacacatagaaggctggagtgccctggacgccatttattttgtggttatcactctaacaactattggatttggtgactacgttgcaggtggatccgatattgaatatctggacttctataagcctgtcgtgtggttctggatccttgtagggcttgcttactttgctgctgtcctgagcatgattggagattggctccgagtgatatctaaaaagacaaaagaagaggtgggagagttcagagcacacgctgctgagtggacagccaacgtcacagccgaattcaaagaaaccaggaggcgactgagtgtggagatttatgacaagttccagcgggccacctccatcaagcggaagctctcggcagaactggctggaaaccacaatcaggagctgactccttgtaggaggaccctgtcagtgaaccacctgaccagcgagagggatgtcttgcctcccttactgaagactgagagtatctatctgaatggtttgacgccacactgtgctggtgaagagattgctgtgattgagaacatcaaatagccctctctttaaataaccttaggcatagccataggtgaggacttctctatgctctttatgactgttgctggtagcattttttaaattgtgcatgagctcaaagggggaacaaaatagatacacccatcatggtcatctatcatcaagagaatttggaattctgagccagcactttctttctgatgatgcttgttgaacggtccactttctttgatgagtggaatgacaagcaatgtctgatgcctttttgtgcccagactgttttcctctctctttccctaatgtgccataaggcctcagaatgaatgagaattgtttctggtaacaatgtagctttgagggatcagttcttaacttttcagggtctacctaactgagcctagatatggaccatttatggatgacaacaattttttttttgtaaatgacaagaaattcttatgcagccttttacctaagaaattttctgtcagtgccttatcttatgaagaaacagaacctctctagctaatgtgtggtttctccttccctgcccccacccctaggctcacctctgcagtcttttaccccagttctcccatttgaataccataccttgctggaaacagtgtgtaaaatgactgaagtgatgatgcccgaagatgaaatagatgccaaattagatggacattgaagcaacactcagcgttgcctagcgttaaaggcactgcagagaaatgaggtgcagaggtggcccctctgagtatttatttgactcaggtaccagtggtacatatatacagtgtaattatgaccaggctggtaaaattggctgctcgcaaacaatccccttttttcctggcagtatttggaatttatcatttattaataactatacatttttaaaggcagaagaagaaaatctatctatctatctatctatctatctatctatctatctatctatctatctaaatgacctgacagaagaaaactgttaaaaatggatattattggaggggatttaaaacagtgggtgtgaattatcattctgatggaaagaaaatagcaaaacaatgtgttacaagtatttgctaataaacagtatactgccagcttctaattgctttttgatgtatgaaaggcttatataattttcttttcgttgggtgacttttgccagatgagaggaggtggcacagtggtgagtgcagggcacagtcctagccttctgtgggtatacttttggagttgtgacttggctgtgagggcagaagttgaagttgggatcactgtgactttgcacatggaaaaatgcagattgcaggcataattcatctctgacattagagaaaaagctgttatagcacaatttaaattttgagagtttgctgtgtttttttttcacataaaagaggctgattattctttttagtttaattttatatcctgtaattctttggatggttccaagattcagaaaaaattcagtaaatgcaccccgtaaattgctaccctttcctttattttcatacttagatctgctgtacattgtatatatatataatttttaaaatgcagaaagaaaataatttccctaaatataattgcaaactgatttcttttacttttttgtgtgtgggggtgggagctgtatctgaataagtggcattcagattagggtcttgaaaaataaacccagaatctttaaaagaagcaaataaactaatagacgcttattttccaaaatttaaatttaagctagaaatgtaaatattcaattaatttgttaaaagtacttttataaagttaaaaaaaatccaaccaaaattttagaaagtcaggctcttttagaaagaaagctacacccatttcctcaaataactgttccgaaaatttatatggtggaatgcgccatgtataaactgtgaattgtattgacaaataaagtttgtaattaaagtcagca

SEQ ID NO: 23138 - DNA, 1200 bp, Homo sapiens
  source 1..1200: mol_type = unassigned DNA
gacaagaaaccttggaggaagaacggcattaaagatcaaaagcatgatgactcctgatgaaaacatcaccaaatgatgaacccacgagcaaaaagggatttctacttggcggcacctgacttgctggatcctaaatctgccgctcagaactccaaaccgaggctctcgttttccacgaaacccacagtgcttgcttcccgggtggagagtgacacgaccattaatgttatgaaatggaagacggtctccacgatattcctggtggttgtcctctatctgatcatcggagccaccgtgttcaaagcattggagcagcctcatgagatttcacagaggaccaccattgtgatccagaagcaaacattcatatcccaacattcctgtgtcaattcgacggagctggatgaactcattcagcaaatagtggcagcaataaatgcagggattataccgttaggaaacacctccaatcaaatcagtcactgggatttgggaagttccttcttctttgctggcactgttattacaaccataggatttggaaacatctcaccacgcacagaaggcggcaaaatattctgtatcatctatgccttactgggaattcccctctttggttttctcttggctggagttggagatcagctaggcaccatatttggaaaaggaattgccaaagtggaagatacgtttattgtggatccgatattgaatatctggacttctataagcctgtcgtgtggttctggatccttgtagggcttgcttactttgctgctgtcctgagcatgattggagattggctccgagtgatatctaaaaagacaaaagaagaggtgggagagttcagagcacacgctgctgagtggacagccaacgtcacagccgaattcaaagaaaccaggaggcgactgagtgtggagatttatgacaagttccagcgggccacctccatcaagcggaagctctcggcagaactggctggaaaccacaatcaggagctgactccttgtaggaggaccctgtcagtgaaccacctgaccagcgagagggatgtcttgcctcccttactgaagactgagagtatctatctgaatggtttgacgccacactgtgctggtgaagagattgctgtgattgagaacatcaaatagccctctctttaaataaccttaggcatagccataggtgaggacttct

SEQ ID NO: 23139 - DNA, 961 bp, Homo sapiens
  source 1..961: mol_type = unassigned DNA
accttgtaaaacaaagccggggaaaatgcctgcccgtgcagctcggagcgcgcagcccgtctctgaataagaagtgagtacaatggcgtgtttgtaaaaaaaagcttcaagtccgtctttttcaaaaaacattttgaatgctgcatgcctcatgcttcccagcgcctcgcgggagagacccggctatagagcaggagtggcggcacctgacttgctggatcctaaatctgccgctcagaactccaaaccgaggctctcgttttccacgaaacccacagtgcttgcttcccgggtggagagtgacacgaccattaatgttatgaaatggaagacggtctccacgatattcctggtggttgtcctctatctgatcatcggagccaccgtgttcaaagcattggagcagcctcatgagatttcacagaggaccaccattgtgatccagaagcaaacattcatatcccaacattcctgtgtcaattcgacggagctggatgaactcattcaggatttggaaacatctcaccacgcacagaaggcggcaaaatattctgtatcatctatgccttactgggaattcccctctttggttttctcttggctggagttggagatcagctaggcaccatatttggaaaaggaattgccaaagtggaagatacgtttattaagtggaatgttagtcagaccaagattcgcatcatctcaacaatcatatttatactatttggctgtgtactctttgtggctctgcctgcgatcatattcaaacacatagaaggctggagtgccctggacgccatttattttgtggttatcactctaacaactattggatttggtgactacgttgcaggtggatccgatattgaatatctggacttctataagcctgtcgtgtggttctggatccttgtagggcttgcttactttgctgctgtcctgagcatgattggagatt

SEQ ID NO: 23140 - DNA, 1883 bp, Homo sapiens
  source 1..1883: mol_type = unassigned DNA
aacattcacacacaaaaaggaaacagtatgggacgatggcttgttagtacaagtgactctgttttggaaattacggacaagaaaccttggaggaagaacggcattaaagatcaaaagcatgatgactcctgatgaaaacatcaccaaatgatgaacccacgagcaaaaagggatttctacttggcggcacctgacttgctggatcctaaatctgccgctcagaactccaaaccgaggctctcgttttccacgaaacccacagtgcttgcttcccgggtggagagtgacacgaccattaatgttatgaaatggaagacggtctccacgatattcctggtggttgtcctctatctgatcatcggagccaccgtgttcaaagcattggagcagcctcatgagatttcacagaggaccaccattgtgatccagaagcaaacattcatatcccaacattcctgtgtcaattcgacggagctggatgaactcattcaggatttggaaacatctcaccacgcacagaaggcggcaaaatattctgtatcatctatgccttactgggaattcccctctttggttttctcttggctggagttggagatcagctaggcaccatatttggaaaaggaattgccaaagtggaagatacgtttattaagtggaatgttagtcagaccaagattcgcatcatctcaacaatcatatttatactatttggctgtgtactctttgtggctctgcctgcgatcatattcaaacacatagaaggctggagtgccctggacgccatttattttgtggttatcactctaacaactattggatttggtgactacgttgcaggtggatccgatattgaatatctggacttctataagcctgtcgtgtggttctggatccttgtagggcttgcttactttgctgctgtcctgagcatgattggagattggctccgagtgatatctaaaaagacaaaagaagaggtgggagagttcagagcacacgctgctgagtggacagccaacgtcacagccgaattcaaagaaaccaggaggcgactgagtgtggagatttatgacaagttccagcgggccacctccatcaagcggaagctctcggcagaactggctggaaaccacaatcaggagctgactccttgtaggaggaccctgtcagtgaaccacctgaccagcgagagggatgtcttgcctcccttactgaagactgagagtatctatctgaatggtttgacgccacactgtgctggtgaagagattgctgtgattgagaacatcaaatagccctctctttaaataaccttaggcatagccataggctcacctctgcagtcttttaccccagttctcccatttgaataccataccttgctggaaacagtgtgtaaaatgactgaagtgatgatgcccgaagatgaaatagatgccaaattagatggacattgaagcaacactcagcgttgcctagcgttaaaggcactgcagagaaatgaggtgcagaggtggcccctctgagtatttatttgactcaggtaccagtggtacatatatacagtgtaattatgaccaggctggtaaaattggctgctcgcaaacaatccccttttttcctggcagtatttggaatttatcatttattaataactatacatttttaaaggcagaagaagaaaatctatctatctatctatctatctatctatctatctatctatctatctatctaaatgacctgacagaagaaaactgttaaaaatggatattattggaggggatttaaaacagtgggtgtgaattatcattctgatggaaagaaaatagcaaaacaatgtgttacaagtatttgctaataaacagtatactgccagc

SEQ ID NO: 23141 - DNA, 6162 bp, Homo sapiens
  source 1..6162: mol_type = unassigned DNA
tgcccggcgcggagagcggcgagcgcagccatgccccaggccgcctccggggcagcagcagcggcggccggggccgaggcgcgggccgggggcgccggggggccggcggcggcccgggcgggacgatgaagcggcagaacgtgcgcacgctggcgctcatcgtgtgcaccttcacctacctgctggtgggcgccgcggtcttcgacgcgctggagtcggagcccgagctgatcgagcggcagcggctggagctgcggcagcaggagctgcgggcgcgctacaacctcagccagggcggctacgaggagctggagcgcgtcgtgctgcgcctcaagccgcacaaggccggcgtgcagtggcgcttcgccggctccttctacttcgccatcaccgtcatcaccaccatcggctacgggcacgcggcacccagcacggatggcggcaaggtgttctgcatgttctacgcgctgctgggcatcccgctcacgctcgtcatgttccagagcctgggcgagcgcatcaacaccttggtgaggtacctgctgcaccgcgccaagaaggggctgggcatgcggcgcgccgacgtgtccatggccaacatggtgctcatcggcttcttctcgtgcatcagcacgctgtgcatcggcgccgccgccttctcccactacgagcactggaccttcttccaggcctactactactgcttcatcaccctcaccaccatcggcttcggcgactacgtggcgctgcagaaggaccaggccctgcagacgcagccgcagtacgtggccttcagcttcgtctacatccttacgggcctcacggtcatcggcgccttcctcaacctcgtggtgctgcgcttcatgaccatgaacgccgaggacgagaagcgcgacgccgagcaccgcgcgctgctcacgcgcaacgggcaggcgggcggcggcggagggggtggcagcgcgcacactacggacaccgcctcatccacggcggcagcgggcggcggcggcttccgcaacgtctacgcggaggtgctgcacttccagtccatgtgctcgtgcctgtggtacaagagccgcgagaagctgcagtactccatccccatgatcatcccgcgggacctctccacgtccgacacgtgcgtggagcagagccactcgtcgccgggagggggcggccgctacagcgacacgccctcgcgacgctgcctgtgcagcggggcgccacgctccgccatcagctcggtgtccacgggtctgcacagcctgtccaccttccgcggcctcatgaagcgcaggagctccgtgtgactgccccgaggggcctggagcacctgggggcgcgggcgggggacccctgctgggaggccaggagactgcccctgctgccttctgcccagtgggaccccgcacaacatccctcaccactctcccccagcacccccatctccgactgtgcctgcttgcaccagccggcaggaggccgggctctgaggacccctggggcccccatcggagccctgcaaattccgagaaatgtgaaacttggtggggtcagggaggaaaggcagaagctgggagcctcccttccctttgaaaatctaagaagctcccagtcctcagagaccctgctggtacccagacccccaccttcggaggggacttcatgttccgtgtacgtttgcatctctatttatacctctgtcctgctaggtctcccaccttcccttggttccaaaagccagggtgtctatgtccaagtcacccctactcagccccactccccttcctcatccccagctgtgtctcccaacctcccttcgtgttgttttgcatggctttgcagttatggagaaagtggaaacccagcagtccctaaagctggtccccagaaagcaggacagaaagaaggagggacaggcaggcagcaggaggggcgagctgggaggcaggaggcagcggcctgtcagtctgcagaatggtcgcactggaggttcaagctaactggcctccagccacattctcatagcaggtaggacttcagccttccagacactgcccttagaatctggaacagaagacttcagactcaccataattgctgataattacccactcttaaatttgtcgagtgatttttagcctctgaaaactctatgctggccactgattcctttgagtctcacaaaaccctacttaggtcatcagggcaggagttctcactcccattttacagatgagaatactgaggcctggacaggtgaagtgaccagagagcaaaaggcaaaggggtgggggctgggtgcagtggctcacacctgtattcccaacacttttggaggctgaggttggaggattgcttgagcccaggaatttgagaccagcctaggtgacatagtgagaccccatctctacaaaaaataaaaaattaaccaggtgtggtggcacgtgcctgggagtcccagcgacttgggaggctgaggtgggaggattgtttgagcctgggaggtcgaggctgtagtgagccctgattgcaccactgtactccagcctgggtgacagggcaagaccctgtctcaaaaaaaaaaaaaaaaatggcaaagggagacaagagcccagcctgcttgttgctagccaaagtgttctttccttccagcttggcctgctcttaaaagcaaagctcctgcagtgtacatcctggcattgtgtggctacctgggttttaaaccagaatcagaagtcccggatcagagggcactgctgaggttcagcctcttctcttcttggccaggaggcagcagctctgaatgggcccctgaggctgcacaggggcctttgtcactggggcgcatgcttacaaacagtgcagttcttgggaccgaggtaagcagggctgggtctcatggcagaaaggccaggatctggggctctaggaatttgggaattgggcagagtggccaagaaagctggcaggcatatcctatgggacatcacacctggcaccattgtcattgttggtgcctgtgtcccaagtagctagtgataagctgaggctgcagcaagaaacacccttcccaggtgggggagtttggaccagaggtgccctctgcccaccacacctgcaacccagaagcccagatggaacgcagctgacgaaggtgatgcttgaggctcacttttggggccccacagctggagccggtataatgactgggacaacatcaaggggtggatgaggggcctctcctcccgcaacactgccttcccatgctgttcccctgccagctccttaacactgccgaccaaggccagccctggcattcagggaaattggagggcagcacccgtagggtggccagcctcaggccccaccccagctgtgtcctctagtctctggggacccctggggggaagaagtctaccctgcttgtgagtcccgtctcagtgtggaggaactggctgcacgtgggacctgaaggtgccctctgtgtttatgttgggggtgggggggcagtgctggctgcctctgtcctgtgtgtgaccctgccctcgaagggtcctgtcctgtcagtcccgagggagccacaaccaaagctgcggagagaaggtggggaagggtgcagaatggccgtggggcacagcgtggcagactgttcagtctctgctgggtctttcctagggacctggaaggccagtgttgcttccccctcactccctttcactgcaggcagcctctctgcttccccaatgccttatgcctgggcacactgccacagaatatgcaatatgtgtgggtgaccatgccctcacgaccacacccccaccccgggcagcccccggactccaaaggtcgtggctgccacagcctccctcagctcttcctgcctatctgtcttcacactgagaatggcgcccaataaatgctatccacggagaccaggctcaggctccagctgcctctgtcatcgtatgcccttgctgctgccagggaggggccatctcccaccccctcccctgccggggtctacaaacatatctagctgctgggtgccgtggctcacacctatagtcacagcactaggcgggcagatcacctgaggtcagaagttcaagaccagcctggccaacatggtaaaaccccgtctctactaaaaatacaaaaattagctgagcgtggtggcgcatgtctgtagtcccagctactcggctactcaggaggctgacgcacgagaatcgcttgaacccgggaggcggaggttgcagtgagctgagatcgtgccactgcactccagcctgagcgacagagtgagaccctgtctaaaaaaaaacaataataataaaataaaataacatacctagctgactcgccatgggctcgctggcctgtgggcgacactggcttcccttttgggatttcccagaagatccagattttcttaagtccccttggaacagactaagaaaggatcaccttagaaatcacctggtcctattgtcccccccgtacatgagtaactgaggcccacagagagcaaatcgcctgcctgagtcacacagcagtgagtggcagacctaggctaggaactaggactggggattgctattccagtgctccccatcctcacacagactgcacagtccgcctggacacaccccagctgacagtggtacctcccagtcagccaggagaatggattccttctcctgcagtaggggccccctggctgagtggcctgattgactaaaacatatgtctttgaaggagagtgcatcacaagcacctttctttggggtagatttttctctgggtctagagggacagctcaggcttgggactgggcctcagaacctacgacagaccgtgagagcagacccaccttatccatctggtgccagctccccaggtcagctacagcgacccccggacttcatagagtacaatccacagtaatagcacacagctctgtacctatctagctccatgcctatctatctgcctacctttcacaaaataattcttagcaaccctgctacagccaatgattctaatacgttctgttctattgcatgttataaaatgctggtcacgatccactaaattgatgtctctacctgctaatggtttaatacctgcagattgaaatatactggagaaataaagagagtgggagtagggacactttctcccagtgcccacaccgcccctcgttacccgcataggtcaactgaaagatacagagagggaagctttgatggggggttcagagttcaaaggaagaaatgatggcacctgcactccctgcccccagaggcaggacacagccagccctcctgtgacagcactcctggcagctccttgttggcctgcagccctcagggggcttagttgccattgactcacccactcctaaggccaccacatcaaaatctgaggcttactgccctgtcccacctgcctctgtctttcttaaaacagctaaatgcaacaatagcagaaattagcttgtttttgaggttggcaatgaccagttcaaggtgactcttattttcttaagcagtgcttgcaggacataaatgtgatgacacttgccctcctttctttatcgcctgggacagactttacaaacagacctgggagaagtcccctaaggggctgcatttatccccatctccctaggggtgatcagcattgtgacagctgggcagagcagtggtgaactgcacccatgtccctgctcacatctcctaagatctcagaattgcctgaggttctagcgtgggctccttctctccagatgatgccatccccacccccctcatttccacacagcatctgaggcatcctgcactaaaagatatatgtacagcaaaacaaaaatagaaaaccagcacagcagagtggaggtggggtataaatatacccagatccccgctgatttggttactcggggtgagcatcagatggaaatagaagtttccgggggccaagagagaaagagggatgtaacgacaattcttttcaaaacgtgtcccatggtatgcctcgtggaaaaaatggttcgttggtcaaatgaatttgggaaaatgctgtcaatatcaccgactcatggagcttcgcaaggcatcttagcttaataaaggttatgaaaagtcttgcagcaaa

SEQ ID NO: 23142 - DNA, 1956 bp, Homo sapiens
  source 1..1956: mol_type = unassigned DNA
tggtgctgaagggacagctccgcggcggcggcggcggcggcggccccgggcgctgagcgggtgcccggcgcggagagcgggacgatgaagcggcagaacgtgcgcacgctggcgctcatcgtgtgcaccttcacctacctgctggtgggcgccgcggtcttcgacgcgctggagtcggagcccgagctgatcgagcggcagcggctggagctgcggcagcaggagctgcgggcgcgctacaacctcagccagggcggctacgaggagctggagcgcgtcgtgctgcgcctcaagccgcacaaggccggcgtgcagtggcgcttcgccggctccttctacttcgccatcaccgtcatcaccaccatcggctacgggcacgcggcacccagcacggatggcggcaaggtgttctgcatgttctacgcgctgctgggcatcccgctcacgctcgtcatgttccagagcctgggcgagcgcatcaacaccttggtgaggtacctgctgcaccgcgccaagaaggggctgggcatgcggcgcgccgacgtgtccatggccaacatggtgctcatcggcttcttctcgtgcatcagcacgctgtgcatcggcgccgccgccttctcccactacgagcactggaccttcttccaggcctactactactgcttcatcaccctcaccaccatcggcttcggcgactacgtggcgctgcagaaggaccaggccctgcagacgcagccgcagtacgtggccttcagcttcgtctacatccttacgggcctcacggtcatcggcgccttcctcaacctcgtggtgctgcgcttcatgaccatgaacgccgaggacgagaagcgcgacgccgagcaccgcgcgctgctcacgcgcaacgggcaggcgggcggcggcggagggggtggcagcgcgcacactacggacaccgcctcatccacggcggcagcgggcggcggcggcttccgcaacgtctacgcggaggtgctgcacttccagtccatgtgctcgtgcctgtggtacaagagccgcgagaagctgcagtactccatccccatgatcatcccgcgggacctctccacgtccgacacgtgcgtggagcagagccactcgtcgccgggagggggcggccgctacagcgacacgccctcgcgacgctgcctgtgcagcggggcgccacgctccgccatcagctcggtgtccacgggtctgcacagcctgtccaccttccgcggcctcatgaagcgcaggagctccgtgtgactgccccgaggggcctggagcacctgggggcgcgggcgggggacccctgctgggaggccaggagactgcccctgctgccttctgcccagtgggaccccgcacaacatccctcaccactctcccccagcacccccatctccgactgtgcctgcttgcaccagccggcaggaggccgggctctgaggacccctggggcccccatcggagccctgcaaattccgagaaatgtgaaacttggtggggtcagggaggaaaggcagaagctgggagcctcccttccctttgaaaatctaagaagctcccagtcctcagagaccctgctggtacccagacccccaccttcggaggggacttcatgttccgtgtacgtttgcatctctatttatacctctgtcctgctaggtctcccaccttcccttggttccaaaagccagggtgtctatgtccaagtcacccctactcagccccactccccttcctcatccccagctgtgtctcccaacctcccttcgtgttgttttgcatggctttgcagttatggagaaagtggaaacccagcagtccctaaagctggtccccagaaagcaggacagaaagaaggagggacaggcaggcagcaggaggggcgagctgggaggcaggaggcagcggcctgtcagtctgcagaatggtcgcactggaggttca

SEQ ID NO: 23143 - DNA, 1673 bp, Homo sapiens
  source 1..1673: mol_type = unassigned DNA
gtgcacgctagtgtccacacacgtgtgcgtgggctctgggtgccctggcgcggccggcacgcccatgggggccggggatgccggggcgtctgcggagagtgcaggtgggtgacgacagctccccaggagccccccgcccggcccctccaggcgggcagtggagctggcccggcgcctgggcgcgccatgcgcagcaccacgctcctggccctgctggcgctggtcttgctttacttggtgtctggtgccctggtgttccgggccctggagcagccccacgagcagcaggcccagagggagctgggggaggtccgagagaagttcctgagggcccatccgtgtgtgagcgaccaggagctgggcctcctcatcaaggaggtggctgatgccctgggagggggtgcggacccagaaaccaactcgaccagcaacagcagccactcagcctgggacctgggcagcgccttctttttctcagggaccatcatcaccaccatcggctatggcaatgtggccctgcgcacagatgccgggcgcctcttctgcatcttttatgcgctggtggggattccgctgtttgggatcctactggcaggggtcggggaccggctgggctcctccctgcgccatggcatcggtcacattgaagccatcttcttgaagtggcacgtgccaccggagctagtaagagtgctgtcggcgatgcttttcctgctgatcggctgcctgctctttgtcctcacgcccacgttcgtgttctgctatatggaggactggagcaagctggaggccatctactttgtcatagtgacgcttaccaccgtgggctttggcgactatgtggccggcgcggaccccaggcaggactccccggcctatcagccgctggtgtggttctggatcctgctcggcctggcttacttcgcctcagtgctcaccaccatcgggaactggctgcgagtagtgtcccgccgcactcgggcagagatgggcggcctcacggctcaggctgccagctggactggcacggtgacagcgcgcgtgacccagcgagccgggcccgccgccccgccgccggagaaggagcagccactgctgcctccaccgccctgtccagcgcagccgctgggcaggccccgatccccttcgccccccgagaaggctcagccgccttccccgcccacggcctcggccctggattatcccagcgagaacctggccttcatcgacgagtcctcggatacgcagagcgagcgcggctgcccgctgccccgcgcgccgagaggtcgccgccgcccaaatccccccaggaagcccgtgcggccccgcggccccgggcgtccccgagacaaaggcgtgccggtgtaggggcaggatccctggccgggcctctcaagggcttcgtttctgctctccccggcatgcctggcttgtttgaccaaagagccctctttccacgagactgaagtctggggaggaggctacagttgcctctccgcctcctccctggccccggcccttccctcacttccatccatctctagacccccccaaggctttctgtgtcgctgccccgggcgggtgtatccctcacagcacctcacgactgtgcctcaaagcctgcatcaataaatgaaaacggtctgcaccgctgcgggcgtgacgctcccgga

SEQ ID NO: 23144 - DNA, 1697 bp, Homo sapiens
  source 1..1697: mol_type = unassigned DNA
agagacgggccagctgatgcccaggtcggggccctgccgctggccacactgggctccggtccaaggctagaaggctggcccctgctgcaacccctctccggctcctctgccacccacctcccggggctggccggctgtggggagccaggcggccgcagtgacgacagctccccaggagccccccgcccggcccctccaggcgggcagtggagctggcccggcgcctgggcgcgccatgcgcagcaccacgctcctggccctgctggcgctggtcttgctttacttggtgtctggtgccctggtgttccgggccctggagcagccccacgagcagcaggcccagagggagctgggggaggtccgagagaagttcctgagggcccatccgtgtgtgagcgaccaggagctgggcctcctcatcaaggaggtggctgatgccctgggagggggtgcggacccagaaaccaactcgaccagcaacagcagccactcagcctgggacctgggcagcgccttctttttctcagggaccatcatcaccaccatcggctatggcaatgtggccctgcgcacagatgccgggcgcctcttctgcatcttttatgcgctggtggggattccgctgtttgggatcctactggcaggggtcggggaccggctgggctcctccctgcgccatggcatcggtcacattgaagccatcttcttgaagtggcacgtgccaccggagctagtaagagtgctgtcggcgatgcttttcctgctgatcggctgcctgctctttgtcctcacgcccacgttcgtgttctgctatatggaggactggagcaagctggaggccatctactttgtcatagtgacgcttaccaccgtgggctttggcgactatgtggccggcgcggaccccaggcaggactccccggcctatcagccgctggtgtggttctggatcctgctcggcctggcttacttcgcctcagtgctcaccaccatcgggaactggctgcgagtagtgtcccgccgcactcgggcagagatgggcggcctcacggctcaggctgccagctggactggcacggtgacagcgcgcgtgacccagcgagccgggcccgccgccccgccgccggagaaggagcagccactgctgcctccaccgccctgtccagcgcagccgctgggcaggccccgatccccttcgccccccgagaaggctcagccgccttccccgcccacggcctcggccctggattatcccagcgagaacctggccttcatcgacgagtcctcggatacgcagagcgagcgcggctgcccgctgccccgcgcgccgagaggtcgccgccgcccaaatccccccaggaagcccgtgcggccccgcggccccgggcgtccccgagacaaaggcgtgccggtgtaggggcaggatccctggccgggcctctcaagggcttcgtttctgctctccccggcatgcctggcttgtttgaccaaagagccctctttccacgagactgaagtctggggaggaggctacagttgcctctccgcctcctccctggccccggcccttccctcacttccatccatctctagacccccccaaggctttctgtgtcgctgccccgggcgggtgtatccctcacagcacctcacgactgtgcctcaaagcctgcatcaataaatgaaaacggtctgca

SEQ ID NO: 23145 - DNA, 1723 bp, Homo sapiens
  source 1..1723: mol_type = unassigned DNA
caggcttaggctctctttcggcctcccactcgccttcctttcccttctcggtgccctcctctctttcctcacccggtagtcccagacaggggctgagggccgggcagcggaggtaaggggaaggctggagataggagggggactgggtgtgtccagccagagggatgtctgtggacagtgcagctgggggctttatggatctttgggtgtgtaggggatagaggaggagggtgtgggtgtcaggccagctcagtgaccccagcatccctggttttgcccgcagtgacgacagctccccaggagccccccgcccggcccctccaggcgggcagtggagctggcccggcgcctgggcgcgccatgcgcagcaccacgctcctggccctgctggcgctggtcttgctttacttggtgtctggtgccctggtgttccgggccctggagcagccccacgagcagcaggcccagagggagctgggggaggtccgagagaagttcctgagggcccatccgtgtgtgagcgaccaggagctgggcctcctcatcaaggaggtggctgatgccctgggagggggtgcggacccagaaaccaactcgaccagcaacagcagccactcagcctgggacctgggcagcgccttctttttctcagggaccatcatcaccaccatcggctatggcaatgtggccctgcgcacagatgccgggcgcctcttctgcatcttttatgcgctggtggggattccgctgtttgggatcctactggcaggggtcggggaccggctgggctcctccctgcgccatggcatcggtcacattgaagccatcttcttgaagtggcacgtgccaccggagctagtaagagtgctgtcggcgatgcttttcctgctgatcggctgcctgctctttgtcctcacgcccacgttcgtgttctgctatatggaggactggagcaagctggaggccatctactttgtcatagtgacgcttaccaccgtgggctttggcgactatgtggccggcgcggaccccaggcaggactccccggcctatcagccgctggtgtggttctggatcctgctcggcctggcttacttcgcctcagtgctcaccaccatcgggaactggctgcgagtagtgtcccgccgcactcgggcagagatgggcggcctcacggctcaggctgccagctggactggcacggtgacagcgcgcgtgacccagcgagccgggcccgccgccccgccgccggagaaggagcagccactgctgcctccaccgccctgtccagcgcagccgctgggcaggccccgatccccttcgccccccgagaaggctcagccgccttccccgcccacggcctcggccctggattatcccagcgagaacctggccttcatcgacgagtcctcggatacgcagagcgagcgcggctgcccgctgccccgcgcgccgagaggtcgccgccgcccaaatccccccaggaagcccgtgcggccccgcggccccgggcgtccccgagacaaaggcgtgccggtgtaggggcaggatccctggccgggcctctcaagggcttcgtttctgctctccccggcatgcctggcttgtttgaccaaagagccctctttccacgagactgaagtctggggaggaggctacagttgcctctccgcctcctccctggccccggcccttccctcacttccatccatctctagacccc

SEQ ID NO: 23146 - DNA, 2733 bp, Homo sapiens
  source 1..2733: mol_type = unassigned DNA
cagtcggcaccggcgaggccgtgctggaacccgggcctcagccgcagccgcagcggggccgacatgacgacagctccccaggagccccccgcccggcccctccaggcgggcagtggagctggcccggcgcctgggcgcgccatgcgcagcaccacgctcctggccctgctggcgctggtcttgctttacttggtgtctggtgccctggtgttccgggccctggagcagccccacgagcagcaggcccagagggagctgggggaggtccgagagaagttcctgagggcccatccgtgtgtgagcgaccaggagctgggcctcctcatcaaggaggtggctgatgccctgggagggggtgcggacccagaaaccaactcgaccagcaacagcagccactcagcctgggacctgggcagcgccttctttttctcagggaccatcatcaccaccatcggctatggcaatgtggccctgcgcacagatgccgggcgcctcttctgcatcttttatgcgctggtggggattccgctgtttgggatcctactggcaggggtcggggaccggctgggctcctccctgcgccatggcatcggtcacattgaagccatcttcttgaagtggcacgtgccaccggagctagtaagagtgctgtcggcgatgcttttcctgctgatcggctgcctgctctttgtcctcacgcccacgttcgtgttctgctatatggaggactggagcaagctggaggccatctactttgtcatagtgacgcttaccaccgtgggctttggcgactatgtggccggcgcggaccccaggcaggactccccggcctatcagccgctggtgtggttctggatcctgctcggcctggcttacttcgcctcagtgctcaccaccatcgggaactggctgcgagtagtgtcccgccgcactcgggcagagatgggcggcctcacggctcaggctgccagctggactggcacggtgacagcgcgcgtgacccagcgagccgggcccgccgccccgccgccggagaaggagcagccactgctgcctccaccgccctgtccagcgcagccgctgggcaggccccgatccccttcgccccccgagaaggctcagccgccttccccgcccacggcctcggccctggattatcccagcgagaacctggccttcatcgacgagtcctcggatacgcagagcgagcgcggctgcccgctgccccgcgcgccgagaggtcgccgccgcccaaatccccccaggaagcccgtgcggccccgcggccccgggcgtccccgagacaaaggcgtgccggtgtaggggcaggatccctggccgggcctctcaagggcttcgtttctgctctccccggcatgcctggcttgtttgaccaaagagccctctttccacgagactgaagtctggggaggaggctacagttgcctctccgcctcctccctggccccggcccttccctcacttccatccatctctagacccccccaaggctttctgtgtcgctgccccgggcgggtgtatccctcacagcacctcacgactgtgcctcaaagcctgcatcaataaatgaaaacggtctgcaccgctgcgggcgtgacgctcccggacgcgagtgggtgtggaattgctttcctcgggccaccgtgggggcacctctggcctcccgtgacccccaggccgagggtccccgggcacccaggtcggtcaagtctcggccctctcaggcccgcgtctctgcctggaggagactgtgtagggtccggcgtggggatcagccaggatgggctgcgcgtctccagcctctgcacacacattggcgggtggggtgcagggagggagaggcaggggagagagaatggcatctcgcgtggagggctgtcgtttgaactctcccagcgcgagagaccctgccccgcccccttcctggagcgttgactcccttctcgtctcgaggcctgtggcgtctgggtccgttggggcagaaccatggaggaaaagccttcgaaagtgtcgctcaagtcttccgaccgccaaggctcggacgaggagagcgtgcatagcgacactcgggacctgtggaccacgaccacgctgtcccaggcacagctgaacatgccgctgtccgaggtctgcgagggcttcgacgaggagggccgcaacattagcaagacccgcgggtggcacagcccggggcggggctcgttggacgaggggtacaaggccagccacaagccggaggaactggacgagcacgcgctggtggagctggagttgcaccgcggcagctccatggaaatcaatctgggggagaaggacactgcatcccagatcgaggccgaaaagtcttcctcaatgtcatcactcaatattgcgaagcacatgccccatcgagcctactgggcagagcagcagagcaggctgccactgcccctgatggaactcatggagaatgaagctctggaaatcctcaccaaagccctccggagctaccagttagggatcggcagggaccacttcctgactaaggagctgcagcgatacatcgaagggctcaagaagcgccggagcaagaggctgtacgtgaattaaaaacgccaccttgggctcgagcagcgacccgaaccagccccgtgccagcccggtccccagacccaagcctgaccccatccgagtggaatttgagtcctaaagaaataaaagagtcgatgcatg

SEQ ID NO: 23147 - DNA, 2778 bp, Homo sapiens
  source 1..2778: mol_type = unassigned DNA
gtgcacgctagtgtccacacacgtgtgcgtgggctctgggtgccctggcgcggccggcacgcccatgggggccggggatgccggggcgtctgcggagagtgcaggtgggtgacgacagctccccaggagccccccgcccggcccctccaggcgggcagtggagctggcccggcgcctgggcgcgccatgcgcagcaccacgctcctggccctgctggcgctggtcttgctttacttggtgtctggtgccctggtgttccgggccctggagcagccccacgagcagcaggcccagagggagctgggggaggtccgagagaagttcctgagggcccatccgtgtgtgagcgaccaggagctgggcctcctcatcaaggaggtggctgatgccctgggagggggtgcggacccagaaaccaactcgaccagcaacagcagccactcagcctgggacctgggcagcgccttctttttctcagggaccatcatcaccaccatcggctatggcaatgtggccctgcgcacagatgccgggcgcctcttctgcatcttttatgcgctggtggggattccgctgtttgggatcctactggcaggggtcggggaccggctgggctcctccctgcgccatggcatcggtcacattgaagccatcttcttgaagtggcacgtgccaccggagctagtaagagtgctgtcggcgatgcttttcctgctgatcggctgcctgctctttgtcctcacgcccacgttcgtgttctgctatatggaggactggagcaagctggaggccatctactttgtcatagtgacgcttaccaccgtgggctttggcgactatgtggccggcgcggaccccaggcaggactccccggcctatcagccgctggtgtggttctggatcctgctcggcctggcttacttcgcctcagtgctcaccaccatcgggaactggctgcgagtagtgtcccgccgcactcgggcagagatgggcggcctcacggctcaggctgccagctggactggcacggtgacagcgcgcgtgacccagcgagccgggcccgccgccccgccgccggagaaggagcagccactgctgcctccaccgccctgtccagcgcagccgctgggcaggccccgatccccttcgccccccgagaaggctcagccgccttccccgcccacggcctcggccctggattatcccagcgagaacctggccttcatcgacgagtcctcggatacgcagagcgagcgcggctgcccgctgccccgcgcgccgagaggtcgccgccgcccaaatccccccaggaagcccgtgcggccccgcggccccgggcgtccccgagacaaaggcgtgccggtgtaggggcaggatccctggccgggcctctcaagggcttcgtttctgctctccccggcatgcctggcttgtttgaccaaagagccctctttccacgagactgaagtctggggaggaggctacagttgcctctccgcctcctccctggccccggcccttccctcacttccatccatctctagacccccccaaggctttctgtgtcgctgccccgggcgggtgtatccctcacagcacctcacgactgtgcctcaaagcctgcatcaataaatgaaaacggtctgcaccgctgcgggcgtgacgctcccggacgcgagtgggtgtggaattgctttcctcgggccaccgtgggggcacctctggcctcccgtgacccccaggccgagggtccccgggcacccaggtcggtcaagtctcggccctctcaggcccgcgtctctgcctggaggagactgtgtagggtccggcgtggggatcagccaggatgggctgcgcgtctccagcctctgcacacacattggcgggtggggtgcagggagggagaggcaggggagagagaatggcatctcgcgtggagggctgtcgtttgaactctcccagcgcgagagaccctgccccgcccccttcctggagcgttgactcccttctcgtctcgaggcctgtggcgtctgggtccgttggggcagaaccatggaggaaaagccttcgaaagtgtcgctcaagtcttccgaccgccaaggctcggacgaggagagcgtgcatagcgacactcgggacctgtggaccacgaccacgctgtcccaggcacagctgaacatgccgctgtccgaggtctgcgagggcttcgacgaggagggccgcaacattagcaagacccgcgggtggcacagcccggggcggggctcgttggacgaggggtacaaggccagccacaagccggaggaactggacgagcacgcgctggtggagctggagttgcaccgcggcagctccatggaaatcaatctgggggagaaggacactgcatcccagatcgaggccgaaaagtcttcctcaatgtcatcactcaatattgcgaagcacatgccccatcgagcctactgggcagagcagcagagcaggctgccactgcccctgatggaactcatggagaatgaagctctggaaatcctcaccaaagccctccggagctaccagttagggatcggcagggaccacttcctgactaaggagctgcagcgatacatcgaagggctcaagaagcgccggagcaagaggctgtacgtgaattaaaaacgccaccttgggctcgagcagcgacccgaaccagccccgtgccagcccggtccccagacccaagcctgaccccatccgagtggaatttgagtcctaaagaaataaaagagtcgatgcatg

SEQ ID NO: 23148 - DNA, 3756 bp, Homo sapiens
  source 1..3756: mol_type = unassigned DNA
agcgacgcgtggagaagcggcccacgtgtctgcccagagtcaagtcctgtgttcttcccgctccttacgcatccgcggtccagggcgccctttcagccccgctggtgttcgcccaccccgggccgcgtgagtggggccccacgcagctccccgcactccgtgggccaacttggccaagcaactctgtccggggagcggtgcttgcggggggtgagtaccgggcactgcgcatgcggagctccaaattcaaacagctgttttcagaggctggagggcgggcggactggtagcagctggggctaggagaggctttctctaggaggcggccgctcgggagccatggtggaccggggccctctgctcacctcggccatcatcttctacctggccatcggggcggcgatcttcgaagtgctggaggagccacactggaaggaggccaagaaaaactactacacacagaagctgcatctgctcaaggagttcccgtgcctgggtcaggagggcctggacaagatcctagaggtggtatctgatgctgcaggacagggtgtggccatcacagggaaccagaccttcaacaactggaactggcccaatgcaatgatttttgcagcgaccgtcattaccaccattggatatggcaatgtggctcccaagacccccgccggtcgcctcttctgtgttttctatggtctcttcggggtgccgctctgcctgacgtggatcagtgccctgggcaagttcttcgggggacgtgccaagagactagggcagttccttaccaagagaggtgtgagtctgcggaaggcgcagatcacgtgcacagtcatcttcatcgtgtggggcgtcctagtccacctggtgatcccacccttcgtattcatggtgactgaggggtggaactacatcgagggcctctactactccttcatcaccatctccaccatcggcttcggtgactttgtggccggtgtgaaccccagcgccaactaccacgccctgtaccgctacttcgtggagctctggatctacttggggctggcctggctgtccctttttgtcaactggaaggtgagcatgtttgtggaagtccacaaagccattaagaagcggcggcggcgacggaaggagtcctttgagagctccccacactcccggaaggccctgcaggtgaaggggagcacagcctccaaggacgtcaacatcttcagctttctttccaagaaggaagagacctacaacgacctcatcaagcagatcgggaagaaggccatgaagacaagcgggggtggggagacgggcccgggcccagggctggggcctcaaggcggtgggctcccagcactgcccccttccctggtgcccctggtagtctactccaagaaccgggtgcccaccttggaagaggtgtcacagacactgaggagcaaaggccacgtatcaaggtccccagatgaggaggctgtggcacgggcccctgaagacagctcccctgcccccgaggtgttcatgaaccagctggaccgcatcagcgaggaatgcgagccatgggacgcccaggactaccacccactcatcttccaggacgccagcatcaccttcgtgaacacggaggctggcctctcagacgaggagacctccaagtcctcgctagaggacaacttggcaggggaggagagcccccagcagggggctgaagccaaggcgcccctgaacatgggcgagttcccctcctcctccgagtccaccttcaccagcactgagtctgagctctctgtgccttacgaacagctgatgaatgagtacaacaaggctaacagccccaagggcacatgaggcagggccggctccccaccccacctttgatggcctcttcccccctcaccctagggtgtcccgagatgaccgggacgcctggcccctggtgggggggcagcctcggaactgggagtggggggccaggggccttcctaaccttccatcatcctcagctagatgtatgcccgggacagggcctctgttctccagctgaaccataccctggctgtgggggcatctgtcctgagcttggctggtgtatctcacaatgcaaagacatgctggctggcgggacaggtgggcaggactgaccctgaggaggccttgcctgcagggtctttgtctcaccatttggtggagtatcacacggttctctgaggtctggggcctcagctgtttaagtttaccggtattactgagctcggcatttggagagggagctctgaagtgtctggggaggtaccgctgtgcgtggggtcaggtgtttccgtaccacagcaggagcagggcccgcccgcatcccagctgtgggcctgccggtcaggtcgggcacctactacaaaccgtagtggggtggaggctgctggaggtgggagtgaggagatgagggcagggtctcaaacagtcctgactcacagggcctggaaacaagtcctatgtgggcctggggcctggggtcctcatcctccttgttggtctactcaggcccagcccagagctgtgttccctgtctcaggtcaagcagtggcagacgcaaggctttctgtgggcccccaagtggtaggagggagagtagcagagcatgggttactggaagccgggactgctagggctggtggccagggagctgcaagagtgaggctcagctctggctggttctgcccttacccctcctgcccgcctgagaactgcacaccctgcccgctggccccaggacctgcactcccaatcctgctgtcttctccttccctgtgccctgaacaaggacctcactgcccgccttcccctcccaccagcccccttgggccaggcagggtgaggccaaattgctcttggcccacaaatgggtgatggtcagatatgtgaatcaagctcctttctctagctagtgtttgatgtgcacgtgtgtgtgcacagtgcgtgtgtgcacacgcacacctgtgcactcgtgtgtgtttaagaaaggaaaggatttgggctggggagcaaaagataatgtgaaactgttggtggactctctggtgaggggtgggcagaacttgctgctactagagttcttgggttctccatgatgttcaccctggggctggcccactgtgtcctgaatgtttttgttattttttgttttattttttaaacaaactgctgtttttatatacctggaatctgttgttggcttcagagccagtggttaaagagcagggtcccaaggattgggagatctagtgtctgccctcctgccctgcaactcaattgggcctttttcggtgacctcatccaaggccatgatgtcaagggccatgtccccaagcagaggtggagaaggggacactgaggtgagcaaaagcaggaaggggcatccactgcgggtgactggaggccgggcaggaagcaagtcatcagagccgctcagctccgttcactctctgccttctgccccactactgtggggcagtggggccagagcccacctccccaacatgtgaagacagtgatgggcacgtgcccacacccccacttctctagccgtttgcagaggccgccacccagcaggggcctgaaaaggagcagcctcgtatttttctgtgaaatgttttaatgaaccatgttgttgctggttgtcctggcatcgcgcacactgtatgtacatactggcaacgatgtcaaatgtaatttattttaacatttttacaataaaacatgaggtggacaggc

SEQ ID NO: 23149 - DNA, 2648 bp, Homo sapiens
  source 1..2648: mol_type = unassigned DNA
gctgccgcgcctgtagcactcccggaactggaactaggtgccagacggtccggaggcgggggccacgtcagcggggccacccagggctcgcggggtcccggtgggtgccatgcggaggggcgcgcttctggcgggcgccttggccgcgtacgccgcgtacctggtgctgggcgcgctgttggtggcgcggctggaggggccgcacgaagccaggctccgagccgagctggagacgctgcgggcgcagctgcttcagcgcagcccgtgtgtggctgcccccgccctggacgccttcgtggagcgagtgctggcggccggacggctggggcgggtcgtgcttgctaacgcttcggggtccgccaacgcctcggaccccgcctgggacttcgcctctgctctcttcttcgccagcacgctgatcaccaccgtgggctatgggtacacaacgccactgactgatgcgggcaaggccttctccatcgcctttgcgctcctgggcgtgccgaccaccatgctgctgctgaccgcctcagcccagcgcctgtcactgctgctgactcacgtgcccctgtcttggctgagcatgcgttggggctgggacccccggcgggcggcctgctggcacttggtggccctgttgggggtcgtagtgaccgtctgctttctggtgccggctgtgatctttgcccacctcgaggaggcctggagcttcttggatgccttctacttctgctttatctctctgtccaccatcggcctgggcgactacgtgcccggggaggcccctggccagccctaccgggccctctacaaggtgctggtcacagtctacctcttcctgggcctggtggccatggtgctggtgctgcagaccttccgccacgtgtccgacctccacggcctcacggagctcatcctgctgccccctccgtgccctgccagtttcaatgcggatgaggacgatcgggtggacatcctgggcccccagccggagtcgcaccagcaactctctgccagctcccacaccgactacgcttccatccccaggtagctggggcagcctctgccaggcttgggtgtgcctggcctgggactgaggggtccaggcgaccagagctggctgtacaggaatgtccacgagcacagcaggtgatcttgaggccttgccgtccaccgtctctcctttgtttcccagcatctggctgggatgtgaagggcagcactccctgtccccatgtcccgggctccactgggcaccaacataaccttgttctctgtcctttctctcatcctctttacactgtgtctctctggctctctggcattctcgctgcctctgtctttccctcttgctgtctctgtttctcattctctttcatgttccgtctgtgtctctcaattaaccactcgtcaactgctgattctactgggctgtgggctcagacctcatttcaggcaccagattggtcgctacaccctggacaagtgactgcccgtctctgagccttgatttcctcagctgccaaatgggaagaatagaagaatttgcccctaaacccctcctgtgtgctggccctgtgctagacagtgctggagacatagttgggggtggagaactgcccttatggagcttgcagtccagtgaggtggacagacctgtccccagacagtgatggcccaaaatggtcaggactttaatggaggaggtgaggtgttgaaagcacaggcagagtggtcagggctgaagtcggagaagcatagggactaggcccaatccagcctggaaagtcagggaggacttcctagaggaagggacatcgaactaagacctgaactatgagaaataggcaggaagaagttgtacctgactcatttttctcaggtgtctccagggagcaggacccatggagggacccctggtgtaggcctgggcgatagactcttcctcagcagcctggcaggcaggaaacagacataggaccccagcccagatctgaatggcatgggaggtgctgcccttaaccatgacaccattgtaagagctgtccacatttgtatgttgtgccctggaatcagcctggttgagctcaaatcccaacttagccacgtctggcctgtgtccttgggcagtcacactacctctctgattttgtttccttatctgtaaaatggtgatcatcataatacaacttcaaaaggatttcaggctgagtgtggtggctcacgcctatacacccagcactttggaaggctgaggaaggaggatcgcttgaggccaggagtttgagactagcctaggcaacacagtgaggccttatctcaacaacaaccacaaaatctaaaaattagctgggtgtggtggtgcatgcctgtgatcctggctacttcagaggctgaggtggaaggatcacttgaggccaggagtttgaggctgcagtgagttatgatggcactgctgcactccagcctgcgggacagagtgagaccctgtctgaaagaaagagagaaagaaagaaagaaagagagagaaagaaagaaagaaagaaagggaaagatggaaggaaggaaggaaaaagaaagagaaagagagagagagagaaagaaaaagaaagaaaagtaagaaagaaaaaagaaaaagaaagaaaagt

SEQ ID NO: 23150 - DNA, 1298 bp, Homo sapiens
  source 1..1298: mol_type = unassigned DNA
atccccaccatcccagctgctgtgaaatgggcaaatgtcttgcctccaggacctgggaagggtgatgcagctcacctccctcctgttcacaccccagccaccccagccatcccagccgggtcccagccacccacacagcacctcctcctggccccgccctgcccagcccctcccaggtgcctgaggtggagccgccagttcccacagcaccccagcggcctgccatggggggtctaaggccctggtcccgatacgggctcctggttgtggcccacttgctggccctggggcttggggctgtggtgttccaggccctggaggggcctcctgcatgcaggcttcaggctgagctcagggcagagctggcagccttccaggcagagcatagggcctgcctgccacccggagctctggaagagctgctgggcactgccctggccacccaggcccatggggtctccaccctgggcaacagctcagagggcaggacctgggaccttccctcagccctgctcttcgctgccagcatcctcaccaccacaggttatggccacatggccccactatcgccaggcggaaaggccttctgcatggtctatgcagccctggggctgccagcctccttagctctcgtggccaccctgcgccattgcctgctgcctgtgctcagccgcccacgtgcctgggtagcggtccactggcagctgtcaccggccagggctgcgctgctgcaggcagttgcactgggactgctggtggccagcagctttgtgctgctgccagcgctggtgctgtggggccttcagggcgactgcagcctgctgggggccgtctacttctgcttcagctcgctcagcaccattggcctggaggacttgctgcccggccgcggccgcagcctgcaccccgtgatttaccacctgggccagctcgcacttcttggttacttgcttctaggactcttggccatgctgctggcagtggagaccttctctgagctgccgcaggtccgtgccatggggaagttcttcagacccagtggtcctgtgactgctgaggaccaaggtggcatcctagggcaggatgaactggctctgagcaccctgccgcccgcggccccagcttcaggacaagcccctgcttgctgaagcgtcaggtgaccgagttcagctccgtaaggtggcggcacctgaggaggaagcagccaggagtggctggggaagaatctggagatggagccgcggtgagggtgggcgggaggcctcagaggatactgttaatcataaaatgagcaacga

SEQ ID NO: 23151 - DNA, 1283 bp, Homo sapiens
  source 1..1283: mol_type = unassigned DNA
gagccgccagttcccacagcaccccagcggcctgccatggggggtctaaggccctggtcccgatacgggctcctggttgtggcccacttgctggccctggggcttggggctgtggtgttccaggccctggaggggcctcctgcatgcaggcttcaggctgagctcagggcagagctggcagccttccaggcagagcatagggcctgcctgccacccggagctctggaagagctgctgggcactgccctggccacccaggcccatggggtctccaccctgggcaacagctcagagggcaggacctgggaccttccctcagccctgctcttcgctgccagcatcctcaccaccacaggttatggccacatggccccactatcgccaggcggaaaggccttctgcatggtctatgcagccctggggctgccagcctccttagctctcgtggccaccctgcgccattgcctgctgcctgtgctcagccgcccacgtgcctgggtagcggtccactggcagctgtcaccggccagggctgcgctgctgcaggcagttgcactgggactgctggtggccagcagctttgtgctgctgccagcgctggtgctgtggggccttcagggcgactgcagcctgctgggggccgtctacttctgcttcagctcgctcagcaccattggcctggaggacttgctgcccggccgcggccgcagcctgcaccccgtgatttaccacctgggccagctcgcacttcttggtggagggacctcactccagggcacggcgtgggaggggtagtcgaagagctctggtggcagcgttgagaagggggtgagtggtgccagttgccagggcaagtcactgcgctgggaggtgggcggggagcatcaccagaacccaggcgctgccccagcaccttctcctccccaggttacttgcttctaggactcttggccatgctgctggcagtggagaccttctctgagctgccgcaggtccgtgccatggggaagttcttcagacccagtggtcctgtgactgctgaggaccaaggtggcatcctagggcaggatgaactggctctgagcaccctgccgcccgcggccccagcttcaggacaagcccctgcttgctgaagcgtcaggtgaccgagttcagctccgtaaggtggcggcacctgaggaggaagcagccaggagtggctggggaagaatctggagatggagccgcggtgagggtgggcgggaggcctcagaggatactgttaatcataaaatgagcaacga

SEQ ID NO: 23152 - DNA, 1563 bp, Homo sapiens
  source 1..1563: mol_type = unassigned DNA
atccccaccatcccagctgctgtgaaatgggcaaatgtcttgcctccaggacctgggaagggtgatgcagctcacctccctcctgttcacaccccagccaccccagccatcccagccgggtcccagccacccacacagcacctcctcctggccccgccctgcccagcccctcccaggtgcctgaggtggagccgccagttcccacagcaccccagcggcctgccatggggggtctaaggccctggtcccgatacgggctcctggttgtggcccacttgctggccctggggcttggggctgtggtgttccaggccctggaggggcctcctgcatgcaggcttcaggctgagctcagggcagagctggcagccttccaggcagagcatagggcctgcctgccacccggagctctggaagagctgctgggcactgccctggccacccaggcccatggggtctccaccctgggcaacagctcagagggcaggacctgggaccttccctcagccctgctcttcgctgccagcatcctcaccaccacaggttatggccacatggccccactatcgccaggcggaaaggccttctgcatggtctatgcagccctggggctgccagcctccttagctctcgtggccaccctgcgccattgcctgctgcctgtgctcagccgcccacgtgcctgggtagcggtccactggcagctgtcaccggccagggctgcgctgctgcaggcagttgcactgggactgctggtggccagcagctttgtgctgctgccagcgctggtgctgtggggccttcagggcgactgcagcctgctgggggccgtctacttctgcttcagctcgctcagcaccattggcctggaggacttgctgcccggccgcggccgcagcctgcaccccgtgatttaccacctgggccagctcgcacttcttggtaagtccagccacctaacagcgtgtgggggaagggggaagaggagcctggactaggactcccataaatcactggggggctgggccttgcaggtggagggacctcactccagggcacggcgtgggaggggtagtcgaagagctctggtggcagcgttgagaagggggtgagtggtgccagttgccagggcaagtcactgcgctgggaggtgggcggggagcatcaccagaacccaggcgctgccccagcaccttctcctccccaggttacttgcttctaggactcttggccatgctgctggcagtggagaccttctctgagctgccgcaggtccgtgccatggggaagttcttcagacccagtggtcctgtgactgctgaggaccaaggtggcatcctagggcaggatgaactggctctgagcaccctgccgcccgcggccccagcttcaggacaagcccctgcttgctgaagcgtcaggtgaccgagttcagctccgtaaggtggcggcacctgaggaggaagcagccaggagtggctggggaagaatctggagatggagccgcggtgagggtgggcgggaggcctcagaggatactgttaatcataaaatgagcaacga

SEQ ID NO: 23153 - DNA, 1372 bp, Homo sapiens
  source 1..1372: mol_type = unassigned DNA
atccccaccatcccagctgctgtgaaatgggcaaatgtcttgcctccaggacctgggaagggtgatgcagctcacctccctcctgttcacaccccagccaccccagccatcccagccgggtcccagccacccacacagcacctcctcctggccccgccctgcccagcccctcccaggtgcctgaggtggagccgccagttcccacagcaccccagcggcctgccatggggggtctaaggccctggtcccgatacgggctcctggttgtggcccacttgctggccctggggcttggggctgtggtgttccaggccctggaggggcctcctgcatgcaggcttcaggctgagctcagggcagagctggcagccttccaggcagagcatagggcctgcctgccacccggagctctggaagagctgctgggcactgccctggccacccaggcccatggggtctccaccctgggcaacagctcagagggcaggacctgggaccttccctcagccctgctcttcgctgccagcatcctcaccaccacaggttatggccacatggccccactatcgccaggcggaaaggccttctgcatggtctatgcagccctggggctgccagcctccttagctctcgtggccaccctgcgccattgcctgctgcctgtgctcagccgcccacgtgcctgggtagcggtccactggcagctgtcaccggccagggctgcgctgctgcaggcagttgcactgggactgctggtggccagcagctttgtgctgctgccagcgctggtgctgtggggccttcagggcgactgcagcctgctgggggccgtctacttctgcttcagctcgctcagcaccattggcctggaggacttgctgcccggccgcggccgcagcctgcaccccgtgatttaccacctgggccagctcgcacttcttggtggagggacctcactccagggcacggcgtgggaggggtagtcgaagagctctggtggcagcgttgagaagggggttacttgcttctaggactcttggccatgctgctggcagtggagaccttctctgagctgccgcaggtccgtgccatggggaagttcttcagacccagtggtcctgtgactgctgaggaccaaggtggcatcctagggcaggatgaactggctctgagcaccctgccgcccgcggccccagcttcaggacaagcccctgcttgctgaagcgtcaggtgaccgagttcagctccgtaaggtggcggcacctgaggaggaagcagccaggagtggctggggaagaatctggagatggagccgcggtgagggtgggcgggaggcctcagaggatactgttaatcataaaatgagcaacga

SEQ ID NO: 23154 - DNA, 445 bp, Homo sapiens
  source 1..445: mol_type = unassigned DNA
cctgcaccccgtgatttaccacctgggccagctcgcacttcttggtggagggacctcactccagggcacggcgtgggaggggtagtcgaagagctctggtggcagcgttgagaagggggactcttggccatgctgctggcagtggagaccttctctgagctgccgcaggtccgtgccatggggaagttcttcagacccagtggtcctgtgactgctgaggaccaaggtggcatcctagggcaggatgaactggctctgagcaccctgccgcccgcggccccagcttcaggacaagcccctgcttgctgaagcgtcaggtgaccgagttcagctccgtaaggtggcggcacctgaggaggaagcagccaggagtggctggggaagaatctggagatggagccgcggtgagggtgggcgggaggcctcagaggatactgttaatcat

SEQ ID NO: 23155 - DNA, 1303 bp, Homo sapiens
  source 1..1303: mol_type = unassigned DNA
gtgggacgcgcgcggctgtgagcctgcgggacatgccccccgcgccggctccttgctggcggccatgaagaggcagaacgtgcggactctgtccctcatcgtctgcaccttcacctacctgctggtgggcgccgccgtgttcgacgccctcgagtcggaccacgagatgcgcgaggaggagaaactcaaagccgaggagatccggatcaaggggaagtacaacatcagcagcgaggactaccggcagctggagctggtgatcctgcagtcggaaccgcaccgcgccggcgtccagtggaaattcgccggctccttctactttgcgatcacggtcatcaccaccataggttatgggcacgctgcacctggcaccgatgcgggcaaggccttctgcatgttctacgccgtgctgggcatcccgctgacactggtcatgttccagagcctgggcgagcgcatgaacaccttcgtgcgctacctgctgaagcgcattaagaagtgctgtggcatgcgcaacactgacgtgtctatggagaacatggtgactgtgggcttcttctcctgcatggggacgctgtgcatcggggcggccgccttctcccagtgtgaggagtggagcttcttccacgcctactactactgcttcatcacgttgactaccattgggttcggggactacgtggccctgcagaccaagggtgccctgcagaagaagccgctctacgtggcctttagctttatgtatatcctggtggggctgacggtcatcggggccttcctcaacctggtcgtcctcaggttcttgaccatgaacagtgaggatgagcggcgggatgctgaagagagggcatccctcgccggaaaccgcaacagcatggtcattcacatccctgaggagccgcggcccagccggcccaggtacaaggcggacgtcccggacctgcagtctgtgtgctcctgcacctgctaccgctcgcaggactatggcggccgctcggtggcaccgcagaactccttcagcgccaagcttgccccccactacttccactccatctcttacaagatcgaggagatctcaccaagcacattaaaaaacagcctcttcccatcgcctattagctccatctctcctgggttacacagctttaccgaccaccagaggctgatgaaacgccggaagtccgtttaggggaactaactgcacattcaagagaggcgtccgtggatgctgggtctcactgccaaagccgaacacggcttcgggatttctgccttctcaagtggacctctgctgtgctgggcg

SEQ ID NO: 23156 - DNA, 1441 bp, Homo sapiens
  source 1..1441: mol_type = unassigned DNA
gtgggacgcgcgcggctgtgagcctgcgggacatgccccccgcgccggctccttgctggcggccatgaagaggcagaacgtgcggactctgtccctcatcgtctgcaccttcacctacctgctggtgggcgccgccgtgttcgacgccctcgagtcggaccacgagatgcgcgaggaggagaaactcaaagccgaggagatccggatcaaggggaagtacaacatcagcagcgaggactaccggcagctggagctggtgatcctgcagtcggaaccgcaccgcgccggcgtccagtggaaattcgccggctccttctactttgcgatcacggtcatcaccaccataggttatgggcacgctgcacctggcaccgatgcgggcaaggccttctgcatgttctacgccgtgctgggcatcccgctgacactggtcatgttccagagcctgggcgagcgcatgaacaccttcgtgcgctacctgctgaagcgcattaagaagtgctgtggcatgcgcaacactgacgtgtctatggagaacatggtgactgtgggcttcttctcctgcatggggacgctgtgcatcggggcggccgccttctcccagtgtgaggagtggagcttcttccacgcctactactactgcttcatcacgttgactaccattgggttcggggactacgtggccctgcagaccaagggtgccctgcagaagaagccgctctacgtggcctttagctttatgtatatcctggtggggctgacggtcatcggggccttcctcaacctggtcgtcctcaggttcttgaccatgaacagtgaggatgagcggcgggatgctgaagagagggcatccctcgccggaaaccgcaacagcatggtcattcacatccctgaggagccgcggcccagccggcccaggtacaaggcggacgtcccggacctgcagtctgtgtgctcctgcacctgctaccgctcgcaggactatggcggccgctcggtggcaccgcagaactccttcagcgccaagcttgccccccactacttccactccatctcttacaagatcgaggagatctcaccaagcacattaaaaaacagcctcttcccatcgcctattagctccatctctcctgggttacacagctttaccgaccaccagaggctgatgaaacgccggaagtccgtttaggtgtggggagggaaatgggacagaaaagtcatttgtcatagttggtgttaatttccattggtccaactcgtcttttcttatttatttattattattattgtcatcattattactttctctccttcctcctttcttggtctcttggtctcattttcccccacctttccagccagacagagcaggccaaagggaaatacaggcccatcctcctctgaaactcacatctgagcatgaagcatggatctcctcctt

SEQ ID NO: 23157 - DNA, 3276 bp, Homo sapiens
  source 1..3276: mol_type = unassigned DNA
ctgtgagcctgcgggacatgccccccgcgccggctccttgctggcggccatgaagaggcagaacgtgcggactctgtccctcatcgtctgcaccttcacctacctgctggtgggcgccgccgtgttcgacgccctcgagtcggaccacgagatgcgcgaggaggagaaactcaaagccgaggagatccggatcaaggggaagtacaacatcagcagcgaggactaccggcagctggagctggtgatcctgcagtcggaaccgcaccgcgccggcgtccagtggaaattcgccggctccttctactttgcgatcacggtcatcaccaccataggttatgggcacgctgcacctggcaccgatgcgggcaaggccttctgcatgttctacgccgtgctgggcatcccgctgacactggtcatgttccagagcctgggcgagcgcatgaacaccttcgtgcgctacctgctgaagcgcattaagaagtgctgtggcatgcgcaacactgacgtgtctatggagaacatggtgactgtgggcttcttctcctgcatggggacgctgtgcatcggggcggccgccttctcccagtgtgaggagtggagcttcttccacgcctactactactgcttcatcacgttgactaccattgggttcggggactacgtggccctgcagaccaagggtgccctgcagaagaagccgctctacgtggcctttagctttatgtatatcctggtggggctgacggtcatcggggccttcctcaacctggtcgtcctcaggttcttgaccatgaacagtgaggatgagcggcgggatgctgaagagagggcatccctcgccggaaaccgcaacagcatggtcattcacatccctgaggagccgcggcccagccggcccaggtacaaggcggacgtcccggacctgcagtctgtgtgctcctgcacctgctaccgctcgcaggactatggcggccgctcggtggcaccgcagaactccttcagcgccaagcttgccccccactacttccactccatctcttacaagatcgaggagatctcaccaagcacattaaaaaacagcctcttcccatcgcctattagctccatctctcctgggttacacagctttaccgaccaccagaggctgatgaaacgccggaagtccgtttaggggaactaactgcacattcaagagaggcgtccgtggatgctgggtctcactgccaaagccgaacacggcttcgggatttctgccttctcaagtggacctctgctgtgctgggcgaatgctctactcattcccctacacaactgtggggatggtccagctacacatagacaggaagcccagagaaacgctcgatgtgagggtccccgcaagcccgtcgggctctttcggcacctggcccccccaaagctcctcaacgaggagtagagactgccaagcccttccactcattcatcatcataaaaatgtaacttgctatggcagcctcttggccattaagggctatactttgtgacctctgtccttgagatctttgctctgacaagttctatagccttctcagtgctgctatcgtgacgcagtgtccctgctgtggctaagtaacctttcgttttgatcaagatttgtccacgcagactcctacctctgcgcctttgcccgtgccgttcccactacctggaaggtctccccgttgctctccagctttgaggtggagacagagcatctcacacttccttttggtgtctcctgacccttttgctccctgctggacttggcgatgtcctcttctgggctcccctagtccttgttttggttgtgagcgaccgcaccagggagcaaaccttctatggccccggccacaggagcagcaagcactgggcagtgccccagacggaaggaccatcgcgagaataaaggcactgagatgtctggcatcttgcccaaatggccacttatcaccgtgattgaggcacgtcttaacttgctgaagtggaaacagggtaactcaatgcacgcctctgcaccatccctggaaaccaatccagatctatgagaagaaaactggtcatcatagcactggtgattcaacggcacctgcctggcagggtggagtgtgccccatacaacagggctggaagctgccacgccaggtatttctcataaggccggtacagggatggcaccagactatgggagcatacttgtgatgtcactctgaagaagttgggccccgtgatgggaatgtcatcaggaaactgggtccacactgttttcttgtggcaacacttctggtggaggctgcgaggggatggggacatgcaccatgagtgactcaggaacccccagcctctgtggcctggctcctgcccacccctagctctggggccttgagagaggcaagcacacgctcttctcgcctccagagagcggcgtgggggtgtggatactgctcaggccctggcatctcgcacgcctaggaccagcctctgccattcacaggaccgtgcaggcggccccaacagaggacggggacagctctctccttctgtaagtgaggcagcctcatccttccctggatcctcagcatctcttaaccagcagtggcagaggttgaattagaatggcaccagcttcggataaaaatccagatctcgcttttcaaaatgtgtctagagctggtggctgtaaggaaccagtcaagcctcagctgtgactctaatcctgccaagtccacctgagagccgactcattcatccaaagagagaacggtttggatggagctcaaggtgcctggctcgctggcatagcccagacaacctcttaaaggccgggccacagagctagaaggtctgtcactactcagttggggaaatcgtctgagaagttcaagtccactgcctcgcaactcaaatgagtcagcctcaccaaccaagaatcgcgttcataaacagactcagagcctgcgtgccgtggggtttccccgtctgcaactctctcacctggccctcctgcagggcccggcggggactggggagggtcagtgctccctggggcggggactgggtctgtttccaggctcagtgcctctgagtcatacagatgccaggtggtcctgctgcttaccctcgctgaacctcaggcttctcgtgtaaacagggcgcttttgaggaattattattaacatctccctgtgagtcaaagcacctactgagataatgtatgtgatgcttgtaataaatgcagctacatgccaggcactctga

SEQ ID NO: 23158 - DNA, 4678 bp, Homo sapiens
  source 1..4678: mol_type = unassigned DNA
atggcgcgggccaagctgccgcgctcgccgtccgagggcaaggcgggcccggggggcgccccagccggcgccgcagcccccgaggagcctcacgggctcagcccgctgctgccggcccgcggcgggggctccgtgggcagcgacgtgggccagaggcttcctgtagaagatttcagcctggactcctccctgtctcaggtccaggtggagttctacgtcaacgagaacaccttcaaggagcggctcaagctgttcttcatcaaaaaccaaagatcgagcctgaggatccggctgttcaacttctccctgaagctgctcacctgcctgctctacattgtgcgcgtcctgctcgatgacccggccctgggcatcggatgctggggctgcccaaagcagaactactccttcaatgactcgtcctccgagatcaactgggctcctattctgtgggtggagagaaagatgacactgtgggcgatccaggtcatcgtggccataataagcttcctggagacgatgcttctcatctacctcagctacaaaggcaacatctgggagcagatcttccgcgtgtccttcgtcctggagatgatcaacactctgcccttcatcatcacgatcttctggccgccgctgcggaacctgttcatccccgtctttctgaactgctggctggccaagcacgcgctggaaaacatgattaatgacttccaccgtgccatcctgcggacacagtcagccatgttcaaccaggtcctcatcctcttctgcaccctgctgtgcctcgttttcacggggacctgcggcatccagcacctggagcgggcgggcgagaacctgtccctcctgacctccttctacttctgcatcgtcaccttctccaccgtgggctacggtgacgtcacgcccaagatctggccatcgcagctgctggtggtcatcatgatctgcgtggccctcgtggtgctcccactgcagttcgaggagctcgtctacctctggatggagcggcagaagtcagggggcaactacagccgccaccgtgcgcagacggagaagcacgtggtcctgtgtgtcagctccctcaagatcgaccttctcatggacttcctgaacgagttctacgcccacccccggctccaggactattacgtggtcatcctgtgccccacggagatggatgtccaggtgcgcagagtcctgcagatccctctgtggtcccagcgggtcatctacctccagggctctgcactcaaagaccaggacctcatgcgagccaagatggacaatggggaggcctgcttcatcctcagcagcaggaacgaggtggaccgcacggctgcagaccaccagaccatcctgcgcgcctgggccgtgaaggacttcgcccccaactgccccctctacgtccagatcctcaaacctgaaaacaagtttcacgtcaagtttgctgaccacgtggtgtgtgaggaggagtgcaagtacgccatgctggcgctgaactgcatctgcccggcgacctccaccctcatcaccctgctggtgcacacgtcccgcggccaggagggacaggagtctccggagcagtggcagcgcatgtatgggcgctgctccggcaacgaggtgtaccacatccgcatgggtgacagcaagttcttccgcgagtacgagggcaagagcttcacctacgcggccttccacgcccacaagaagtatggcgtgtgcctcatcgggctgaagcgggaggacaacaagagcatcctgctgaacccggggccccggcacatcctggccgcctctgacacctgcttctacatcaacatcaccaaggaggagaactcggccttcatcttcaagcaggaggagaagcggaagaagagggccttctcggggcaggggctgcacgagggtccggcccgcctgcccgtgcacagcatcatcgcctccatggggacagtggccatggacctgcagggcacagagcaccggcctacgcagagcggcggtgggggcgggggcagcaagctggcactgcccacggagaacggctcgggcagccggcggcccagcatcgcgcccgtcctggaactggccgacagctcagccctgctgccctgcgacctgctgagcgaccagtcggaggatgaggtgacgccgtcggacgacgaggggctctccgtggtagagtatgtgaagggctaccctcccaactcgccctacatcggcagctccccaaccctgtgccacctcctgcctgtgaaagcccccttctgctgcctgcggctggacaagggctgcaagcacaacagctatgaagacgccaaggcctacgggttcaagaacaagctgatcatcgtctcggcagagacggccggcaatgggctgtacaacttcatcgtgccactgcgggcctactacagatcccgcaaggagctgaaccccatcgtgctgctgctggacaacaagcccgaccaccacttcctggaagccatctgctgcttccccatggtctactacatggagggctctgtggacaacctggacagcctgctgcagtgtggcatcatctatgcggacaacctggtggtggtggacaaggagagcaccatgagcgccgaggaggactacatggcggacgccaagaccatcgtcaacgtgcagaccatgttccggctcttccccagcctcagcatcaccacggagctcacccacccttccaacatgcgcttcatgcagttccgcgccaaggacagctactctctggctctttccaaactagaaaagagggagcgagagaatggctccaacctggccttcatgttccgcctgccgttcgccgccggccgcgtcttcagcatcagcatgttggacacactgctctaccagtccttcgtgaaggactacatgatcaccatcacccggctgctgctgggcctggacaccacgccgggctcggggtacctctgtgccatgaaaatcaccgagggcgacctgtggatccgcacgtacggccgcctcttccagaagctctgctcctccagcgccgagatccccattggcatctaccggacagagagccacgtcttctccacctcggagtcccagatctcggtgaacgtggaggactgtgaggacacacgggaagtgaaggggccctggggctcccgcgctggcaccggaggcagctcccagggccgccacacgggcggcggtgaccccgcagagcacccactgctacggcgcaagagcctgcagtgggcccggaggctgagccgcaaggcgcccaagcaggcaggccgggcggcggccgcggagtggatcagccagcagcgcctcagcctgtaccggcgctctgagcgccaggagctctccgagctggtgaagaaccgcatgaagcacctggggctgcccaccaccggctacgaggacgtagcaaatttaacagccagtgatgtcatgaatcgggtaaacctgggatatttgcaagacgagatgaacgaccaccagaacaccctctcctacgtcctcatcaaccctccgcccgacacgaggctggagcccagtgacattgtctatctcatccgctccgaccccctggctcacgtggccagcagctcccagagccggaagagcagctgcagccacaagctgtcgtcctgcaaccccgagactcgcgacgagacacagctctgagccagccctgcacggagctcaggccaccaagcccggggtcctcaggaaggacgtggaggagcgtgtgaggacacggtggcactagcgtgaccctggggatggcacactctactcaccatggctcctgggactccaccctggaaaggagcccctcatgcggggggagggccagctcacccctgggcacctgcaggctagtgaggagagttttttaacctatttttacacgtcgatgcagtccacttctctttacacagatgtaccgcaactcgtgaccagggctggctgggagggcaacgcagggactggacgccctacagggccgagcccaggctgtgctggagggtggggctggggtgcatggggaggggagcagaacccagaacccaggagccccgcgtgggccacacccaactcagagccggcctgagcgttcacggccaggcagcctcgcttccttgcagccaagggctgggggccagggctgctgttctgcactctggggtgggtgagggggaccctgggctgtttgctgtcccaagccccttctggaagttagaagcagcaaagggcccggggaagccgggcatgtgagaggggtgcgtccccaggtcccccagagggccctgtcgccgaggacctttctgaaggaagcagaagacgccatttcctctacttcacactgaactgtcccagccactgcatctagggggcattgggcggaagatggtgcatttccatggaccattttacacttaccttttaaagcaaagcctcattttctaaacccctgacttgtgaagcacaattcagcctccgggctgggccacgtggagagagaggatcttctcagcaaggcgagatcccgggcggcggctgacatcaggagcgccaccctgcgtcctttgctgctggttccttactggtttgtacggtcagcgctggaaacttctattaaatggatgcattctggaggcatgaagtt

SEQ ID NO: 23159 - DNA, 4830 bp, Homo sapiens
  source 1..4830: mol_type = unassigned DNA
agggcaacgcgagggaagaaggtggcggctcccactcgcttctccctcgggtcgggtccgagctgccaggccgcatgccactccctgacggggcgcggaccccggggggcgtctgccgggaggcgcgcggcgggggctacaccaaccggaccttcgagtttgacgacggccaatgcgcccccaggcggccctgcgcgggggacggcgcgctcctggacaccgccggcttcaagatgagcgacctggactccgaggtgctgcccttgccgccgcgctaccgcttccgggacctgctgctgggcgacccgtccttccagaacgacgacagggtccaggtggagttctacgtcaacgagaacaccttcaaggagcggctcaagctgttcttcatcaaaaaccaaagatcgagcctgaggatccggctgttcaacttctccctgaagctgctcacctgcctgctctacattgtgcgcgtcctgctcgatgacccggccctgggcatcggatgctggggctgcccaaagcagaactactccttcaatgactcgtcctccgagatcaactgggctcctattctgtgggtggagagaaagatgacactgtgggcgatccaggtcatcgtggccataataagcttcctggagacgatgcttctcatctacctcagctacaaaggcaacatctgggagcagatcttccgcgtgtccttcgtcctggagatgatcaacactctgcccttcatcatcacgatcttctggccgccgctgcggaacctgttcatccccgtctttctgaactgctggctggccaagcacgcgctggaaaacatgattaatgacttccaccgtgccatcctgcggacacagtcagccatgttcaaccaggtcctcatcctcttctgcaccctgctgtgcctcgttttcacggggacctgcggcatccagcacctggagcgggcgggcgagaacctgtccctcctgacctccttctacttctgcatcgtcaccttctccaccgtgggctacggtgacgtcacgcccaagatctggccatcgcagctgctggtggtcatcatgatctgcgtggccctcgtggtgctcccactgcagttcgaggagctcgtctacctctggatggagcggcagaagtcagggggcaactacagccgccaccgtgcgcagacggagaagcacgtggtcctgtgtgtcagctccctcaagatcgaccttctcatggacttcctgaacgagttctacgcccacccccggctccaggactattacgtggtcatcctgtgccccacggagatggatgtccaggtgcgcagagtcctgcagatccctctgtggtcccagcgggtcatctacctccagggctctgcactcaaagaccaggacctcatgcgagccaagatggacaatggggaggcctgcttcatcctcagcagcaggaacgaggtggaccgcacggctgcagaccaccagaccatcctgcgcgcctgggccgtgaaggacttcgcccccaactgccccctctacgtccagatcctcaaacctgaaaacaagtttcacgtcaagtttgctgaccacgtggtgtgtgaggaggagtgcaagtacgccatgctggcgctgaactgcatctgcccggcgacctccaccctcatcaccctgctggtgcacacgtcccgcggccaggagggacaggagtctccggagcagtggcagcgcatgtatgggcgctgctccggcaacgaggtgtaccacatccgcatgggtgacagcaagttcttccgcgagtacgagggcaagagcttcacctacgcggccttccacgcccacaagaagtatggcgtgtgcctcatcgggctgaagcgggaggacaacaagagcatcctgctgaacccggggccccggcacatcctggccgcctctgacacctgcttctacatcaacatcaccaaggaggagaactcggccttcatcttcaagcaggaggagaagcggaagaagagggccttctcggggcaggggctgcacgagggtccggcccgcctgcccgtgcacagcatcatcgcctccatggggacagtggccatggacctgcagggcacagagcaccggcctacgcagagcggcggtgggggcgggggcagcaagctggcactgcccacggagaacggctcgggcagccggcggcccagcatcgcgcccgtcctggaactggccgacagctcagccctgctgccctgcgacctgctgagcgaccagtcggaggatgaggtgacgccgtcggacgacgaggggctctccgtggtagagtatgtgaagggctaccctcccaactcgccctacatcggcagctccccaaccctgtgccacctcctgcctgtgaaagcccccttctgctgcctgcggctggacaagggctgcaagcacaacagctatgaagacgccaaggcctacgggttcaagaacaagctgatcatcgtctcggcagagacggccggcaatgggctgtacaacttcatcgtgccactgcgggcctactacagatcccgcaaggagctgaaccccatcgtgctgctgctggacaacaagcccgaccaccacttcctggaagccatctgctgcttccccatggtctactacatggagggctctgtggacaacctggacagcctgctgcagtgtggcatcatctatgcggacaacctggtggtggtggacaaggagagcaccatgagcgccgaggaggactacatggcggacgccaagaccatcgtcaacgtgcagaccatgttccggctcttccccagcctcagcatcaccacggagctcacccacccttccaacatgcgcttcatgcagttccgcgccaaggacagctactctctggctctttccaaactagaaaagagggagcgagagaatggctccaacctggccttcatgttccgcctgccgttcgccgccggccgcgtcttcagcatcagcatgttggacacactgctctaccagtccttcgtgaaggactacatgatcaccatcacccggctgctgctgggcctggacaccacgccgggctcggggtacctctgtgccatgaaaatcaccgagggcgacctgtggatccgcacgtacggccgcctcttccagaagctctgctcctccagcgccgagatccccattggcatctaccggacagagagccacgtcttctccacctcggagccccacgacctcagagcccagtcccagatctcggtgaacgtggaggactgtgaggacacacgggaagtgaaggggccctggggctcccgcgctggcaccggaggcagctcccagggccgccacacgggcggcggtgaccccgcagagcacccactgctacggcgcaagagcctgcagtgggcccggaggctgagccgcaaggcgcccaagcaggcaggccgggcggcggccgcggagtggatcagccagcagcgcctcagcctgtaccggcgctctgagcgccaggagctctccgagctggtgaagaaccgcatgaagcacctggggctgcccaccaccggctacgaggacgtagcaaatttaacagccagtgatgtcatgaatcgggtaaacctgggatatttgcaagacgagatgaacgaccaccagaacaccctctcctacgtcctcatcaaccctccgcccgacacgaggctggagcccagtgacattgtctatctcatccgctccgaccccctggctcacgtggccagcagctcccagagccggaagagcagctgcagccacaagctgtcgtcctgcaaccccgagactcgcgacgagacacagctctgagccagccctgcacggagctcaggccaccaagcccggggtcctcaggaaggacgtggaggagcgtgtgaggacacggtggcactagcgtgaccctggggatggcacactctactcaccatggctcctgggactccaccctggaaaggagcccctcatgcggggggagggccagctcacccctgggcacctgcaggctagtgaggagagttttttaacctatttttacacgtcgatgcagtccacttctctttacacagatgtaccgcaactcgtgaccagggctggctgggagggcaacgcagggactggacgccctacagggccgagcccaggctgtgctggagggtggggctggggtgcatggggaggggagcagaacccagaacccaggagccccgcgtgggccacacccaactcagagccggcctgagcgttcacggccaggcagcctcgcttccttgcagccaagggctgggggccagggctgctgttctgcactctggggtgggtgagggggaccctgggctgtttgctgtcccaagccccttctggaagttagaagcagcaaagggcccggggaagccgggcatgtgagaggggtgcgtccccaggtcccccagagggccctgtcgccgaggacctttctgaaggaagcagaagacgccatttcctctacttcacactgaactgtcccagccactgcatctagggggcattgggcggaagatggtgcatttccatggaccattttacacttaccttttaaagcaaagcctcattttctaaacccctgacttgtgaagcacaattcagcctccgggctgggccacgtggagagagaggatcttctcagcaaggcgagatcccgggcggcggctgacatcaggagcgccaccctgcgtcctttgctgctggttccttactggtttgtacggtcagcgctggaaacttctattaaatggatgcattctggaggcatgaagtt

SEQ ID NO: 23160 - DNA, 4717 bp, Homo sapiens
  source 1..4717: mol_type = unassigned DNA
cgcgagggaagaaggtggcggctcccactcgcttctccctcgggtcgggtccgagctgccaggccgcatgccactccctgacggggcgcggaccccggggggcgtctgccgggaggcgcgcggcgggggctacaccaaccggaccttcgagtttgacgacggccaatgcgcccccaggcggccctgcgcgggggacggcgcgctcctggacaccgccggcttcaagatgagcgacctggactccgaggtgctgcccttgccgccgcgctaccgcttccgggacctgctgctgggcgacccgtccttccagaacgacgacagggtccaggtggagttctacgtcaacgagaacaccttcaaggagcggctcaagctgttcttcatcaaaaaccaaagatcgagcctgaggatccggctgttcaacttctccctgaagctgctcacctgcctgctctacattgtgcgcgtcctgctcgatgacccggccctgggcatcggatgctggggctgcccaaagcagaactactccttcaatgactcgtcctccgagatcaactgggctcctattctgtgggtggagagaaagatgacactgtgggcgatccaggtcatcgtggccataataagcttcctggagacgatgcttctcatctacctcagctacaaaggcaacatctgggagcagatcttccgcgtgtccttcgtcctggagatgatcaacactctgcccttcatcatcacgatcttctggccgccgctgcggaacctgttcatccccgtctttctgaactgctggctggccaagcacgcgctggaaaacatgattaatgacttccaccgtgccatcctgcggacacagtcagccatgttcaaccaggtcctcatcctcttctgcaccctgctgtgcctcgttttcacggggacctgcggcatccagcacctggagcgggcgggcgagaacctgtccctcctgacctccttctacttctgcatcgtcaccttctccaccgtgggctacggtgacgtcacgcccaagatctggccatcgcagctgctggtggtcatcatgatctgcgtggccctcgtggtgctcccactgcagttcgaggagctcgtctacctctggatggagcggcagaagtcagggggcaactacagccgccaccgtgcgcagacggagaagcacgtggtcctgtgtgtcagctccctcaagatcgaccttctcatggacttcctgaacgagttctacgcccacccccggctccaggactattacgtggtcatcctgtgccccacggagatggatgtccaggtgcgcagagtcctgcagatccctctgtggtcccagcgggtcatctacctccagggctctgcactcaaagaccaggacctcatgcgagccaagatggacaatggggaggcctgcttcatcctcagcagcaggaacgaggtggaccgcacggctgcagaccaccagaccatcctgcgcgcctgggccgtgaaggacttcgcccccaactgccccctctacgtccagatcctcaaacctgaaaacaagtttcacgtcaagtttgctgaccacgtggtgtgtgaggaggagtgcaagtacgccatgctggcgctgaactgcatctgcccggcgacctccaccctcatcaccctgctggtgcacacgtcccgcggccaggagggacaggagtctccggagcagtggcagcgcatgtatgggcgctgctccggcaacgaggtgtaccacatccgcatgggtgacagcaagttcttccgcgagtacgagggcaagagcttcacctacgcggccttccacgcccacaagaagtatggcgtgtgcctcatcgggctgaagcgggaggacaacaagagcatcctgctgaacccggggccccggcacatcctggccgcctctgacacctgcttctacatcaacatcaccaaggaggagaactcggccttcatcttcaagcaggaggagaagcggaagaagagggccttctcggggcaggggctgcacgagggtccggcccgcctgcccgtgcacagcatcatcgcctccatggggacagtggccatggacctgcagggcacagagcaccggcctacgcagagcggcggtgggggcgggggcagcaagctggcactgcccacggagaacggctcgggcagccggcggcccagcatcgcgcccgtcctggaactggccgacagctcagccctgctgccctgcgacctgctgagcgaccagtcggaggatgaggtgacgccgtcggacgacgaggggctctccgtggtagagtatgtgaagggctaccctcccaactcgccctacatcggcagctccccaaccctgtgccacctcctgcctgtgaaagcccccttctgctgcctgcggctggacaagggctgcaagcacaacagctatgaagacgccaaggcctacgggttcaagaacaagctgatcatcgtctcggcagagacggccggcaatgggctgtacaacttcatcgtgccactgcgggcctactacagatcccgcaaggagctgaaccccatcgtgctgctgctggacaacaagcccgaccaccacttcctggaagccatctgctgcttccccatggtctactacatggagggctctgtggacaacctggacagcctgctgcagtgtggcatcatctatgcggacaacctggtggtggtggacaaggagagcaccatgagcgccgaggaggactacatggcggacgccaagaccatcgtcaacgtgcagaccatgttccggctcttccccagcctcagcatcaccacggagctcacccacccttccaacatgcgcttcatgcagttccgcgccaaggacagctactctctggctctttccaaactagaaaagagggagcgagagaatggctccaacctggccttcatgttccgcctgccgttcgccgccggccgcgtcttcagcatcagcatgttggacacactgctctaccagtccttcgtgaaggactacatgatcaccatcacccggctgctgctgggcctggacaccacgccgggctcggggtacctctgtgccatgaaaatcaccgagggcgacctgtggatccgcacgtacggccgcctcttccagaagctctgctcctccagcgccgagatccccattggcatctaccggacagagagccacgtcttctccacctcggagccccacgacctcagagcccagtcccagatctcggtgaacgtggaggactgtgaggacacacgggaagtgaaggggccctggggctcccgcgctggcaccggaggcagctcccagggccgccacacgggcggcggtgaccccgcagagcacccactgctacggcgcaagagcctgcagtgggcccggaggctgagccgcaaggcgcccaagcaggcaggccgggcggcggccgcggagtggatcagccagcagcgcctcagcctgtaccggcgctctgagcgccaggagctctccgagctggtgaagaaccgcatgaagcacctggggctgcccaccaccggctacgacgagatgaacgaccaccagaacaccctctcctacgtcctcatcaaccctccgcccgacacgaggctggagcccagtgacattgtctatctcatccgctccgaccccctggctcacgtggccagcagctcccagagccggaagagcagctgcagccacaagctgtcgtcctgcaaccccgagactcgcgacgagacacagctctgagccagccctgcacggagctcaggccaccaagcccggggtcctcaggaaggacgtggaggagcgtgtgaggacacggtggcactagcgtgaccctggggatggcacactctactcaccatggctcctgggactccaccctggaaaggagcccctcatgcggggggagggccagctcacccctgggcacctgcaggctagtgaggagagttttttaacctatttttacacgtcgatgcagtccacttctctttacacagatgtaccgcaactcgtgaccagggctggctgggagggcaacgcagggactggacgccctacagggccgagcccaggctgtgctggagggtggggctggggtgcatggggaggggagcagaacccagaacccaggagccccgcgtgggccacacccaactcagagccggcctgagcgttcacggccaggcagcctcgcttccttgcagccaagggctgggggccagggctgctgttctgcactctggggtgggtgagggggaccctgggctgtttgctgtcccaagccccttctggaagttagaagcagcaaagggcccggggaagccgggcatgtgagaggggtgcgtccccaggtcccccagagggccctgtcgccgaggacctttctgaaggaagcagaagacgccatttcctctacttcacactgaactgtcccagccactgcatctagggggcattgggcggaagatggtgcatttccatggaccattttacacttaccttttaaagcaaagcctcattttctaaacccctgacttgtgaagcacaattcagcctccgggctgggccacgtggagagagaggatcttctcagcaaggcgagatcccgggcggcggctgacatcaggagcgccaccctgcgtcctttgctgctggttccttactggtttgtacggtcagcgc

SEQ ID NO: 23161 - DNA, 3553 bp, Homo sapiens
  source 1..3553: mol_type = unassigned DNA
ctttctttctccctcctctcctccatttgttgtttgatgtttcccactctttgaggaaggatggttgatttggagagcgaagtgccccctctgcctcccaggtacaggtttcgagatttgctgctaggggaccaaggatggcaaaacgacgacagggtacaagttgaattctatatgaatgaaaatacatttaaagaaagactaaaattatttttcataaaaaaccagagatcaagtctaaggatacgcctgttcaatttttctctcaaattactaagctgcttattatacataatccgagtactactagaaaacccttcacaaggaaatgaatggtctcatatcttttgggtgaacagaagtctacctttgtggggcttacaggtttcagtggcattgataagtctgtttgaaacaatattacttggttatcttagttataagggaaacatctgggaacagattttacgaatacccttcatcttggaaataattaatgcagttcccttcattatctcaatattctggccttccttaaggaatctatttgtcccagtctttctgaactgttggcttgccaaacatgccttggaaaatatgattaatgatctacacagagccattcagcgtacacagtctgcaatgtttaatcaagttttgattttaatatctacattactatgccttatcttcacctgcatttgtgggatccaacatctggaacgaataggaaagaagctgaatctctttgactccctttatttctgcattgtgacgttttctactgtgggcttcggggatgtcactcctgaaacatggtcctccaagctttttgtagttgctatgatttgtgttgctcttgtggttctacccatacagtttgaacagctggcttatttgtggatggagagacaaaagtcaggaggaaactatagtcgacatagagctcaaactgaaaagcatgtcgtcctgtgtgtcagctcactgaagattgatttacttatggattttttaaatgaattctatgctcatcctaggctccaggattattatgtggtgattttgtgtcctactgaaatggatgtacaggttcgaagggtactgcagattccaatgtggtcccaacgagttatctaccttcaaggttcagcccttaaagatcaagacctattgagagcaaagatggatgacgctgaggcctgttttattctcagtagccgttgtgaagtggataggacatcatctgatcaccaaacaattttgagagcatgggctgtgaaagattttgctccaaattgtcctttgtatgtccagatattaaagcctgaaaataaatttcacatcaaatttgctgatcatgttgtttgtgaagaagagtttaaatacgccatgttagctttaaactgtatatgcccagcaacatctacacttattacactactggttcatacctctagagggcaagaaggccagcaatcgccagaacaatggcagaagatgtacggtagatgctccgggaatgaagtctaccacattgttttggaagaaagtacattttttgctgaatatgaaggaaagagttttacatatgcctctttccatgcacacaaaaagtttggcgtctgcttgattggtgttaggagggaggataataaaaacattttgctgaatccaggtcctcgatacattatgaattctacagacatatgcttttatattaatattaccaaagaagagaattcagcatttaaaaaccaagaccagcagagaaaaagcaatgtgtccaggtcgttttatcatggaccttccagattacctgtacatagcataattgccagcatgggtactgtggctatagacttgcaagatacaagctgtagatcagcaagtggccctaccctgtctcttcctacagagggaagcaaagaaataagaagacctagcattgctcctgttttagaggttgcagatacatcatcgattcaaacatgtgatcttctaagtgaccaatcagaagatgaaactacaccagatgaagaaatgtcttcaaacttagagtatgctaaaggttacccaccttattctccatatataggaagttcacccactttttgtcatctccttcatgaaaaagtaccattttgctgcttaagattagacaagagttgccaacataactactatgaggatgcaaaagcctatggattcaaaaataaactaattatagttgcagctgaaacagctggaaatggattatataactttattgttcctctcagggcatattatagaccaaagaaagaacttaatcccatagtactgctattggataacccgccagatatgcattttctggatgcaatctgttggtttccaatggtttactacatggtgggctctattgacaacctagatgacttactcaggtgtggagtgacttttgctgctaatatggtggttgtggataaagagagcaccatgagtgccgaggaagactacatggcagatgccaaaaccattgtgaacgtgcagacactcttcaggttgttttccagtctcagtattatcacagagctaactcaccccgccaacatgagattcatgcaattcagagccaaagactgttactctcttgctctttcaaaactggaaaagaaagaacgggagagaggctctaacttggcctttatgtttcgactgccttttgctgctgggagggtgtttagcatcagtatgttggacactctgctgtatcagtcatttgtgaaggattatatgatttctatcacgagacttctgttgggactggacactacaccaggatctgggtttctttgttctatgaaaatcactgcagatgacttatggatcagaacttatgccagactttatcagaagttgtgttcttctactggagatgttcccattggaatctacaggactgagtctcagaaacttactacatctgagtctcaaatatctatcagtgtagaagagtgggaagacaccaaagactccaaagaacaagggcaccaccgcagcaaccaccgcaactcaacatccagtgatcagtcggaccatcccttgctgcggagaaaaagcatgcagtgggcccgaagactgagcagaaaaggcccaaaacactctggtaaaacagctgaaaaaataacccagcagcgactgaacctctacaggaggtcagaaagacaagagcttgctgaacttgtgaaaaatagaatgaaacacttgggtctttctacagtgggatatgatgaaatgaatgatcatcaaagtaccctctcctacatcctgattaacccatctccagataccagaatagagctgaatgatgttgtatacttaattcgaccagatccactggcctaccttccaaacagtgagcccagtcgaagaaacagcatctgcaatgtcactggtcaagattctcgggaggaaactcaactttgataaaaataaaatgagaaacttttttcctacaaagaccttgcttgaaaccacaaaagttttgctggcacgaaagaaactagatgga

SEQ ID NO: 23162 - DNA, 5753 bp, Homo sapiens
  source 1..5753: mol_type = unassigned DNA
acagcgtcttgttagtcctctccctgtactccgcaatattttctttctttctccctcctctcctccatttgttgtttgatgtttcccactctttgaggaaggatggttgatttggagagcgaagtgccccctctgcctcccaggtacaggtttcgagatttgctgctaggggaccaaggatggcaaaacgacgacagggtacaagttgaattctatatgaatgaaaatacatttaaagaaagactaaaattatttttcataaaaaaccagagatcaagtctaaggatacgcctgttcaatttttctctcaaattactaagctgcttattatacataatccgagtactactagaaaacccttcacaaggaaatgaatggtctcatatcttttgggtgaacagaagtctacctttgtggggcttacaggtttcagtggcattgataagtctgtttgaaacaatattacttggttatcttagttataagggaaacatctgggaacagattttacgaatacccttcatcttggaaataattaatgcagttcccttcattatctcaatattctggccttccttaaggaatctatttgtcccagtctttctgaactgttggcttgccaaacatgccttggaaaatatgattaatgatctacacagagccattcagcgtacacagtctgcaatgtttaatcaagttttgattttaatatctacattactatgccttatcttcacctgcatttgtgggatccaacatctggaacgaataggaaagaagctgaatctctttgactccctttatttctgcattgtgacgttttctactgtgggcttcggggatgtcactcctgaaacatggtcctccaagctttttgtagttgctatgatttgtgttgctcttgtggttctacccatacagtttgaacagctggcttatttgtggatggagagacaaaagtcaggaggaaactatagtcgacatagagctcaaactgaaaagcatgtcgtcctgtgtgtcagctcactgaagattgatttacttatggattttttaaatgaattctatgctcatcctaggctccaggattattatgtggtgattttgtgtcctactgaaatggatgtacaggttcgaagggtactgcagattccaatgtggtcccaacgagttatctaccttcaaggttcagcccttaaagatcaagacctattgagagcaaagatggatgacgctgaggcctgttttattctcagtagccgttgtgaagtggataggacatcatctgatcaccaaacaattttgagagcatgggctgtgaaagattttgctccaaattgtcctttgtatgtccagatattaaagcctgaaaataaatttcacatcaaatttgctgatcatgttgtttgtgaagaagagtttaaatacgccatgttagctttaaactgtatatgcccagcaacatctacacttattacactactggttcatacctctagagggcagtttggcgtctgcttgattggtgttaggagggaggataataaaaacattttgctgaatccaggtcctcgatacattatgaattctacagacatatgcttttatattaatattaccaaagaagagaattcagcatttaaaaaccaagaccagcagagaaaaagcaatgtgtccaggtcgttttatcatggaccttccagattacctgtacatagcataattgccagcatgggtactgtggctatagacttgcaagatacaagctgtagatcagcaagtggccctaccctgtctcttcctacagagggaagcaaagaaataagaagacctagcattgctcctgttttagaggttgcagatacatcatcgattcaaacatgtgatcttctaagtgaccaatcagaagatgaaactacaccagatgaagaaatgtcttcaaacttagagtatgctaaaggttacccaccttattctccatatataggaagttcacccactttttgtcatctccttcatgaaaaagtaccattttgctgcttaagattagacaagagttgccaacataactactatgaggatgcaaaagcctatggattcaaaaataaactaattatagttgcagctgaaacagctggaaatggattatataactttattgttcctctcagggcatattatagaccaaagaaagaacttaatcccatagtactgctattggataaccccctagatgacttactcaggtgtggagtgacttttgctgctaatatggtggttgtggataaagagagcaccatgagtgccgaggaagactacatggcagatgccaaaaccattgtgaacgtgcagacactcttcaggttgttttccagtctcagtattatcacagagctaactcaccccgccaacatgagattcatgcaattcagagccaaagactgttactctcttgctctttcaaaactggaaaagaaagaacgggagagaggctctaacttggcctttatgtttcgactgccttttgctgctgggagggtgtttagcatcagtatgttggacactctgctgtatcagtcatttgtgaaggattatatgatttctatcacgagacttctgttgggactggacactacaccaggatctgggtttctttgttctatgaaaatcactgcagatgacttatggatcagaacttatgccagactttatcagaagttgtgttcttctactggagatgttcccattggaatctacaggactgagtctcagaaacttactacatctgaggaaacatacattttaatatttttatctcaaatatctatcagtgtagaagagtgggaagacaccaaagactccaaagaacaagggcaccaccgcagcaaccaccgcaactcaacatccagtgatcagtcggaccatcccttgctgcggagaaaaagcatgcagtgggcccgaagactgagcagaaaaggcccaaaacactctggtaaaacagctgaaaaaataacccagcagcgactgaacctctacaggaggtcagaaagacaagagcttgctgaacttgtgaaaaatagaatgaaacacttgggtctttctacagtgggatatgatgaaatgaatgatcatcaaagtaccctctcctacatcctgattaacccatctccagataccagaatagagctgaatgatgttgtatacttaattcgaccagatccactggcctaccttccaaacagtgagcccagtcgaagaaacagcatctgcaatgtcactggtcaagattctcgggaggaaactcaactttgataaaaataaaatgagaaacttttttcctacaaagaccttgcttgaaaccacaaaagttttgctggcacgaaagaaactagatggaaatatatgtaattctctcatatttaaaaacgtaatctcttctcttagaagtatagatcattttgaaacttaatgtactacttactggtactctccctattaatatttgaaggacctcaatggaataaatttgaaaagctaaattaaaatacaaaaatttaaatctgacatttaattgttttataataatccaaactctatgaaagcaattttaaaaattattaaggttttatgaagttgacaaaatctaactatatttggtgcatcacaatggacacagaatgctgctgctcctcttaaaaattaaatgtgtcatattatattctttaaacttactgttttacaaaattgagctcatcgtaaatgtctagtcttctcacatagagattaaccaacaaacttgtgtggctgacttttgtgtaagaatcatagtttgctttagaatacaaatctttaagtcattttaacttttttttctgccttacgatataaaaatatttatcttagaatttgagatgttcatagcatgttttattacattgaagaaactaaaacataaatgaaaagaaacactaggttcctgcactttttggtaactttatgtctagcaaatattttatgccaagaaaagcatactataaagcaaatatctattattctcctaaacgaatgcctagcatagagaaaatacttaatacacatttgttgacttaaatttaattcaaggattgaaaaattaactggatatcttgaaatatacagtaatgattgtccttagactcttgaactttaccatctttcctattcatatatctatatagtaaatttcactagaaaaattcttttaaaattgacagaagataatttataccttttatggactctgaagacacttcaaaacattaaaagtccttatgtctttggtaatgaaacaataacactcaatgaaggatgtattaaaatttttgacttaattttgaaatcgtatatatgagctatactttaacattatgagagaaaagcataaaacaaaaataggtagttcttggcttttaacattaatgcaaatcatgcagaatttgagttataaatttaaatataaattgaccattgatgatatccagtttttcattttttacctgtattgcattttccccctagagaaatagatcaaaagagcacaagagtatgcgtacatagtttaccaggtagtagaagtgtgttaaaatgttcctgtaaaagaaacattggtaaatttaaatacatactgttctaattttgtattttttaatttttgaatttgacattgagtttaattcagcaacaacaaaaaatacatataaaactagaaagggactttttttcctttcttttcataatgaagcagatcaacttaaaggataataaaatttttaaagaaaagatattctaatgtactctcaataattctacagaaataaaactgtaaagtgcaatgtgaaatcaaagattatagtcattgtataatttggcttggaggctatgaaatgtctttttttctttttggtattttacattattcacattttagaataacaagaacaccaagaattacccctaaaacagagaccctgtatttaatctactttgatcagagaagtagaatttataacaggttagctaaaattgggagcatgccttaaaacttaaagattgtatgcatatatgtgtatatgttataaacgtgaaatatatttgacacacacattcacatataaattgttaaaaactgaaggcagaatggaactaatatatgtaacagagaaaaacaataaattttatgaacttgttttatatttgcatatcaagagtcaagtatgatgtttctttaagttgactttttttacttcattatttttaggaataaatgtaagattttacaaatcttttatttccccacaagatctgaagtttggtatttttgcattatgacagttgttgagactaggattttaagctaggatatgattatatttcctatataactaaaaattttgtttcataaattttaaaataattatttttgactatgaacattagtccaaatttaatatttgacacagttcataccagcttgctacaataatgataatttattagtctttctgttatttaaagaataaaaacatgcttataaaagacttttaatgaaatgttgcctttttaaaataattatacttgcacatgaaaataaaatataaagtcaataatagtccttgtagcccaatgggaattgattctgtttattgtctgtaccattttgctaccagttacattgaactgctttaaaataaataataaaattatttctaatgatg

SEQ ID NO: 23163 - DNA, 5883 bp, Homo sapiens
  source 1..5883: mol_type = unassigned DNA
acagcgtcttgttagtcctctccctgtactccgcaatattttctttctttctccctcctctcctccatttgttgtttgatgtttcccactctttgaggaaggatggttgatttggagagcgaagtgccccctctgcctcccaggtacaggtttcgagatttgctgctaggggaccaaggatggcaaaacgacgacagggtacaagttgaattctatatgaatgaaaatacatttaaagaaagactaaaattatttttcataaaaaaccagagatcaagtctaaggatacgcctgttcaatttttctctcaaattactaagctgcttattatacataatccgagtactactagaaaacccttcacaaggaaatgaatggtctcatatcttttgggtgaacagaagtctacctttgtggggcttacaggtttcagtggcattgataagtctgtttgaaacaatattacttggttatcttagttataagggaaacatctgggaacagattttacgaatacccttcatcttggaaataattaatgcagttcccttcattatctcaatattctggccttccttaaggaatctatttgtcccagtctttctgaactgttggcttgccaaacatgccttggaaaatatgattaatgatctacacagagccattcagcgtacacagtctgcaatgtttaatcaagttttgattttaatatctacattactatgccttatcttcacctgcatttgtgggatccaacatctggaacgaataggaaagaagctgaatctctttgactccctttatttctgcattgtgacgttttctactgtgggcttcggggatgtcactcctgaaacatggtcctccaagctttttgtagttgctatgatttgtgttgctcttgtggttctacccatacagtttgaacagctggcttatttgtggatggagagacaaaagtcaggaggaaactatagtcgacatagagctcaaactgaaaagcatgtcgtcctgtgtgtcagctcactgaagattgatttacttatggattttttaaatgaattctatgctcatcctaggctccaggattattatgtggtgattttgtgtcctactgaaatggatgtacaggttcgaagggtactgcagattccaatgtggtcccaacgagttatctaccttcaaggttcagcccttaaagatcaagacctattgagagcaaagatggatgacgctgaggcctgttttattctcagtagccgttgtgaagtggataggacatcatctgatcaccaaacaattttgagagcatgggctgtgaaagattttgctccaaattgtcctttgtatgtccagatattaaagcctgaaaataaatttcacatcaaatttgctgatcatgttgtttgtgaagaagagtttaaatacgccatgttagctttaaactgtatatgcccagcaacatctacacttattacactactggttcatacctctagagggcaagaaggccagcaatcgccagaacaatggcagaagatgtacggtagatgctccgggaatgaagtctaccacattgttttggaagaaagtacattttttgctgaatatgaaggaaagagttttacatatgcctctttccatgcacacaaaaagtttggcgtctgcttgattggtgttaggagggaggataataaaaacattttgctgaatccaggtcctcgatacattatgaattctacagacatatgcttttatattaatattaccaaagaagagaattcagcatttaaaaaccaagaccagcagagaaaaagcaatgtgtccaggtcgttttatcatggaccttccagattacctgtacatagcataattgccagcatgggtactgtggctatagacttgcaagatacaagctgtagatcagcaagtggccctaccctgtctcttcctacagagggaagcaaagaaataagaagacctagcattgctcctgttttagaggttgcagatacatcatcgattcaaacatgtgatcttctaagtgaccaatcagaagatgaaactacaccagatgaagaaatgtcttcaaacttagagtatgctaaaggttacccaccttattctccatatataggaagttcacccactttttgtcatctccttcatgaaaaagtaccattttgctgcttaagattagacaagagttgccaacataactactatgaggatgcaaaagcctatggattcaaaaataaactaattatagttgcagctgaaacagctggaaatggattatataactttattgttcctctcagggcatattatagaccaaagaaagaacttaatcccatagtactgctattggataaccccctagatgacttactcaggtgtggagtgacttttgctgctaatatggtggttgtggataaagagagcaccatgagtgccgaggaagactacatggcagatgccaaaaccattgtgaacgtgcagacactcttcaggttgttttccagtctcagtattatcacagagctaactcaccccgccaacatgagattcatgcaattcagagccaaagactgttactctcttgctctttcaaaactggaaaagaaagaacgggagagaggctctaacttggcctttatgtttcgactgccttttgctgctgggagggtgtttagcatcagtatgttggacactctgctgtatcagtcatttgtgaaggattatatgatttctatcacgagacttctgttgggactggacactacaccaggatctgggtttctttgttctatgaaaatcactgcagatgacttatggatcagaacttatgccagactttatcagaagttgtgttcttctactggagatgttcccattggaatctacaggactgagtctcagaaacttactacatctgagtctcaaatatctatcagtgtagaagagtgggaagacaccaaagactccaaagaacaagggcaccaccgcagcaaccaccgcaactcaacatccagtgatcagtcggaccatcccttgctgcggagaaaaagcatgcagtgggcccgaagactgagcagaaaaggcccaaaacactctggtaaaacagctgaaaaaataacccagcagcgactgaacctctacaggaggtcagaaagacaagagcttgctgaacttgtgaaaaatagaatgaaacacttgggtctttctacagtgggatatgatgaaatgaatgatcatcaaagtaccctctcctacatcctgattaacccatctccagataccagaatagagctgaatgatgttgtatacttaattcgaccagatccactggcctaccttccaaacagtgagcccagtcgaagaaacagcatctgcaatgtcactggtcaagattctcgggaggaaactcaactttgataaaaataaaatgagaaacttttttcctacaaagaccttgcttgaaaccacaaaagttttgctggcacgaaagaaactagatggaaatatatgtaattctctcatatttaaaaacgtaatctcttctcttagaagtatagatcattttgaaacttaatgtactacttactggtactctccctattaatatttgaaggacctcaatggaataaatttgaaaagctaaattaaaatacaaaaatttaaatctgacatttaattgttttataataatccaaactctatgaaagcaattttaaaaattattaaggttttatgaagttgacaaaatctaactatatttggtgcatcacaatggacacagaatgctgctgctcctcttaaaaattaaatgtgtcatattatattctttaaacttactgttttacaaaattgagctcatcgtaaatgtctagtcttctcacatagagattaaccaacaaacttgtgtggctgacttttgtgtaagaatcatagtttgctttagaatacaaatctttaagtcattttaacttttttttctgccttacgatataaaaatatttatcttagaatttgagatgttcatagcatgttttattacattgaagaaactaaaacataaatgaaaagaaacactaggttcctgcactttttggtaactttatgtctagcaaatattttatgccaagaaaagcatactataaagcaaatatctattattctcctaaacgaatgcctagcatagagaaaatacttaatacacatttgttgacttaaatttaattcaaggattgaaaaattaactggatatcttgaaatatacagtaatgattgtccttagactcttgaactttaccatctttcctattcatatatctatatagtaaatttcactagaaaaattcttttaaaattgacagaagataatttataccttttatggactctgaagacacttcaaaacattaaaagtccttatgtctttggtaatgaaacaataacactcaatgaaggatgtattaaaatttttgacttaattttgaaatcgtatatatgagctatactttaacattatgagagaaaagcataaaacaaaaataggtagttcttggcttttaacattaatgcaaatcatgcagaatttgagttataaatttaaatataaattgaccattgatgatatccagtttttcattttttacctgtattgcattttccccctagagaaatagatcaaaagagcacaagagtatgcgtacatagtttaccaggtagtagaagtgtgttaaaatgttcctgtaaaagaaacattggtaaatttaaatacatactgttctaattttgtattttttaatttttgaatttgacattgagtttaattcagcaacaacaaaaaatacatataaaactagaaagggactttttttcctttcttttcataatgaagcagatcaacttaaaggataataaaatttttaaagaaaagatattctaatgtactctcaataattctacagaaataaaactgtaaagtgcaatgtgaaatcaaagattatagtcattgtataatttggcttggaggctatgaaatgtctttttttctttttggtattttacattattcacattttagaataacaagaacaccaagaattacccctaaaacagagaccctgtatttaatctactttgatcagagaagtagaatttataacaggttagctaaaattgggagcatgccttaaaacttaaagattgtatgcatatatgtgtatatgttataaacgtgaaatatatttgacacacacattcacatataaattgttaaaaactgaaggcagaatggaactaatatatgtaacagagaaaaacaataaattttatgaacttgttttatatttgcatatcaagagtcaagtatgatgtttctttaagttgactttttttacttcattatttttaggaataaatgtaagattttacaaatcttttatttccccacaagatctgaagtttggtatttttgcattatgacagttgttgagactaggattttaagctaggatatgattatatttcctatataactaaaaattttgtttcataaattttaaaataattatttttgactatgaacattagtccaaatttaatatttgacacagttcataccagcttgctacaataatgataatttattagtctttctgttatttaaagaataaaaacatgcttataaaagacttttaatgaaatgttgcctttttaaaataattatacttgcacatgaaaataaaatataaagtcaataatagtccttgtagcccaatgggaattgattctgtttattgtctgtaccattttgctaccagttacattgaactgctttaaaataaataataaaattatttctaatgatgaaaa

SEQ ID NO: 23164 - DNA, 3146 bp, Homo sapiens
  source 1..3146: mol_type = unassigned DNA
ccctcctctcctccatttgttgtttgatgtttcccactctttgaggaaggatggttgatttggagagcgaagtgccccctctgcctcccaggtacaggtttcgagatttgctgctaggggaccaaggatggcaaaacgacgacagggtacaagttgaattctatatgaatgaaaatacatttaaagaaagactaaaattatttttcataaaaaaccagagatcaagtctaaggatacgcctgttcaatttttctctcaaattactaagctgcttattatacataatccgagtactactagaaaacccttcacaaggaaatgaatggtctcatatcttttgggtgaacagaagtctacctttgtggggcttacaggtttcagtggcattgataagtctgtttgaaacaatattacttggttatcttagttataagggaaacatctgggaacagattttacgaatacccttcatcttggaaataattaatgcagttcccttcattatctcaatattctggccttccttaaggaatctatttgtcccagtctttctgaactgttggcttgccaaacatgccttggaaaatatgattaatgatctacacagagccattcagcgtacacagtctgcaatgtttaatcaagttttgattttaatatctacattactatgccttatcttcacctggatcaccaaacaattttgagagcatgggctgtgaaagattttgctccaaattgtcctttgtatgtccagatattaaagcctgaaaataaatttcacatcaaatttgctgatcatgttgtttgtgaagaagagtttaaatacgccatgttagctttaaactgtatatgcccagcaacatctacacttattacactactggttcatacctctagagggcaagaaggccagcaatcgccagaacaatggcagaagatgtacggtagatgctccgggaatgaagtctaccacattgttttggaagaaagtacattttttgctgaatatgaaggaaagagttttacatatgcctctttccatgcacacaaaaagtttggcgtctgcttgattggtgttaggagggaggataataaaaacattttgctgaatccaggtcctcgatacattatgaattctacagacatatgcttttatattaatattaccaaagaagagaattcagcatttaaaaaccaagaccagcagagaaaaagcaatgtgtccaggtcgttttatcatggaccttccagattacctgtacatagcataattgccagcatgggtactgtggctatagacttgcaagatacaagctgtagatcagcaagtggccctaccctgtctcttcctacagagggaagcaaagaaataagaagacctagcattgctcctgttttagaggttgcagatacatcatcgattcaaacatgtgatcttctaagtgaccaatcagaagatgaaactacaccagatgaagaaatgtcttcaaacttagagtatgctaaaggttacccaccttattctccatatataggaagttcacccactttttgtcatctccttcatgaaaaagtaccattttgctgcttaagattagacaagagttgccaacataactactatgaggatgcaaaagcctatggattcaaaaataaactaattatagttgcagctgaaacagctggaaatggattatataactttattgttcctctcagggcatattatagaccaaagaaagaacttaatcccatagtactgctattggataacccatgacttactcaggtgtggagtgacttttgctgctaatatggtggttgtggataaagagagcaccatgagtgccgaggaagactacatggcagatgccaaaaccattgtgaacgtgcagacactcttcagaaagaacgggagagaggctctaacttggcctttatgtttcgactgccttttgctgctgggagggtgtttagcatcagtatgttggacactctgctgtatcagtcatttgtgaaggattatatgatttctatcacgagacttctgttgggactggacactacaccaggatctgggtttctttgttctatgaaaatcactgcagatgacttatggatcagaacttatgccagactttatcagaagttgtgttcttctactggagatgttcccattggaatctacaggactgagtctcagaaacttactacatctgagtctcgaaaaatagcatcacaagattttattggatctacttcctgacgttacttaaattgtctcaaatatctatcagtgtagaagagtgggaagacaccaaagactccaaagaacaagggcaccaccgcagcaaccaccgcaactcaacatccagtgatcagtcggaccatcccttgctgcggagaaaaagcatgcagtgggcccgaagactgagcagaaaaggcccaaaacactctggtaaaacagctgaaaaaataacccagcagcgactgaacctctacaggaggtcagaaagacaagagcttgctgaacttgtgaaaaatagaatgaaacacttgggtctttctacagtgggatatgatgaaatgaatgatcatcaaagtaccctctcctacatcctgattaacccatctccagataccagaatagagctgaatgatgttgtatacttaattcgaccagatccactggcctaccttccaaacagtgagcccagtcgaagaaacagcatctgcaatgtcactggtcaagattctcgggaggaaactcaactttgataaaaataaaatgagaaacttttttcctacaaagaccttgcttgaaaccacaaaagttttgctggcacgaaagaaactagatggaaatatatgtaattctctcatatttaaaaacgtaatctcttctcttagaagtatagatcattttgaaacttaatgtactacttactggtactctccctattaatatttgaaggacctcaatggaataaatttgaaaagctaaattaaaatacaaaaatttaaatctgacatttaattgttttataataatccaaactctatgaaagcaattttaaaaattattaaggttttatgaagttgacaaaatctaactatatttggtgcatcacaatggacacaga

SEQ ID NO: 23165 - DNA, 5164 bp, Homo sapiens
  source 1..5164: mol_type = unassigned DNA
tattattaatgatctacacagagccattcagcgtacacagtctgcaatgtttaatcaagttttgattttaatatctacattactatgccttatcttcacctgcatttgtgggatccaacatctggaacgaataggaaagaagctgaatctctttgactccctttatttctgcattgtgacgttttctactgtgggcttcggggatgtcactcctgaaacatggtcctccaagctttttgtagttgctatgatttgtgttgctcttgtggttctacccatacagtttgaacagctggcttatttgtggatggagagacaaaagtcaggaggaaactatagtcgacatagagctcaaactgaaaagcatgtcgtcctgtgtgtcagctcactgaagattgatttacttatggattttttaaatgaattctatgctcatcctaggctccaggattattatgtggtgattttgtgtcctactgaaatggatgtacaggttcgaagggtactgcagattccaatgtggtcccaacgagttatctaccttcaaggttcagcccttaaagatcaagacctattgagagcaaagatggatgacgctgaggcctgttttattctcagtagccgttgtgaagtggataggacatcatctgatcaccaaacaattttgagagcatgggctgtgaaagattttgctccaaattgtcctttgtatgtccagatattaaagcctgaaaataaatttcacatcaaatttgctgatcatgttgtttgtgaagaagagtttaaatacgccatgttagctttaaactgtatatgcccagcaacatctacacttattacactactggttcatacctctagagggcaagaaggccagcaatcgccagaacaatggcagaagatgtacggtagatgctccgggaatgaagtctaccacattgttttggaagaaagtacattttttgctgaatatgaaggaaagagttttacatatgcctctttccatgcacacaaaaagtttggcgtctgcttgattggtgttaggagggaggataataaaaacattttgctgaatccaggtcctcgatacattatgaattctacagacatatgcttttatattaatattaccaaagaagagaattcagcatttaaaaaccaagaccagcagagaaaaagcaatgtgtccaggtcgttttatcatggaccttccagattacctgtacatagcataattgccagcatgggtactgtggctatagacttgcaagatacaagctgtagatcagcaagtggccctaccctgtctcttcctacagagggaagcaaagaaataagaagacctagcattgctcctgttttagaggttgcagatacatcatcgattcaaacatgtgatcttctaagtgaccaatcagaagatgaaactacaccagatgaagaaatgtcttcaaacttagagtatgctaaaggttacccaccttattctccatatataggaagttcacccactttttgtcatctccttcatgaaaaagtaccattttgctgcttaagattagacaagttttagccataaaatctctgccacagaccattgttcctgattcaagcgaaatattttttctggactactcctggggatcttggactcaaggctttgcctagatgacttactcaggtgtggagtgacttttgctgctaatatggtggttgtggataaagagagcaccatgagtgccgaggaagactacatggcagatgccaaaaccattgtgaacgtgcagacactcttcaggttgttttccagtctcagtattatcacagagctaactcaccccgccaacatgagattcatgcaattcagagccaaagactgttactctcttgctctttcaaaactggaaaagaaagaacgggagagaggctctaacttggcctttatgtttcgactgccttttgctgctgggagggtgtttagcatcagtatgttggacactctgctgtatcagtcatttgtgaaggattatatgatttctatcacgagacttctgttgggactggacactacaccaggatctgggtttctttgttctatgaaaatcactgcagatgacttatggatcagaacttatgccagactttatcagaagttgtgttcttctactggagatgttcccattggaatctacaggactgagtctcagaaacttactacatctgagtctcaaatatctatcagtgtagaagagtgggaagacaccaaagactccaaagaacaagggcaccaccgcagcaaccaccgcaactcaacatccagtgatcagtcggaccatcccttgctgcggagaaaaagcatgcagtgggcccgaagactgagcagaaaaggcccaaaacactctggtaaaacagctgaaaaaataacccagcagcgactgaacctctacaggaggtcagaaagacaagagcttgctgaacttgtgaaaaatagaatgaaacacttgggtctttctacagtgggatatgatgaaatgaatgatcatcaaagtaccctctcctacatcctgattaacccatctccagataccagaatagagctgaatgatgttgtatacttaattcgaccagatccactggcctaccttccaaacagtgagcccagtcgaagaaacagcatctgcaatgtcactggtcaagattctcgggaggaaactcaactttgataaaaataaaatgagaaacttttttcctacaaagaccttgcttgaaaccacaaaagttttgctggcacgaaagaaactagatggaaatatatgtaattctctcatatttaaaaacgtaatctcttctcttagaagtatagatcattttgaaacttaatgtactacttactggtactctccctattaatatttgaaggacctcaatggaataaatttgaaaagctaaattaaaatacaaaaatttaaatctgacatttaattgttttataataatccaaactctatgaaagcaattttaaaaattattaaggttttatgaagttgacaaaatctaactatatttggtgcatcacaatggacacagaatgctgctgctcctcttaaaaattaaatgtgtcatattatattctttaaacttactgttttacaaaattgagctcatcgtaaatgtctagtcttctcacatagagattaaccaacaaacttgtgtggctgacttttgtgtaagaatcatagtttgctttagaatacaaatctttaagtcattttaacttttttttctgccttacgatataaaaatatttatcttagaatttgagatgttcatagcatgttttattacattgaagaaactaaaacataaatgaaaagaaacactaggttcctgcactttttggtaactttatgtctagcaaatattttatgccaagaaaagcatactataaagcaaatatctattattctcctaaacgaatgcctagcatagagaaaatacttaatacacatttgttgacttaaatttaattcaaggattgaaaaattaactggatatcttgaaatatacagtaatgattgtccttagactcttgaactttaccatctttcctattcatatatctatatagtaaatttcactagaaaaattcttttaaaattgacagaagataatttataccttttatggactctgaagacacttcaaaacattaaaagtccttatgtctttggtaatgaaacaataacactcaatgaaggatgtattaaaatttttgacttaattttgaaatcgtatatatgagctatactttaacattatgagagaaaagcataaaacaaaaataggtagttcttggcttttaacattaatgcaaatcatgcagaatttgagttataaatttaaatataaattgaccattgatgatatccagtttttcattttttacctgtattgcattttccccctagagaaatagatcaaaagagcacaagagtatgcgtacatagtttaccaggtagtagaagtgtgttaaaatgttcctgtaaaagaaacattggtaaatttaaatacatactgttctaattttgtattttttaatttttgaatttgacattgagtttaattcagcaacaacaaaaaatacatataaaactagaaagggactttttttcctttcttttcataatgaagcagatcaacttaaaggataataaaatttttaaagaaaagatattctaatgtactctcaataattctacagaaataaaactgtaaagtgcaatgtgaaatcaaagattatagtcattgtataatttggcttggaggctatgaaatgtctttttttctttttggtattttacattattcacattttagaataacaagaacaccaagaattacccctaaaacagagaccctgtatttaatctactttgatcagagaagtagaatttataacaggttagctaaaattgggagcatgccttaaaacttaaagattgtatgcatatatgtgtatatgttataaacgtgaaatatatttgacacacacattcacatataaattgttaaaaactgaaggcagaatggaactaatatatgtaacagagaaaaacaataaattttatgaacttgttttatatttgcatatcaagagtcaagtatgatgtttctttaagttgactttttttacttcattatttttaggaataaatgtaagattttacaaatcttttatttccccacaagatctgaagtttggtatttttgcattatgacagttgttgagactaggattttaagctaggatatgattatatttcctatataactaaaaattttgtttcataaattttaaaataattatttttgactatgaacattagtccaaatttaatatttgacacagttcataccagcttgctacaataatgataatttattagtctttctgttatttaaagaataaaaacatgcttataaaagacttttaatgaaatgttgcctttttaaaataattatacttgcacatgaaaataaaatataaagtcaataatagtccttgtagcccaatgggaattgattctgtttattgtctgtaccattttgctaccagttacattgaactgctttaaaataaataataaaattatttctaatgatg

SEQ ID NO: 23166 - DNA, 2927 bp, Homo sapiens
  source 1..2927: mol_type = unassigned DNA
ggtgacaacgtttgggaagggccagggcgaccggcagtgtgcacagggactgtgtcgggcttggacctcacctgatcctctctcttagcgcgacccttcctctgctccctgtctcctctttctgccacttgtgcgctgcttccgcgcactcccggctccctagcggcaggaggaggaaggcgcacagcgggtggagagggtgcgccaaggagaggtaaccccttcgggagcccggggaatcccggccgccaccaggggccgtgccaccgccctcgcgggaccaaagcttccggcgtgtccccaactttgtggcgccctcaggccgcggcgactgggttagagatgccttccagcggcagagcgctgctggactcgccgctggacagcggctccctgacctccctggactctagtgtcttctgcagcgagggtgaaggggagcccttggcgctcggggactgcttcacggtcaacgtgggcggcagccgcttcgtgctctcgcagcaggcgctgtcctgcttcccgcacacgcgccttggcaagctggccgtggtggtggcttcctaccgccgccccggggccctggccgccgtgcccagccctctggagctttgcgacgatgccaaccccgtggacaacgagtacttcttcgaccgcagctcgcaggcgttccgatatgtcctgcactactaccgcaccggccgcctgcatgtcatggagcagctgtgcgcgctctccttcctgcaggagatccagtactggggcatcgatgagctcagcatcgattcctgctgcagggacagatacttcagaaggaaagagctgagtgaaactttagacttcaagaaggacacagaagaccaggaaagtcaacatgagagtgaacaggacttctcccaaggaccttgtcccactgttcgccagaagctctggaatatcctggagaaacctggatcttccacagctgcccgtatctttggcgtcatctccattatcttcgtggtggtgtccatcattaacatggccctgatgtcagctgagttaagctggctggacctgcagctgctggaaatcctggagtatgtgtgcattagctggttcaccggggagtttgtcctccgcttcctgtgtgtgcgggacaggtgtcgcttcctaagaaaggtgccaaacatcatagacctccttgccatcttgcccttctacatcactcttctggtagagagcctaagtgggagccagaccacgcaggagctggagaacgtggggcgcattgtccaggtgttgaggctgctcagggctctgcgcatgctaaagctgggcagacattccacaggattacgctcccttgggatgacaatcacccagtgttacgaagaagtcggcctactgctcctatttctatccgtgggaatctctatattttcaactgtagaatactttgctgagcaaagcattcctgacacaaccttcacaagtgtcccttgtgcatggtggtgggccaccacctctatgactactgtgggatatggggacattagaccagacaccaccacaggcaaaatcgtggccttcatgtgtatattatcgggaattcttgtcttggccttgcctattgctattattaacgatcgcttctctgcttgctacttcaccttgaaactcaaggaagcagctgttagacagcgtgaagccctaaagaagcttaccaagaatatagccactgactcatatatcagtgttaacttgagagatgtctatgcccggagtatcatggagatgctgcgactgaaaggcagagaaagagcaagtactaggagcagcgggggagatgatttctggttttgaattaattttcaatttatttacaaaagctatgtacaattaactaaaatgataaagcagtgatgtggatttctgtattctgatgatgagtctcttcagagtactgctcatcttaattaatttttgctgatatattgcttcatctactagaatatttcacatcacctataacaactgcacagtgttctgacacatttgagtgtccaaaatagccaattaacacaaccaaatacaactgggccaatataaacatgtttgaattgtcaaatataaaataatgttattgcaatacatacaaaaaagttaaagattttatgtatcactaacattagaagttttttgcaccactaattttttaaaaatggaaggtaaactgcatagcccagagaaagataagtaaatatttaagaacatattgaacaactttgctatttaaagatattatccaagtacataaattactccgttctctatcagttaaagctattgaatataatacttagctttacaagagaaaacccatatttgatgggcagagattatatccctatcttctttttcatgtaaaccactggtcacaaatgaactgatctctgtatcccattattactataagaggtgggaatcccaaaactgcttagattgcagtacatgagtctacacaaagacttcaacaattgcacatcttcattctcccaactgagtgtagtatgtggagcataaaacagcatatttcttagtatttcatgaatatcagatggtctttaaatgtctctttatggatgtattgttcacattatggctttaaaataatgaatatgtaaaagtgaggtagtgaacatcctaaatttctacactggaattactaaataatcttatttcataaaatgggaaatatatgttaaatgacatcactggatgaacttgaagatcttttacttgttaacaaaaaaatactatggacagctttctgattgttggggtaaatagcaaatgttcaaactttgcaggcattttgacattcatcataacaacacaattcctagacattgtattatataattaaagccaaaacctctaaagct

SEQ ID NO: 23167 - DNA, 6979 bp, Homo sapiens
  source 1..6979: mol_type = unassigned DNA
agagcgggcggggcggacacgcttagcgtaagcgcaggggccaggagcccggagggaggtggaggcggggcaaggcaaggcagcaggcgctgggtagagctcagctggaacacagtttccctcctggaccggtcgagtcagacctcacgtgtagactaagaggatcaaaagaagagtacgttacctgcggcgccggttgtgcgcagaccagatgtgccgggagctgcaggaggtcagaacctaagggagacggcggaagaaaatggagcgtcagtgatcatcagactagaatgagagtgaattgggagaaaatggtgcggccccctcacccagagaaccctcccccacctgctcacacccccagcgaacaccccgggggaggcctatgaagcagcagtaaaagaaaagggaggaatataaattctcaagttggaagggacccggttaccacttcctttgctttctgaactttttgttttggtctcctgcgggcaggagtgagtctcgccatcccccttgcttgcttgcttgcttgcgttcagctaagagtcatcttctctcctcttcctcctcctccgccccacatctccctccttcctcccttccccaacccctccacccaccaagtagcgagtcattcaatctgtacacctcctgggctgggaatcgcaattgcgaagttgggaggcggggtgacaacgtttgggaagggccagggcgaccggcagtgtgcacagggactgtgtcgggcttggacctcacctgatcctctctcttagcgcgacccttcctctgctccctgtctcctctttctgccacttgtgcgctgcttccgcgcactcccggctccctagcggcaggaggaggaaggcgcacagcgggtggagagggtgcgccaaggagaggtaaccccttcgggagcccggggaatcccggccgccaccaggggccgtgccaccgccctcgcgggaccaaagcttccggcgtgtccccaactttgtggcgccctcaggccgcggcgactgggttagagatgccttccagcggcagagcgctgctggactcgccgctggacagcggctccctgacctccctggactctagtgtcttctgcagcgagggtgaaggggagcccttggcgctcggggactgcttcacggtcaacgtgggcggcagccgcttcgtgctctcgcagcaggcgctgtcctgcttcccgcacacgcgccttggcaagctggccgtggtggtggcttcctaccgccgccccggggccctggccgccgtgcccagccctctggagctttgcgacgatgccaaccccgtggacaacgagtacttcttcgaccgcagctcgcaggcgttccgatatgtcctgcactactaccgcaccggccgcctgcatgtcatggagcagctgtgcgcgctctccttcctgcaggagatccagtactggggcatcgatgagctcagcatcgattcctgctgcagggacagatacttcagaaggaaagagctgagtgaaactttagacttcaagaaggacacagaagaccaggaaagtcaacatgagagtgaacaggacttctcccaaggaccttgtcccactgttcgccagaagctctggaatatcctggagaaacctggatcttccacagctgcccgtatctttggcgtcatctccattatcttcgtggtggtgtccatcattaacatggccctgatgtcagctgagttaagctggctggacctgcagctgctggaaatcctggagtatgtgtgcattagctggttcaccggggagtttgtcctccgcttcctgtgtgtgcgggacaggtgtcgcttcctaagaaaggtgccaaacatcatagacctccttgccatcttgcccttctacatcactcttctggtagagagcctaagtgggagccagaccacgcaggagctggagaacgtggggcgcattgtccaggtgttgaggctgctcagggctctgcgcatgctaaagctgggcagacattccacaggattacgctcccttgggatgacaatcacccagtgttacgaagaagtcggcctactgctcctatttctatccgtgggaatctctatattttcaactgtagaatactttgctgagcaaagcattcctgacacaaccttcacaagtgtcccttgtgcatggtggtgggccaccacctctatgactactgtgggatatggggacattagaccagacaccaccacaggcaaaatcgtggccttcatgtgtatattatcgggaattcttgtcttggccttgcctattgctattattaacgatcgcttctctgcttgctacttcaccttgaaactcaaggaagcagctgttagacagcgtgaagccctaaagaagcttaccaagaatatagccactgactcatatatcagtgttaacttgagagatgtctatgcccggagtatcatggagatgctgcgactgaaaggcagagaaagagcaagtactaggagcagcgggggagatgatttctggttttgaattaattttcaatttatttacaaaagctatgtacaattaactaaaatgataaagcagtgatgtggatttctgtattctgatgatgagtctcttcagagtactgctcatcttaattaatttttgctgatatattgcttcatctactagaatatttcacatcacctataacaactgcacagtgttctgacacatttgagtgtccaaaatagccaattaacacaaccaaatacaactgggccaatataaacatgtttgaattgtcaaatataaaataatgttattgcaatacatacaaaaaagttaaagattttatgtatcactaacattagaagttttttgcaccactaattttttaaaaatggaaggtaaactgcatagcccagagaaagataagtaaatatttaagaacatattgaacaactttgctatttaaagatattatccaagtacataaattactccgttctctatcagttaaagctattgaatataatacttagctttacaagagaaaacccatatttgatgggcagagattatatccctatcttctttttcatgtaaaccactggtcacaaatgaactgatctctgtatcccattattactataagaggtgggaatcccaaaactgcttagattgcagtacatgagtctacacaaagacttcaacaattgcacatcttcattctcccaactgagtgtagtatgtggagcataaaacagcatatttcttagtatttcatgaatatcagatggtctttaaatgtctctttatggatgtattgttcacattatggctttaaaataatgaatatgtaaaagtgaggtagtgaacatcctaaatttctacactggaattactaaataatcttatttcataaaatgggaaatatatgttaaatgacatcactggatgaacttgaagatcttttacttgttaacaaaaaaatactatggacagctttctgattgttggggtaaatagcaaatgttcaaactttgcaggcattttgacattcatcataacaacacaattcctagacattgtattatataattaaagccaaaacctctaaagctaagaactagctcatgattcccattattttagtaaatgagattctacaacctaagaataacaaggaatgcatcactttaatacctacatttccaatataatagagcccccaaggggaagaaaattggttcttgaggaaaaaaaaatcttatcacttcatttacaaaacacagataagcatattgagtatatctgtggtattaacatttcatgggggtgagatgttagggaaaaaagcctagaaggctctttgccaggggtgaatggtgataagaaataaacattgaggactgctttaatatatagctataaggtatttcataaactctatttaagacatcatattatgctatgcactaccaagaaagaaagatgccagtcaattgtaagatgccattaactgtaaaatgcatccggatttcagatatgtaaaaatttaaaataagcaccttaaaatcaatgaaatatcgcatgtactacctcctgttttctggtatgcatggttaagctctgaaaacattttcactgatggcatgagttttagattgtgtgctaaagtactttaattcatttaacttgtttccacttctcctaaatattataaaaggttcaggagatatgaatattagtaagataaatattttacttcttacacacatacatgggtgctagattgtggcacagggccactagtcatagtataaatcccttccacaatctgaagggaaagtagaagttagacacagaaggtaaacttactccagcttttctagaactttccctaataagaatagttactctgatccaggactatgctctgtattcatcatgtattatgccattttatcctcaaaatatccctattatataattactattcttatactcttcaaaatacatattttatatatttattaactcaacaaatatttattaaggatctttggtgttctggggactagggagtctttcttaaacaagactaggtcctgttttcttgtagttaatattctgttcaaaggtgtgtgaggaaaagacagcgaaactgaaacattaaaaggtataaacttgcctaaattcacacaggctatagatggcagagccagcgctgaataccaatctgcctgacccggaaaacgacactcctaaaagtcaaattgcagatttcattcttcctacacaagctctgcatagaaatttattttttaggcaggcaagccaacttcttgtgcatggagaagttcaatatgccttaagtaaaatatcagcttattctcagaggtggaatggtgcttttaagaaaaggctgtggtgacaccttatagtcattattagattaaaaatatattatctttagagtaaatagtagttggaaataaaaaaaattaaaaactatgtgtatacatatgtatatatgtttttatcatggaggatcctaaacatcttctctacaaatgtgctgttagctatataaatgttgtcaagatgtaggtcttcagaaagaagttttaaaatatcattgcttactcaattttgctgttaaataaaatatcattttatttattcaatgaatgtatatataagcaaaccaaatttcatttaggtaaaaaaatcaaggcaggaactctgccaattttataacccattattttaaaacagtaaacactttttaaacatctaagaattattgttataaaacaatatttaattttttaaaatataaaataattgaattattgtctttctctaagctatttagagaacactactttctttgttttgttttggtttggttttttgagacggagtgtccgtctgtcgcccaggctggagtgccagtggcgcgatctcggctcactgcaagctccacctcttgggttcacaccattctcctgcgtcaacctcgcgagtagctgggactagaggcgcccgccaccacgcctggctaattttttgtatttttagcagagacggggtttcaccgtgttagccactttctttgttaatttaactgttattttaagttcagggatacatgtgcgggtttgttatacaggtaatcttgtgtcatgagagtttttttgcacggattatttcatcacccaggtattaaacctagcaccagttatttttcctgattctctccctcctcctacccagcaccctctgataggccccaatgtgtgttgtttccctctatgtgttcatgtgctctcatcatttagctcccacttataagtgagaacatgtggtatttggttttctcttcctgcattagtttgctaaggataatagcctccagctccatccatgtccctgcaaatgacatgatctcattctttcatatggctggatagtacttcatggtgtatacatacattttctttatccagtctacagttgatgggcatttaggtttattccatgtctttgctactgtgaataatgctgcattgaacatacgtgtgcatgtatctttataataaaacaatttatatttcttgggtatatacccattaatgggattgctggatccagtggtatttctgtttttaggtctttgaggaattgccacactctcacatggctgaactaatttacactcccagtatcagtgtatatgcgttccaattgctccataacttcgccagcatctgcttttttttttttgctttttaataatagccattctgactagtgtgagatggtatctcattatggttttgatttgcgtttctctaatgatcagtgatattgaggctttttttcatatcattgttggctgcatgtatgttttcttttgaaaagtgtctgttcatatcctttgcccactttttaatgggatttttttttcttgtaaatttgtttaagtttcttatagatgctggaatattagacttttgtagatgtatagtttgcaaatattttcccccaatctgtaggttgtctgttcactctgttgataggttcctttgctctgacaaagctctagagtttaattagatcccatttgccaatttttgctttcgttgcaaccaccttttgtgtcttcatcatgaaatctttgcctgttagaaaacactactttcagacatttaaatgcatataggcaatgcttaagtacctaaaaaagcaattttaagaaattactgaggtatctctattaagagtgacatattcatattttattttatgtatatattatttctataacatacaagaaattgttgcatttatcattttaatgcaaagtagtatcaagtataatggattagatgcaaaaataactgaggtaggaatctcagttctgtgttttaatgtggaattcttatgcttattaaaatattttgattagctgttgca

SEQ ID NO: 23168 - DNA, 1940 bp, Homo sapiens
  source 1..1940: mol_type = unassigned DNA
aatctgtacacctcctgggctgggaatcgcaattgcgaagttgggaggcggggtgacaacgtttgggaagggccagggcgaccggcagtgtgcacagggactgtgtcgggcttggacctcacctgatcctctctcttagcgcgacccttcctctgctccctgtctcctctttctgccacttgtgcgctgcttccgcgcactcccggctccctagcggcaggaggaggaaggcgcacagcgggtggagagggtgcgccaaggagaggtaaccccttcgggagcccggggaatcccggccgccaccaggggccgtgccaccgccctcgcgggaccaaagcttccggcgtgtccccaactttgtggcgccctcaggccgcggcgactgggttagagatgccttccagcggcagagcgctgctggactcgccgctggacagcggctccctgacctccctggactctagtgtcttctgcatgtcatggagcagctgtgcgcgctctccttcctgcaggagatccagtactggggcatcgatgagctcagcatcgattcctgctgcagggacagatacttcagaaggaaagagctgagtgaaactttagacttcaagaaggacacagaagaccaggaaagtcaacatgagagtgaacaggacttctcccaaggaccttgtcccactgttcgccagaagctctggaatatcctggagaaacctggatcttccacagctgcccgtatctttggcgtcatctccattatcttcgtggtggtgtccatcattaacatggccctgatgtcagctgagttaagctggctggacctgcagctgctggaaatcctggagtatgtgtgcattagctggttcaccggggagtttgtcctccgcttcctgtgtgtgcgggacaggtgtcgcttcctaagaaaggtgccaaacatcatagacctccttgccatcttgcccttctacatcactcttctggtagagagcctaagtgggagccagaccacgcaggagctggagaacgtggggcgcattgtccaggtgttgaggctgctcagggctctgcgcatgctaaagctgggcagacattccacaggattacgctcccttgggatgacaatcacccagtgttacgaagaagtcggcctactgctcctatttctatccgtgggaatctctatattttcaactgtagaatactttgctgagcaaagcattcctgacacaaccttcacaagtgtcccttgtgcatggtggtgggccaccacctctatgactactgtgggatatggggacattagaccagacaccaccacaggcaaaatcgtggccttcatgtgtatattatcgggaattcttgtcttggccttgcctattgctattattaacgatcgcttctctgcttgctacttcaccttgaaactcaaggaagcagctgttagacagcgtgaagccctaaagaagcttaccaagaatatagccactgactcatatatcagtgttaacttgagagatgtctatgcccggagtatcatggagatgctgcgactgaaaggcagagaaagagcaagtactaggagcagcgggggagatgatttctggttttgaattaattttcaatttatttacaaaagctatgtacaattaactaaaatgataaagcagtgatgtggatttctgtattctgatgatgagtctcttcagagtactgctcatcttaattaatttttgctgatatattgcttcatctactagaatatttcacatcacctataacaactgcacagtgttctgacacatttgagtgtccaaaatagccaattaacacaaccaaatacaactgggccaatataaacatgtttgaattgtcaaatataaaataatgttattgcaatacatacaaaaaagttaaagattttatgtatcactaacattaga

SEQ ID NO: 23169 - DNA, 2186 bp, Homo sapiens
  source 1..2186: mol_type = unassigned DNA
gcaagattagagcagtcaacagctgactgcgttcagaccctgcaggctgggctggcctgcccaggacctgagaaggggcagctccggtggcaatgtctgagcccctagctgtgctggtccgggctggcctctctaagacagtgcaggccacgtgatccatcctcctagaggcagtgagcaggtgagggacccctaccacagccaggaggaaaaagctaggcgtccactttccgcagccatgctcaaacagagtgagaggagacggtcctggagctacaggccctggaacacgacggagaatgagggcagccaacaccgcaggagcatttgctccctgggtgcccgttccggctcccaggccagcatccacggctggacagagggcaactataactactacatcgaggaagacgaagacggcgaggaggaggaccagtggaaggacgacctggcagaagaggaccagcaggcaggggaggtcaccaccgccaagcccgagggccccagcgaccctccggccctgctgtccacgctgaatgtgaacgtgggtggccacagctaccagctggactactgcgagctggccggcttccccaagacgcgcctaggtcgcctggccacctccaccagccgcagccgccagctaagcctgtgcgacgactacgaggagcagacagacgaatacttcttcgaccgcgacccggccgtcttccagctggtctacaatttctacctgtccggggtgctgctggtgctcgacgggctgtgtccgcgccgcttcctggaggagctgggctactggggcgtgcggctcaagtacacgccacgctgctgccgcatctgcttcgaggagcggcgcgacgagctgagcgaacggctcaagatccagcacgagctgcgcgcgcaggcgcaggtcgaggaggcggaggaactcttccgcgacatgcgcttctacggcccgcagcggcgccgcctctggaacctcatggagaagccattctcctcggtggccgccaaggccatcggggtggcctccagcaccttcgtgctcgtctccgtggtggcgctggcgctcaacaccgtggaggagatgcagcagcactcggggcagggcgagggcggcccagacctgcggcccatcctggagcacgtggagatgctgtgcatgggcttcttcacgctcgagtacctgctgcgcctagcctccacgcccgacctgaggcgcttcgcgcgcagcgccctcaacctggtggacctggtggccatcctgccgctctaccttcagctgctgctcgagtgcttcacgggcgagggccaccaacgcggccagacggtgggcagcgtgggtaaggtgggtcaggtgttgcgcgtcatgcgcctcatgcgcatcttccgcatcctcaagctggcgcgccactccaccggactgcgtgccttcggcttcacgctgcgccagtgctaccagcaggtgggctgcctgctgctcttcatcgccatgggcatcttcactttctctgcggctgtctactctgtggagcacgatgtgcccagcaccaacttcactaccatcccccactcctggtggtgggccgcggtgagcatctccaccgtgggctacggagacatgtacccagagacccacctgggcaggttttttgccttcctctgcattgcttttgggatcattctcaacgggatgcccatttccatcctctacaacaagttttctgattactacagcaagctgaaggcttatgagtataccaccatacgcagggagaggggagaggtgaacttcatgcagagagccagaaagaagatagctgagtgtttgcttggaagcaacccacagctcaccccaagacaagagaattagtattttataggacatgtggctggtagattccatgaacttcaaggcttcattgctctttttttaatcattatgattggcagcaaaaggaaatgtgaagcagacatacacaaaggccatttcgttcacaaagtactgcctctagaaatactcattttggcccaaactcagaatgtctcatagttgctctgtgttgtgtgaaacatctgaccttctcaatgacgttgatattgaaaacctgaggggagcaacagcttagatttttcttgtagcttctcgtggcatctagctcaataaatatttttggacttga

SEQ ID NO: 23170 - DNA, 1863 bp, Homo sapiens
  source 1..1863: mol_type = unassigned DNA
accatctcaaccatgaagctgaagacacaggcatccgtattctatagctaattcagttgatttcatctcagcacacatacactgagcgcttcctaagagcgaggttgaccgacatttttattagcaataatctctgccttcttctgattacctagagatttaagaccacataatcatcctctacctcacagggtcaagggagtgggggaggaaatgggctaagaggttctaaatccctcctaacacttgcttcttccaaatcagcaagattagagcagtcaacagctgactgcgttcagaccctgcaggctgggctggcctgcccaggacctgagaaggggcagctccggtggcaatgtctgagcccctagctgtgctggtccgggctggcctctctaagacagtgcaggccacgtgatccatcctcctagaggcagtgagcaggtgagggacccctaccacagccaggaggaaaaagctaggcgtccactttccgcagccatgctcaaacagagtgagaggagacggtcctggagctacaggccctggaacacgacggagaatgagggcagccaacaccgcaggagcatttgctccctgggtgcccgttccggctcccaggccagcatccacggctggacagagggcaactataactactacatcgaggaagacgaagacggcgaggaggaggaccagtggaaggacgacctggcagaagaggaccagcaggcaggggaggtcaccaccgccaagcccgagggccccagcgaccctccggccctgctgtccacgctgaatgtgaacgtgggtggccacagctaccagctggactactgcgagctggccggcttccccaagacgcgcctaggtcgcctggccacctccaccagccgcagccgccagctaagcctgtgcgacgactacgaggagcagacagacgaatacttcttcgaccgcgacccggccgtcttccagctggtctacaatttctacctgtccggggtgctgctggtgctcgacgggctgtgtccgcgccgcttcctggaggagctgggctactggggcgtgcggctcaagtacacgccacgctgctgccgcatctgcttcgaggagcggcgcgacgagctgagcgaacggctcaagatccagcaccttcgtgctcgtctccgtggtggcgctggcgctcaacaccgtggaggagatgcagcagcactcggggcagggcgagggcggcccagacctgcggcccatcctggagcacgtggagatgctgtgcatgggcttcttcacgctcgagtacctgctgcgcctagcctccacgcccgacctgaggcgcttcgcgcgcagcgccctcaacctggtggacctggtggccatcctgccgctctaccttcagctgctgctcgagtgcttcacgggcgagggccaccaacgcggccagacggtgggcagcgtgggtaaggtgggtcaggtgttgcgcgtcatgcgcctcatgcgcatcttccgcatcctcaagctggcgcgccactccaccggactgcgtgccttcggcttcacgctgcgccagtgctaccagcaggtgggctgcctgctgctcttcatcgccatgggcatcttcactttctctgcggctgtctactctgtggagcacgatgtgcccagcaccaacttcactaccatcccccactcctggtggtgggccgcggtgagcatctccaccgtgggctacggagacatgtacccagagacccacctgggcaggttttttgccttcctctgcattgcttttgggatcattctcaacgggatgcccatttccatcctctacaacaagttttctgattactacagcaagctgaa

SEQ ID NO: 23171 - DNA, 2511 bp, Homo sapiens
  source 1..2511: mol_type = unassigned DNA
cggcggcagcagcccatgcctccggtgcaacagctgcgcctcctccggtgccccggcggcgggggcgggagataacctgtccctgctgctccgcacctcctcgcccggcggcgccttccggacccgcacctcctcgccgctgtcgggctcgtcctgctgctgctgctgctgctcgtcgcgccggggcagccagctcaatgtgagcgagctgacgccgtccagccatgccagtgcgctccggcagcagtacgcgcagcagtccgcgcagcagtcggcgtccgcctcccagtaccaccagtgccacagcctgcagcccgccgccagccccacgggcagcctcggcagtctgggctccgggcccccgctctcgcaccaccaccaccacccgcacccggcgcaccaccagcaccaccagccccaggcgcgccgcgagagcaaccccttcaccgaaatagccatgagcagctgcaggtacaacgggggcgtcatgcggccgctcagcaacttgagcgcgtcccgccggaacctgcacgagatggactcagaggcgcagcccctgcagccccccgcgtctgtcggaggaggtggcggcgcgtcctccccgtctgcagccgctgccgccgccgccgctgtttcgtcctcagcccccgagatcgtggtgtctaagcccgagcacaacaactccaacaacctggcgctctatggaaccggcggcggaggcagcactggaggaggcggcggcggtggcgggagcgggcacggcagcagcagtggcaccaagtccagcaaaaagaaaaaccagaacatcggctacaagctgggccaccggcgcgccctgttcgaaaagcgcaagcggctcagcgactacgcgctcatcttcggcatgttcggcatcgtggtcatggtcatcgagaccgagctgtcgtggggcgcctacgacaaggcgtcgctgtattccttagctctgaaatgccttatcagtctctccacgatcatcctgctcggtctgatcatcgtgtaccacgccagggaaatacagttgttcatggtggacaatggagcagatgactggagaatagccatgacttatgagcgtattttcttcatctgcttggaaatactggtgtgtgctattcatcccatacctgggaattatacattcacatggacggcccggcttgccttctcctatgccccatccacaaccaccgctgatgtggatattattttatctataccaatgttcttaagactctatctgattgccagagtcatgcttttacatagcaaacttttcactgatgcctcctctagaagcattggagcacttaataagataaacttcaatacacgttttgttatgaagactttaatgactatatgcccaggaactgtactcttggtttttagtatctcattatggataattgccgcatggactgtccgagcttgtgaaaggtaccatgatcaacaggatgttactagcaacttccttggagcgatgtggttgatatcaataacttttctctccattggttatggtgacatggtacctaacacatactgtggaaaaggagtctgcttacttactggaattatgggtgctggttgcacagccctggtggtagctgtagtggcaaggaagctagaacttaccaaagcagaaaaacacgtgcacaatttcatgatggatactcagctgactaaaagagtaaaaaatgcagctgccaatgtactcagggaaacatggctaatttacaaaaatacaaagctagtgaaaaagatagatcatgcaaaagtaagaaaacatcaacgaaaattcctgcaagctattcatcaattaagaagtgtaaaaatggaacagaggaaactgaatgaccaagcaaacactttggtggacttggcaaagacccagaacatcatgtatgatatgatttctgacttaaacgaaaggagtgaagacttcgagaagaggattgttaccctggaaacaaaactagagactttgattggtagcatccacgccctccctgggctcataagccagaccatcaggcagcagcagagagatttcattgaggctcagatggagagctacgacaagcacgtcacttacaatgctgagcggtcccggtcctcgtccaggaggcggcggtcctcttccacagcaccaccaacttcatcagagagtagctagaagagaataagttaaccacaaaataagactttttgccatcatatggtcaatattttagcttttattgtaaagcccctatggttctaatcagcgttatccgggttctgatgtcagaatcctgggaacctgaacactaagttttaggccaaaatgagtgaaaactctttttttttctttcagatgcacagggaatgcacctattattgctatatagattgttcctcctgtaatttcactaactttttattcatgcacttcaaacaaactttactactacattatatgatatataataaaaaaagttaatttctgca

SEQ ID NO: 23172 - DNA, 1473 bp, Homo sapiens
  source 1..1473: mol_type = unassigned DNA
cttcaacactgtggaagctttgttctttcgctcttttgcaataaatcttgctactgctcactctttgggtccacactgcctttatgagctgtaacactcaccgcgaaaggtctgcagcttcactcctgaagccagcgagcccacgagcccacagggaggaatgaacaactccagatgcaccgccttaagagctgtaacactcacggcgaaggtctgcagcttcactcctgagccagcgagaccaggaacccaccagaaggaagaaactccgaacacatccgaacatcagaaggaacaaactccagacggcgccaccttaagagctgtaacactcaccgccagggtccggggcttcgttcttgaagtcagtgagaccaagaacccaccaattccggacgcagtaccatgatcaacaggatgttactagcaacttccttggagcgatgtggttgatatcaataacttttctctccattggttatggtgacatggtacctaacacatactgtggaaaaggagtctgcttacttactggaattatgggtgctggttgcacagccctggtggtagctgtagtggcaaggaagctagaacttaccaaagcagaaaaacacgtgcacaatttcatgatggatactcagctgactaaaagagtaaaaaatgcagctgccaatgtactcagggaaacatggctaatttacaaaaatacaaagctagtgaaaaagatagatcatgcaaaagtaagaaaacatcaacgaaaattcctgcaagctattcatcaattaagaagtgtaaaaatggaacagaggaaactgaatgaccaagcaaacactttggtggacttggcaaagacccagaacatcatgtatgatatgatttctgacttaaacgaaaggagtgaagacttcgagaagaggattgttaccctggaaacaaaactagagactttgattggtagcatccacgccctccctgggctcataagccagaccatcaggcagcagcagagagatttcattgaggctcagatggagagctacgacaagcacgtcacttacaatgctgagcggtcccggtcctcgtccaggaggcggcggtcctcttccacagcaccaccaacttcatcagagagtagctagaagagaataagttaaccacaaaataagactttttgccatcatatggtcaatattttagcttttattgtaaagcccctatggttctaatcagcgttatccgggttctgatgtcagaatcctgggaacctgaacactaagttttaggccaaaatgagtgaaaactctttttttttctttcagatgcacagggaatgcacctattattgctatatagattgttcctcctgtaatttcactaactttttattcatgcacttcaaacaaactttactactacattatatgatatataataaaaaaagttaatttctgcacatactcgtttggtcacttg

SEQ ID NO: 23173 - DNA, 3171 bp, Homo sapiens
  source 1..3171: mol_type = unassigned DNA
agagcagctggaggccggcggtggctgagcagcccccacacctttgagcgagccgcctgcctctccaccggcaaggaagccctgggacctccggattcgggctgccggagggcctgagcgccagagcccaggacccggcggccgggggcgccatcccctcatgttctggagaaggcgcaaatgtgatgtcatgcccattgttttggtgcgcccaaccaatcggactcgccgcctggattctaccggagccggcatgggcccttcctcgcaccagcagcaggagtccccgctcccgaccataacgcattgcgcagggtgcaccaccgcttggtctccctgcagctttaacagccctgacatggaaaccccattgcagttccagcgcggcttcttcccagagcagccgccgccgccgccgcgctcctcacacctgcattgccagcagcagcaacagagccaggacaagccgtgcccgcccttcgcgcccctcccgcaccctcaccaccacccgcacctcgcgcaccagcagccggccagcggcggcagcagcccatgcctccggtgcaacagctgcgcctcctccggtgccccggcggcgggggcgggagataacctgtccctgctgctccgcacctcctcgcccggcggcgccttccggacccgcacctcctcgccgctgtcgggctcgtcctgctgctgctgctgctgctcgtcgcgccggggcagccagctcaatgtgagcgagctgacgccgtccagccatgccagtgcgctccggcagcagtacgcgcagcagtccgcgcagcagtcggcgtccgcctcccagtaccaccagtgccacagcctgcagcccgccgccagccccacgggcagcctcggcagtctgggctccgggcccccgctctcgcaccaccaccaccacccgcacccggcgcaccaccagcaccaccagccccaggcgcgccgcgagagcaaccccttcaccgaaatagccatgagcagctgcaggtacaacgggggcgtcatgcggccgctcagcaacttgagcgcgtcccgccggaacctgcacgagatggactcagaggcgcagcccctgcagccccccgcgtctgtcggaggaggtggcggcgcgtcctccccgtctgcagccgctgccgccgccgccgctgtttcgtcctcagcccccgagatcgtggtgtctaagcccgagcacaacaactccaacaacctggcgctctatggaaccggcggcggaggcagcactggaggaggcggcggcggtggcgggagcgggcacggcagcagcagtggcaccaagtccagcaaaaagaaaaaccagaacatcggctacaagctgggccaccggcgcgccctgttcgaaaagcgcaagcggctcagcgactacgcgctcatcttcggcatgttcggcatcgtggtcatggtcatcgagaccgagctgtcgtggggcgcctacgacaaggcgtcgctgtattccttagctctgaaatgccttatcagtctctccacgatcatcctgctcggtctgatcatcgtgtaccacgccagggaaatacagttgttcatggtggacaatggagcagatgactggagaatagccatgacttatgagcgtattttcttcatctgcttggaaatactggtgtgtgctattcatcccatacctgggaattatacattcacatggacggcccggcttgccttctcctatgccccatccacaaccaccgctgatgtggatattattttatctataccaatgttcttaagactctatctgattgccagagtcatgcttttacatagcaaacttttcactgatgcctcctctagaagcattggagcacttaataagataaacttcaatacacgttttgttatgaagactttaatgactatatgcccaggaactgtactcttggtttttagtatctcattatggataattgccgcatggactgtccgagcttgtgaaaggtaccatgatcaacaggatgttactagcaacttccttggagcgatgtggttgatatcaataacttttctctccattggttatggtgacatggtacctaacacatactgtggaaaaggagtctgcttacttactggaattatgggtgctggttgcacagccctggtggtagctgtagtggcaaggaagctagaacttaccaaagcagaaaaacacgtgcacaatttcatgatggatactcagctgactaaaagagtaagttactatccatatatcttcaaagagaatattattgtgattttttcagtgttaggaaatatggcataagattgccataggaagaagggaacctttctgataccagattctatcttttagattaagaagtgtaaaaatggaacagaggaaactgaatgaccaagcaaacactttggtggacttggcaaagacccagaacatcatgtatgatatgatttctgacttaaacgaaaggagtgaagacttcgagaagaggattgttaccctggaaacaaaactagagactttgattggtagcatccacgccctccctgggctcataagccagaccatcaggcagcagcagagagatttcattgaggctcagatggagagctacgacaagcacgtcacttacaatgctgagcggtcccggtcctcgtccaggaggcggcggtcctcttccacagcaccaccaacttcatcagagagtagctagaagagaataagttaaccacaaaataagactttttgccatcatatggtcaatattttagcttttattgtaaagcccctatggttctaatcagcgttatccgggttctgatgtcagaatcctgggaacctgaacactaagttttaggccaaaatgagtgaaaactctttttttttctttcagatgcacagggaatgcacctattattgctatatagattgttcctcctgtaatttcactaactttttattcatgcacttcaaacaaactttactactacattatatgatatataataaaaaaagttaatttctgcacatactcgtttggtcacttgacatttctaaagcttcacttctcatattattttcaaggtaaaatagcggattatcatctgatgcacactgataattttgatagccaaaagtttggctggttggaaaaa

SEQ ID NO: 23174 - DNA, 2962 bp, Homo sapiens
  source 1..2962: mol_type = unassigned DNA
ttgagccagcgaggagtgaagctgagcctggcctcacacgctcctagaggaccacctcctgagagagttctttcaccccctcttctttctccaagctcccctcctgctctccctccctgcccaatacaatgcattcttgagtggcagcgtctggactccaggcagccccagagaaccgaagcaagccaaagagaggactggagccaagatactggtgggggagattggatgcctggctttctttgaggacatctttggagcgagggtggctttggggtgggggcttgtgctgcagggaatacagccaggccccaagatggacacttctgggcacttccatgactcgggggtgggggacttggatgaagaccccaagtgcccctgtccatcctctggggatgagcagcagcagcagcagcagcagcaacagcagcagcagccaccaccgccagcgccaccagcagccccccagcagcccctgggaccctcgctgcagcctcagcctccgcagcttcagcagcagcagcagcagcagcagcagcagcagcagcagcagccaccgcatcccctgtctcagctcgcccaactccagagccagcccgtccaccctggcctgctgcactcctctcccaccgctttcagggcccccccttcgtccaactccaccgccatcctccacccttcctccaggcaaggcagccagctcaatctcaatgaccacttgcttggccactctccaagttccacagctacaagtgggcctggcggaggcagccggcaccgacaggccagccccctggtgcaccggcgggacagcaaccccttcacggagatcgccatgagctcctgcaagtatagcggtggggtcatgaagcccctcagccgcctcagcgcctcccggaggaacctcatcgaggccgagactgagggccaacccctccagcttttcagccctagcaaccccccggagatcgtcatctcctcccgggaggacaaccatgcccaccagaccctgctccatcaccctaatgccacccacaaccaccagcatgccggcaccaccgccagcagcaccaccttccccaaagccaacaagcggaaaaaccaaaacattggctataagctgggacacaggagggccctgtttgaaaagagaaagcgactgagtgactatgctctgatttttgggatgtttggaattgttgttatggtgatagagaccgagctctcttggggtttgtactcaaaggactccatgttttcgttggccctgaaatgccttatcagtctgtccaccatcatccttttgggcttgatcatcgcctaccacacacgtgaagtccagctcttcgtgatcgacaatggcgcggatgactggcggatagccatgacctacgagcgcatcctgtacatcagcctggagatgctggtgtgcgccatccaccccattcctggcgagtacaagttcttctggacggcacgcctggccttctcctacacaccctcccgggcggaggccgatgtggacatcatcctgtctatccccatgttcctgcgcctgtacctgatcgcccgagtcatgctgctgcacagcaagctcttcaccgatgcctcgtcccgcagcatcggggccctcaacaagatcaacttcaacacccgctttgtcatgaagacgctcatgaccatctgccctggcactgtgctgctcgtgttcagcatctctctgtggatcattgctgcctggaccgtccgtgtctgtgaaaggtaccatgaccagcaggacgtaactagtaactttctgggtgccatgtggctcatctccatcacattcctttccattggttatggggacatggtgccccacacatactgtgggaaaggtgtctgtctcctcactggcatcatgggtgcaggctgcactgcccttgtggtggccgtggtggcccgaaagctggaactcaccaaagcggagaagcacgttcataacttcatgatggacactcagctcaccaagcggatcaagaatgctgcagccaatgtccttcgggaaacatggttaatctataaacacacaaagctgctaaagaagattgaccatgccaaagtgaggaaacaccagaggaagttcctccaagctatccaccagttgaggagcgtcaagatggaacagaggaagctgagtgaccaagccaacactctggtggacctttccaagatgcagaatgtcatgtatgacttaatcacagaactcaatgaccggagcgaagacctggagaagcagattggcagcctggagtcgaagctggagcatctcaccgccagcttcaactccctgccgctgctcatcgccgacaccctgcgccagcagcagcagcagctcctgtctgccatcatcgaggcccggggtgtcagcgtggcagtgggcaccacccacaccccaatctccgatagccccattggggtcagctccacctccttcccgaccccgtacacaagttcaagcagttgctaaataaatctccccactccagaagcattacccataggtcttaagatgcaaatcaactctctcctggtcgctttgccatcaagaaacattcagaccagggaacggaaagaagagagaccgagctaattaactaactcatgttcattcagcgtgcttggtccgacatgccttgaaaccagaaatctaatctctgtttaggtgcctctacttgggagcgggaagaggagatgacaggaagcgacgcctctggcagggcccttgctgcagagttggtggagaacagaaatccacgctcaatctcaggtcttcacgcggggggtgggggtcagatgcactgaagtagccaacagcgaagccagtccagaagaggggtccgctgggagggagggttgtgtcaggcttgggggatgggctcttcgccatgggggtctttgaacacacctctctcctttc

SEQ ID NO: 23175 - DNA, 1658 bp, Homo sapiens
  source 1..1658: mol_type = unassigned DNA
gaggactcagaataaacctgctgctgcttcgtaaacatctcctgataaaaatggctacaggtgttacctgggcagagcagctgggcgccgccttggaatcagctgggggagcacctctccttgggacgggatgacagggcttcccaggcggtccccacaagcccgcgccccagctcagccccagttctcccctcccacctcaactcctccttgggataaataaagatgagtgtgtgtgtgagtgcgcgcccggatggagaacagcaggcactggctttagcggggagctggccccactgctccagcctctcagtccagccccaagacggaggagggggtttccctcccagagggagtggagatggaggaaggactccatgttttcgttggccctgaaatgccttatcagtctgtccaccatcatccttttgggcttgatcatcgcctaccacacacgtgaagtccagctcttcgtgatcgacaatggcgcggatgactggcggatagccatgacctacgagcgcatcctgtacatcagcctggagatgctggtgtgcgccatccaccccattcctggcgagtacaagttcttctggacggcacgcctggccttctcctacacaccctcccgggcggaggccgatgtggacatcatcctgtctatccccatgttcctgcgcctgtacctgatcgcccgagtcatgctgctgcacagcaagctcttcaccgatgcctcgtcccgcagcatcggggccctcaacaagatcaacttcaacacccgctttgtcatgaagacgctcatgaccatctgccctggcactgtgctgctcgtgttcagcatctctctgtggatcattgctgcctggaccgtccgtgtctgtgaaaggtaccatgaccagcaggacgtaactagtaactttctgggtgccatgtggctcatctccatcacattcctttccattggttatggggacatggtgccccacacatactgtgggaaaggtgtctgtctcctcactggcatcatgggtgcaggctgcactgcccttgtggtggccgtggtggcccgaaagctggaactcaccaaagcggagaagcacgttcataacttcatgatggacactcagctcaccaagcggatcaagaatgctgcagccaatgtccttcgggaaacatggttaatctataaacacacaaagctgctaaagaagattgaccatgccaaagtgaggaaacaccagaggaagttcctccaagctatccaccagttgaggagcgtcaagatggaacagaggaagctgagtgaccaagccaacactctggtggacctttccaagatgcagaatgtcatgtatgacttaatcacagaactcaatgaccggagcgaagacctggagaagcagattggcagcctggagtcgaagctggagcatctcaccgccagcttcaactccctgccgctgctcatcgccgacaccctgcgccagcagcagcagcagctcctgtctgccatcatcgaggcccggggtgtcagcgtggcagtgggcaccacccacaccccaatctccgatagccccattggggtcagctccacctccttcccgaccccgtacacaagttcaagcagttgctaaataaatctccccactccagaagca

SEQ ID NO: 23176 - DNA, 1962 bp, Homo sapiens
  source 1..1962: mol_type = unassigned DNA
caggaaagtcagcttaaaggacactccttgcagggactgagctggcacctactccttagagcttgctgataccaggcctgccacgcgacatctgcaaggacagttgtttggtgttttgcttcaggttatagatggagagacctataaaggactccatgttttcgttggccctgaaatgccttatcagtctgtccaccatcatccttttgggcttgatcatcgcctaccacacacgtgaagtccagctcttcgtgatcgacaatggcgcggatgactggcggatagccatgacctacgagcgcatcctgtacatcagcctggagatgctggtgtgcgccatccaccccattcctggcgagtacaagttcttctggacggcacgcctggccttctcctacacaccctcccgggcggaggccgatgtggacatcatcctgtctatccccatgttcctgcgcctgtacctgatcgcccgagtcatgctgctgcacagcaagctcttcaccgatgcctcgtcccgcagcatcggggccctcaacaagatcaacttcaacacccgctttgtcatgaagacgctcatgaccatctgccctggcactgtgctgctcgtgttcagcatctctctgtggatcattgctgcctggaccgtccgtgtctgtgaaaggtaccatgaccagcaggacgtaactagtaactttctgggtgccatgtggctcatctccatcacattcctttccattggttatggggacatggtgccccacacatactgtgggaaaggtgtctgtctcctcactggcatcatgggtgcaggctgcactgcccttgtggtggccgtggtggcccgaaagctggaactcaccaaagcggagaagcacgttcataacttcatgatggacactcagctcaccaagcggatcaagaatgctgcagccaatgtccttcgggaaacatggttaatctataaacacacaaagctgctaaagaagattgaccatgccaaagtgaggaaacaccagaggaagttcctccaagctatccaccagttgaggagcgtcaagatggaacagaggaagctgagtgaccaagccaacactctggtggacctttccaagatgcagaatgtcatgtatgacttaatcacagaactcaatgaccggagcgaagacctggagaagcagattggcagcctggagtcgaagctggagcatctcaccgccagcttcaactccctgccgctgctcatcgccgacaccctgcgccagcagcagcagcagctcctgtctgccatcatcgaggcccggggtgtcagcgtggcagtgggcaccacccacaccccaatctccgatagccccattggggtcagctccacctccttcccgaccccgtacacaagttcaagcagttgctaaataaatctccccactccagaagcattacccataggtcttaagatgcaaatcaactctctcctggtcgctttgccatcaagaaacattcagaccagggaacggaaagaagagagaccgagctaattaactaactcatgttcattcagcgtgcttggtccgacatgccttgaaaccagaaatctaatctctgtttaggtgcctctacttgggagcgggaagaggagatgacaggaagcgacgcctctggcagggcccttgctgcagagttggtggagaacagaaatccacgctcaatctcaggtcttcacgcggggggtgggggtcagatgcactgaagtagccaacagcgaagccagtccagaagaggggtccgctgggagggagggttgtgtcaggcttgggggatgggctcttcgccatgggggtctttgaacacacctctctcctttccttttgtctacggaagcctctgggtgacaaaagtaaaagagagctgcccacaacttgccaaaacagatatactcgaatcagactgaaaaaaaaaaaaaaa

SEQ ID NO: 23177 - DNA, 684 bp, Homo sapiens
  source 1..684: mol_type = unassigned DNA
cctcacacgctcctagaggaccacctcctgagagagttctttcaccccctcttctttctccaagctcccctcctgctctccctccctgcccaatacaatgcattcttgagtggcagcgtctggactccaggcagccccagagaaccgaagcaagccaaagagaggactggagccaagatactggtgggggagattggatgcctggctttctttgaggacatctttggagcgagggtggctttggggtgggggcttgtgctgcagggaatacagccaggccccaagatggacacttctgggcacttccatgactcgggggtgggggacttggatgaagaccccaagtgcccctgtccatcctctggggatgagcagcagcagcagcagcagcagcaacagcagcagcagccaccaccgccagcgccaccagcagccccccagcagcccctgggaccctcgctgcagcctcagcctccgcagcttcagcagcagcagcagcagcagcagcagcagcagcagcagcagccaccgcatcccctgtctcagctcgcccaactccagagccagcccgtccaccctggcctgctgcactcctctcccaccgctttcaggccccccttcgtccaactccaccgccatcctccacccttcctccaggcaaggcagccagctcaatctcaatga

SEQ ID NO: 23178 - DNA, 2240 bp, Homo sapiens
  source 1..2240: mol_type = unassigned DNA
gtccttcggtgtctgggtgtggtgagtagaggtgtgtgtcacaaagtacagaccattgtgtgtgacaaagcccatcgtgtgtctgtgtgtgtctttatccacgtggatggacgtctctttcttgctctgccccaagacacaccctagcccctccttattctcaaaagggggagctggggagcctccccctaccctggggcctcccctgcccctccccgccctgcctggccgtcaccactccccagagggcacagggctctgctgtgcctcagagcaaaagtcccagagccagcagagcaggctgacgacctgcaagccacagtggctgccctgtgcgtgctgcgaggtgggggaccctgggcaggaagctggctgagccccaagaccccgggggccatgggcggggatctggtgcttggcctgggggccttgagacgccgaaagcgcttgctggagcaggagaagtctctggccggctgggcactggtgctggcaggaactggcattggactcatggtgctgcatgcagagatgctgtggttcggggggtgctcgtgggcgctctacctgttcctggttaaatgcacgatcagcatttccaccttcttactcctctgcctcatcgtggcctttcatgccaaagaggtccagctgttcatgaccgacaacgggctgcgggactggcgcgtggcgctgaccgggcggcaggcggcgcagatcgtgctggagctggtggtgtgtgggctgcacccggcgcccgtgcggggcccgccgtgcgtgcaggatttaggggcgccgctgacctccccgcagccctggccgggattcctgggccaaggggaagcgctgctgtccctggccatgctgctgcgtctctacctggtgccccgcgccgtgctcctgcgcagcggcgtcctgctcaacgcttcctaccgcagcatcggcgctctcaatcaagtccgcttccgccactggttcgtggccaagctttacatgaacacgcaccctggccgcctgctgctcggcctcacgcttggcctctggctgaccaccgcctgggtgctgtccgtggccgagaggcaggctgttaatgccactgggcacctttcagacacactttggctgatccccatcacattcctgaccatcggctatggtgacgtggtgccgggcaccatgtggggcaagatcgtctgcctgtgcactggagtcatgggtgtctgctgcacagccctgctggtggccgtggtggcccggaagctggagtttaacaaggcagagaagcacgtgcacaacttcatgatggatatccagtataccaaagagatgaaggagtccgctgcccgagtgctacaagaagcctggatgttctacaaacatactcgcaggaaggagtctcatgctgcccgcaggcatcagcgcaagctgctggccgccatcaacgcgttccgccaggtgcggctgaaacaccggaagctccgggaacaagtgaactccatggtggacatctccaagatgcacatgatcctgtatgacctgcagcagaatctgagcagctcacaccgggccctggagaaacagattgacacgctggcggggaagctggatgccctgactgagctgcttagcactgccctggggccgaggcagcttccagaacccagccagcagtccaagtagctggacccacgaggaggaaccaggctactttccccagtactgaggtggtggacatcgtctctgccactcctgacccagccctgaacaaagcacctcaagtgcaaggaccaaagggggccctggcttggagtgggttggcttgctgatggctgctggaggggacgctggctaaagtgggtaggccttggcccacctgaggccccaggtgggaacatggtcacccccactctgcataccctcatcaaaaacactctcactatgctgctatggacgacctccagctctcagttacaagtgcaggcgactggaggcaggactcctgggtccctgggaaagagggtactaggggcccggatccaggattctgggaggcttcagttaccgctggccgagctgaagaactgggtatgaggctggggcggggctggaggtggcgccccctggtgggacaacaaagaggacaccatttttccagagctgcagagagcacctggtggggaggaagaagtgtaactcaccagcctctgctcttatctttgtaataaatgttaaagccagaa

SEQ ID NO: 23179 - DNA, 1736 bp, Homo sapiens
  source 1..1736: mol_type = unassigned DNA
agcagagcaggctgacgacctgcaagccacagtggctgccctgtgcgtgctgcgaggtgggggaccctgggcaggaagctggctgagccccaagaccccgggggccatgggcggggatctggtgcttggcctgggggccttgagacgccgaaagcgcttgctggagcaggagaagtctctggccggctgggcactggtgctggcaggaactggcattggactcatggtgctgcatgcagagatgctgtggttcggggggtgctcgtgggcgctctacctgttcctggttaaatgcacgatcagcatttccaccttcttactcctctgcctcatcgtggcctttcatgccaaagaggtccagctgttcatgaccgacaacgggctgcgggactggcgcgtggcgctgaccgggcggcaggcaacgcttcctaccgcagcatcggcgctctcaatcaagtccgcttccgccactggttcgtggccaagctttacatgaacacgcaccctggccgcctgctgctcggcctcacgcttggcctctggctgaccaccgcctgggtgctgtccgtggccgagaggcaggctgttaatgccactgggcacctttcagacacactttggctgatccccatcacattcctgaccatcggctatggtgacgtggtgccgggcaccatgtggggcaagatcgtctgcctgtgcactggagtcatgggtgtctgctgcacagccctgctggtggccgtggtggcccggaagctggagtttaacaaggcagagaagcacgtgcacaacttcatgatggatatccagtataccaaagagatgaaggagtccgctgcccgagtgctacaagaagcctggatgttctacaaacatactcgcaggaaggagtctcatgctgcccgcaggcatcagcgcaagctgctggccgccatcaacgcgttccgccaggtgcggctgaaacaccggaagctccgggaacaagtgaactccatggtggacatctccaagatgcacatgatcctgtatgacctgcagcagaatctgagcagctcacaccgggccctggagaaacagattgacacgctggcggggaagctggatgccctgactgagctgcttagcactgccctggggccgaggcagcttccagaacccagccagcagtccaagtagctgggacccacgaggaggaaccaggctactttccccagtactgaggtggtggacatcgtctctgccactcctgacccagccctgaacaaagcacctcaagtgcaaggaccaaagggggccctggcttggagtgggttggcttgctgatggctgctggaggggacgctggctaaagtgggtaggccttggcccacctgaggccccaggtgggaacatggtcacccccactctgcataccctcatcaaaaacactctcactatgctgctatggacgacctccagctctcagttacaagtgcaggcgactggaggcaggactcctgggtccctgggaaagagggtactaggggcccggatccaggattctgggaggcttcagttaccgctggccgagctgaagaactgggtatgaggctggggcggggctggaggtggcgccccctggtgggacaacaaagaggacaccatttttccagagctgcagagagcacctggtggggaggaagaagtgtaactcaccagcctctgctcttatctttgtaataaatgttaaagcc

SEQ ID NO: 23180 - DNA, 4074 bp, Homo sapiens
  source 1..4074: mol_type = unassigned DNA
acctagcatatccaaactcttgcatcaaaggtgcagggacttgctcacatcgagaatctggttgctttcttggagaccaagaaaatgagtttttgtttctacatttactccagcaatccatgagatcagggtgttgacagaaagtatgttcaaacatcttcggaaatgggtcgtcactcgcttttttgggcattctcggcaaagagcaaggctagtctccaaagatggaaggtgcaacatagaatttggcaatgtggaggcacagtcaaggtttatattctttgtggacatctggacaacggtacttgacctcaagtggagatacaaaatgaccattttcatcacagccttcttggggagttggtttttctttggtctcctgtggtatgcagtagcgtacattcacaaagacctcccggaattccatccttctgccaatcacactccctgtgtggagaatattaatggcttgacctcagcttttctgttttctctggagactcaagtgaccattggatatggattcaggtgtgtgacagaacagtgtgccactgccatttttctgcttatctttcagtctatacttggagttataatcaattctttcatgtgtggggccatcttagccaagatctccaggcccaaaaaacgtgccaagaccattacgttcagcaagaacgcagtgatcagcaaacggggagggaagctttgcctcctaatccgagtggctaatctcaggaagagccttcttattggcagtcacatttatggaaagcttctgaagaccacagtcactcctgaaggagagaccattattttggaccagatcaatatcaactttgtagttgacgctgggaatgaaaatttattcttcatctccccattgacaatttaccatgtcattgatcacaacagccctttcttccacatggcagcggagacccttctccagcaggactttgaattagtggtgtttttagatggcacagtggagtccaccagtgctacctgccaagtccggacatcctatgtcccagaggaggtgctttggggctaccgttttgctcccatagtatccaagacaaaggaagggaaataccgagtggatttccataactttagcaagacagtggaagtggagacccctcactgtgccatgtgcctttataatgagaaagatgttagagccaggatgaagagaggctatgacaaccccaacttcatcttgtcagaagtcaatgaaacagatgacaccaaaatgtaacagtggcttttcaacgggagtaaagcaaagtctctaaagctcctagtacctagaagcattatgaagcagtcaacaatttaggggtacgaaagtaggatgagagccttcaaagtctaccagcacaaagacccctgagccccgcaattgtgatcccacaagacatgcatctccacaaggctactgtattagaacgtgcaatgcatttatatgaaactggtgtatggaagacataggtgctctcttgaaatcttaaatatgattatttgagctcatataaggtggattggagcagataaaattatcaaaagtttcatgaacaggccaaacaaaatattttttaaagtttccttaaagaagttatgaactttagaaaggatcaggggacaataataatctcattttgattctactgataagaatgactccacttttaatgtggacttttactcatggaaaaattgtctcctaatttggggagatgaaccaaccaatcaatgacaagaaaacgcttacacaaagaacaatttgaggctctaagcttctcatgtggtacgtttagacagaggctaaatctgcacactagaatcttgatgataccttcctgcaagacagaatgctttagttaaaagtggtgatgatatttctttcaatctgtattggatggcttaaagggctataaatctgtttataaagagcatttcctgctcttcgaagacagcaatgaggagttggaaggtgcaaagtcagtagagaagggaatgtatcattaatgcacctgagaagaaacagtttcatgtgttcctccacctagagtttgtactggaatgctatttctaaagaagaagtgggaaagagagaggaatgggatggagccccacagtcagaatgttactatgtctttctttccctgacagcccatcttcctaaaagggaccagcttatggaaggctcgaccttgaggggaaagttttactgtgaaagtcttcttcagatccccacctgcatcattccgaatgtgtcctggaaaaaaactggtactcaaagctgcttaggaatcaaaatgttttcagtgtgttgattaatatagtaaatttctgaaactgtgcatgcactttgattattattattactatgcattaactgagtcaggttccaggtgaaaatcctcttgcagagaggaccctctcctggaaggggcgggaggagtggagaggaagcagataggacacatttgttgtctggagtcctcaggaggaaatgaccctggccacagacacaccccttccggtacagctccatcacgcctctccagtgtgagtcttggcacataaaacggcagctgcccacagttgttgggagggatggcttatgtttttccatgcctgggctgtatttgtacagatccatgcaccactctggtccttctgactaagaacagtgggaagtctgatggttttagggttgcacaccttgtcagtggccataacagtggccatagctggcccatgtggaactctcactctgtacctgtgagtgctttggcaccacaatttaatgtgctgacaggaaaaagaaatcaggtatcacaagcttgagggagctggaattctctgctggcccactgtcatgatgtagccccttcataaactggagggaaactgtgttgacacttgttcccatcagcatgcactcttcctggtgtattctcctgctggctggcagcatgcatgtagatggctggaagtgagatggtcataagcaatccattccctttgattgtttagggaggtgaacaacatacatctttctgattggtatttacttctgggttatttggtggaggcccatctgcttctaaatatccctttgctaggatcaagacactctgcacctggagtctcttttttaatggaaattcccattgaccctctagcaaccattaacacaggtacatccaattaagcccctaggaaaagaggcctggaacaggtaacttttgataggtctaaggagtggctggaaccccaaagcgcataacactcctgtgcattttaagaaagggggtaacaagggaatgggtgctcaagtagtaaagagaaatgaaaaatagcctgagaaggccaaactgcttgtaggttaacaccactgctaaaggcagcctttttattacaatgcagtgacatttttcccggtggaatctgactacatcagtactgctatttgctacagatgctgggttattctatttgctgatttcaaaagcatgtcaactgttctaatttccttcgtgaaaaactgcatcccatgatgcattattatattcaaaattttccttgagactgattctctttgaattgcccagttcatctctgttgctatggggattttgactaagagcgtttgatcctggttgaatcttcctggacttaggttggctcaagctccaatatttaagagttaagatttgggaggttgtctttaatggaaagcactaaatgtttaaaaattatttattccttaagagagaaaaggtagaagggaaagatccttttgtgttgccatgcctttttaagacatgggctgataggtgactgtccttctctatccatcactaaggggatgtgcaactggaccttccagaagaactccctgggcggattgcagagacggttgaggaagtgtcttccttggggatttttcatgaaacagaatatgggtcctcaacaggatgcttctgtgaatagcacggggatctttccctgtctagaacaaacgttaggacagcttctgatggaaagaatgcaaatgaa

SEQ ID NO: 23181 - DNA, 2539 bp, Homo sapiens
  source 1..2539: mol_type = unassigned DNA
gcatacagatgagttggcagccggtctgagctggcccacagactcataaaatcaacagggcctcgggtaccctcacctagcatatccaaactcttgcatcaaaggtgcagggacttgctcacatcgagaatctggttgctttcttggagaccaagaaaatgagtttttgtttctacatttactccagcaatccatgaggactttataggaattttgcaccattctgaatggatacatttggatttctcaacatttgttcagcttcctaatgactgttgtgacaattgctctataccagtgaatgccaactgtttatctctgctctgaacagatcagggtgttgacagaaagtatgttcaaacatcttcggaaatgggtcgtcactcgcttttttgggcattctcggcaaagagcaaggctagtctccaaagatggaaggtgcaacatagaatttggcaatgtggaggcacagtcaaggtttatattctttgtggacatctggacaacggtacttgacctcaagtggagatacaaaatgaccattttcatcacagccttcttggggagttggtttttctttggtctcctgtggtatgcagtagcgtacattcacaaagacctcccggaattccatccttctgccaatcacactccctgtgtggagaatattaatggcttgacctcagcttttctgttttctctggagactcaagtgaccattggatatggattcaggtgtgtgacagaacagtgtgccactgccatttttctgcttatctttcagtctatacttggagttataatcaattctttcatgtgtggggccatcttagccaagatctccaggcccaaaaaacgtgccaagaccattacgttcagcaagaacgcagtgatcagcaaacggggagggaagctttgcctcctaatccgagtggctaatctcaggaagagccttcttattggcagtcacatttatggaaagcttctgaagaccacagtcactcctgaaggagagaccattattttggaccagatcaatatcaactttgtagttgacgctgggaatgaaaatttattcttcatctccccattgacaatttaccatgtcattgatcacaacagccctttcttccacatggcagcggagacccttctccagcaggactttgaattagtggtgtttttagatggcacagtggagtccaccagtgctacctgccaagtccggacatcctatgtcccagaggaggtgctttggggctaccgttttgctcccatagtatccaagacaaaggaagggaaataccgagtggatttccataactttagcaagacagtggaagtggagacccctcactgtgccatgtgcctttataatgagaaagatgttagagccaggatgaagagaggctatgacaaccccaacttcatcttgtcagaagtcaatgaaacagatgacaccaaaatgtaacagtggcttttcaacgggagtaaagcaaagtctctaaagctcctagtacctagaagcattatgaagcagtcaacaatttaggggtacgaaagtaggatgagagccttcaaagtctaccagcacaaagacccctgagccccgcaattgtgatcccacaagacatgcatctccacaaggctactgtattagaacgtgcaatgcatttatatgaaactggtgtatggaagacataggtgctctcttgaaatcttaaatatgattatttgagctcatataaggtggattggagcagataaaattatcaaaagtttcatgaacaggccaaacaaaatattttttaaagtttccttaaagaagttatgaactttagaaaggatcaggggacaataataatctcattttgattctactgataagaatgactccacttttaatgtggacttttactcatggaaaaattgtctcctaatttggggagatgaaccaaccaatcaatgacaagaaaacgcttacacaaagaacaatttgaggctctaagcttctcatgtggtacgtttagacagaggctaaatctgcacactagaatcttgatgataccttcctgcaagacagaatgctttagttaaaagtggtgatgatatttctttcaatctgtattggatggcttaaagggctataaatctgtttataaagagcatttcctgctcttcgaagacagcaatgaggagttggaaggtgcaaagtcagtagagaagggaatgtatcattaatgcacctgagaagaaacagtttcatgtgttcctccacctagagtttgtactggaatgctatttctaaagaagaagtgggaaagagagaggaatgggatggagccccacagtcagaatgttactatgtctttctttccctgacagcccatcttcctaaaagggaccagcttatggaaggctcgaccttgaggggaaagttttactgtgaaagtcttcttcagatccccacctgcatcattccgaatgtgtcctggaaaaaaactggtactcaaagctgcttaggaatcaaaatgttttc

SEQ ID NO: 23182 - DNA, 2146 bp, Homo sapiens
  source 1..2146: mol_type = unassigned DNA
gtgcgcccccctcccgccgtcctagacccctgcctagcccaggtcggtctccgcggacccacggacggacagacagacgggaggacggccagccgcgagcgcccgggcggcgggagggggcggggaggcgacggccgtggcgtgaggagcaggagcagctggctgctcttcgccatggcctggtggctcatcgccttcgcccacggtgacctggcccccagcgagggcactgctgagccctgtgtcaccagcatccactccttctcgtctgccttccttttctccattgaggtccaagtgactattggctttggggggcgcatggtgactgaggagtgcccactggccatcctgatcctcatcgtgcagaacatcgtggggctcatgatcaacgccatcatgcttggctgcatcttcatgaagactgcccaagcccaccgcagggctgagaccctcatcttcagcaagcatgcggtgatcgccctgcgccacggccgcctctgcttcatgctacgtgtgggtgacctccgcaagagcatgatcatcagcgccaccatccacatgcaggtggtacgcaagaccaccagccccgagggcgaggtggtgcccctccaccaggtggacatccccatggagaacggcgtgggtggcaacagcatcttcctggtggccccgctgatcatctaccatgtcattgatgccaacagcccactctacgacctggcacccagcgacctgcaccaccaccaggacctcgagatcatcgtcatcctggaaggcgtggtggaaaccacgggcatcaccacccaggcccgcacctcctacctggccgatgagatcctgtggggccagcgctttgtgcccattgtagctgaggaggacggacgttactctgtggactactccaagtttggcaacaccgtcaaagtgcccacaccactctgcacggcccgccagcttgatgaggaccacagcctactggaagctctgaccctcgcctcagcccgcgggcccctgcgcaagcgcagcgtgcccatggccaaggccaagcccaagttcagcatctctccagattccctgtcctgagccatggtctctcgggccccccacacgcgtgtgtacacacggaccatgtggtatgtagcccggccagggcctggtgtgaggctgggccagcctcagctcagcctccccctgctgctcatccagggtgttacaaggcacttgtcactatgctatttctggcctcagcaggaacctgtactgggttatttttgtccctgctcctcccaacccaattcaggactggctcacccctctcccccgcccaaggctgcagaggctgtgggaggtactgggccctagagctgtgcgtccagccagtcctgggtccccacgattgaccagccacactctgggccggtggctggggaagaacaatccccgagggctgctgctttgcgtctgtggctccaagaagtgcctgtggtcaggccccagctctacttggtccctgaaaaagcacctggctaagggctgggcctggccagcagggagggcagttgatgagagagggtgttcccgctggagggttggtgctgtggagcctacaccggcagggacagcctggggctgacagggctcccctccgagggccagtttcaggtctggaaggggaggaagcaggggaaggtgacctgaggaggctcggctttgtagagccccgctcaggcacagggaggaggagatgccagggctcctgccttttgccacatcggcctcgtgcagtgagggctctgtgggctggggctgctgcccctgcctacctcctgcctgtccccagaggctgaggagagggggtactgtgcccaccacacatgattaggcctcagacccaactctggtcctggctccacaacagtggctgccactcactttgtccagaaggtggcttgggggtggatatctttgggttgctggaaaaggtgtgggaaggttcaggatggtgggagggactgaggtccctgaggtgaagaggcccttggtcctgacgggtttgacccgtgcctggacccttggagcagtgttgtgtgaacttgcctagaactctgccttctccgttgtcaataaagcctccccctcatga

SEQ ID NO: 23183 - DNA, 5420 bp, Homo sapiens
  source 1..5420: mol_type = unassigned DNA
cgcgcgcgtcccagtgcgcaagtggctggcggtgtgtgtgtagggggcggcccgggactaggaggggctcggggccaggccggagccgtggtaggctggtgcagcggctgcgcggcgcggcgcggcgcggggcgggcgtgctctccgcggagagttagaggagttgccgagctgagctccggtggagcgaggcgcggagctgggtgcgcgccgagcctctgcctcccgccgcctcctcgccctccattcctcgctccccgtcttctcccggccacaccgccactgctgccgcctccctgggaacagtagccgggggagggggactggcgcggtcagagcctgcgaggaggtgcggggcgccggggcgtaggggagcgcgccgggccctgcccgagatcagataacagccggcgggggagggggtgggccggccgtgctcacagccggaccgagggaccgacgccagccgccccggcccaagcgagcgcccagcggccgggggcgccgtccaggcgcgcgcccccgacccgtggctggaccagggcgatccgctttgcagagaagacgcgcccctcggcatggagcgcccccgggagctgccctgaggcggtggcggcagcggcggcgatgcagccagcgcggcagctgccggggccaggaacggccgcccggagcttggaggacgccgagcgcgccgcgcccgggccactgaccgaggatgttctagtgactggatcctttccagttggtgcctgggaaatggcagccactactaattcagccttgaagacagtaccgtgcccactcagcaccattacatagaagatagaactcaagaggagccgccctgcctggagctagcctgggggcgagccagggtcccccaacccccgggatgaccgcggccagccgggccaacccctacagcatcgtgtcatcggaggaggacgggctgcacctggtcaccatgtcgggcgccaacggcttcggcaacggcaaggtgcacacgcggcgcaggtgccgcaaccgcttcgtcaagaagaatggccagtgcaacattgagttcgccaacatggacgagaagtcacagcgctacctggctgacatgttcaccacctgtgtggacatccgctggcggtacatgctgctcatcttctcgctggccttccttgcctcctggctgctgttcggcatcatcttctgggtcatcgcggtggcacacggtgacctggagccggctgagggccggggccgcacaccctgtgtgatgcaggtgcacggcttcatggcggccttcctcttctccatcgagacgcagaccaccatcggctacgggctgcgctgtgtgacggaggagtgcccggtggccgtcttcatggtggtggcccagtccatcgtgggctgcatcatcgactccttcatgattggtgccatcatggccaagatggcaaggcccaagaagcgggcacagacgctgctgttcagccacaacgccgtggtggccctgcgtgacggcaagctctgcctcatgtggcgtgtgggtaacctgcgcaagagccacattgtggaggcccatgtgcgcgcgcagctcatcaagccgcgggtcaccgaggagggcgagtacatcccgctggaccagatcgacatcgatgtgggcttcgacaagggcctggaccgcatctttctggtgtcgcccatcaccatcttgcatgagattgacgaggccagcccgctcttcggcatcagccggcaggacctggagacggacgactttgagatcgtggtcatcctggaaggcatggtggaggccacagccatgaccacccaggcccgcagctcctacctggccaatgagatcctgtggggtcaccgctttgagcccgtgctcttcgaggagaagaaccagtacaagattgactactcgcacttccacaagacctatgaggtgccctctacgccccgctgcagtgcgaaggatctggtagagaacaagttcctgctgcccagcgccaactccttctgctacgagaacgagctggccttcctgagccgtgacgaggaggatgaggcggacggagaccaggacggccgaagccgggacggcctcagcccccaggccaggcatgactttgacagactccaggctggcggcggggtcctggagcagcggccctacagacgggagtcagagatctgagccaaccttggccgacatgcagcatccacccccggctggggagaggccccgcggtcgctcaggggccccgggtttgagcagaacgggcccagtgccctgggttgcagactcagtagcgttttagtcgttttatgtttctttgcaacggcctcagaagtttggccggagagggggcagccagagcggcagcccccggcctcagaggctatcacaggctcagggcaaagaagtggcctcctggggggccaggccacgagggccagggcttctgcctgaagatggagctgcagcctgcggggaagcagctcagctcgatggtgggcccagcctctgctgtccaaggctggctagctgcggtgctccttgctggtttttaacttggggagaaacaccgggtttcagctttcttgaccttagcttgggtgagactgtttacaaaaaaaaaaaattaccatgcaattgaaaaaatttttttttaattcacagggggcaaaaagaacaattagaattccatgggtctgccaggatgcagcagctggctgaaggctccagagggttccccgaggtgggactggcctctccccgtgtgtgtgggcaccacagtccctgggcaagcagggtgctctgggaccgcacttcatcgagctcacgagccagctaggctctgtttgtgatagaaaaatcaagaccatgttaatgatcgtaataaaagctttctactgtcgttggggtggtgggtggggctgggaagaaactggtttgagcttttagagtttgcctttgtaccttagagatgtgtctcagggccaggcatgggacctgccatcgagggttcctccccgcaccctcgattttcctgttttgcttctctctccatttctgtccaggcctccgcccaattccacagtgaggggtggttaggagctataggccgggatggctccttgggaagggaagtcgggatcccaggctaggaggaagctggcagccccgtccccactgggcccacagtgtgagtcgtgccttagagactccgggttgtcctgttctttctgggcttgctcatctccccccaaccctgtcccaccccacccctcccatacctccactgctgaagttcctccagcccctctgtctgccttgtgaaggtggcaggggccaggtctgcctgacataggaccacatcctgtccctccctcacctggagcagcacagcagagttcaggcagggcacagccaggccctggtcagcgctgaatggcagaggaaagatcttaggaaaggagaggaatcgccaccccctcctgccaactgggatgactggggagggccacgctcattcaaagctgaatcagaaaccagccgtggaacagaattcctgccgagtcttccagggccgctcctccaccaccctcccccaggttgaggcactatggcaccctcatcaggaagaggtttggggtccccttgttgtcactgctggctctgccaccccatcttgttcatggcagctggttgggtcaggtccatggtagagccaggcccttcccagggctgcggagaaaacctgctctcttctagtcgggcttctccagaagccagtaatcagaaaggatgtgtctcctgctccaactctgcccccgagacagctcagagccagaaggcaccccgagacagctcagagccagaaggcaccccgagacagctcagagccagaaggcaccgaggactctggcccaagtggggaagctgaggcagagagcagagggggtcatgcagtgagtgggtggggtgcaggagacagagaggggctgggggcgtggggtgggggtgtctgcctcttccctccacctcctcccctccttagcagctgaagactcagccctgaggtctggggcaatggaagtcaagacacccgacccctacatcctggggtaggcccgactcagcatcctgtcccagcttcagccccacactcatttctggcatagaagattccgccgaggcagctctttcctctcggggtctgccaggggtgcctcagctggttcctgctcccaggcctagccccgaagccttaggggccttctcagccttagccctgggtactggggtgaagttggcaggggagagcttgacacttcgcctccctgatggccatgctgagggacagtggtgaccctggtcacttggtgctggtgtaggggcctgtgcccttccagggccagtgagacagccttctactcccccgacccagagctgagtccgaggaccccaggcccacctcctggccctcttggaggtctgtgctcttacctcccagcccccaccctgcgggagagcagccccagcgcctcatctccccaaaggcggcagatgcttgattctcctgccctctttcttccttccctcgtatttatttatttatttattgcttgtgctaaagaccaaaatagtctccctctttagtgcacttgaagcgggagggcggatgggatgagccaggagcgaggaagacttggcccctggggagtgtgtgtgtggaggcgtgtgcctgtgtgagcctgcatgcatacatgtgtggtgcacacatgcacactcggctcttcatgtgtatgactgggttagtaatacagatacgtgatctatacgtgtgtgtgtgtgtgtgtgtgtgtgtgtgtgtgtatgcaggcggttatgtgtctgtctacccccaggtgtttccgtgtacaagtttcctgtgagggagggcacccacccatcaggttgggcactggcacaggtgaaccccacagtccccgaccctctgccctgattatgcacgtctgctcctgagtggagcttgtgttccaggatgagacatctggaggtgagcgtgtgcgtccggctcgtgtgtaggaggctgtgtgtgtgcccatgtgaaaccgtgtacttgagtgtgtgtctgtgtgcagcctatgcctgctgctcagagcacggtggccaccccctgagcctctgctggtgctgtgctgcgtggtccccacccagagggtcctggggggcggggaggagccaccgttgggaggcccctgtacggggtgtctgccctgcgtgagggcatagaatgtcaaattattttaaatggtgaaactggagagttttcatgttattttcaatacatagcagtatctaaagacgtaggcgatgagactagaccacattaaatgcattttgatctctt

SEQ ID NO: 23184 - DNA, 3684 bp, Homo sapiens
  source 1..3684: mol_type = unassigned DNA
gagcattctctaccattgcccagctgaaagcacctagctcatagattctctgtggggagagtgaataaaggttctaactgaaaacccaaaccaagaaatagcaacaagtctagaattcttactactacaaaactcacctggatccctaagggcacagcaaagaatgagctattacggcagcagctatcatattatcaatgcggacgcaaaatacccaggctacccgccagagcacattatagctgagaagagaagagcaagaagacgattacttcacaaagatggcagctgtaatgtctacttcaagcacatttttggagaatggggaagctatgtggttgacatcttcaccactcttgtggacaccaagtggcgccatatgtttgtgatattttctttatcttatattctctcgtggttgatatttggctctgtcttttggctcatagcctttcatcatggcgatctattaaatgatccagacatcacaccttgtgttgacaacgtccattctttcacaggggcctttttgttctccctagagacccaaaccaccataggatatggttatcgctgtgttactgaagaatgttctgtggccgtgctcatggtgatcctccagtccatcttaagttgcatcataaatacctttatcattggagctgccttggccaaaatggcaactgctcgaaagagagcccaaaccattcgtttcagctactttgcacttataggtatgagagatgggaagctttgcctcatgtggcgcattggtgattttcggccaaaccacgtggtagaaggaacagttagagcccaacttctccgctatacagaagacagtgaagggaggatgacgatggcatttaaagacctcaaattagtcaacgaccaaatcatcctggtcaccccggtaactattgtccatgaaattgaccatgagagccctctgtatgcccttgaccgcaaagcagtagccaaagataactttgagattttggtgacatttatctatactggtgattccactggaacatctcaccaatctagaagctcctatgttccccgagaaattctctggggccataggtttaatgatgtcttggaagttaagaggaagtattacaaagtgaactgcttacagtttgaaggaagtgtggaagtatatgcccccttttgcagtgccaagcaattggactggaaagaccagcagctccacatagaaaaagcaccaccagttcgagaatcctgcacgtcggacaccaaggcgagacgaaggtcatttagtgcagttgccattgtcagcagctgtgaaaaccctgaggagaccaccacttccgccacacatgaatatagggaaacaccttatcagaaagctctcctgactttaaacagaatctctgtagaatcccaaatgtagtcctaaattgcaattatgagggctaccactgaatcattttatctttcagccaatcaagtcgttgtaaacgtggcttttttgaaagtgttatggctatgttttatgatgatgctgggtaagtagagtaagttaaacttggtaaaagataatctaaaaattccatagttctcagttattaaaatttttcttgttcgccaattttgtattaagaatgctattaagcctaattgattaaaatttatcttttttattatcttacatgcttgtatcttcagttggaggtgtagtattcaaaaacggggaatgaaggcaggaaggaggctggaataaataaaaataaaaatagacaagtaagacagcataaataatacatttttaaacatgtcaacattgataatacaatgaagatttaccataaaaagtatcatatctaaccaagatatgcaaaagatgcattcagtaagctgtaacgttgagaaatgtaactgtgaaatcagctcaccagttcaagtcactaggtttgccacttggaccgtcttggtttcagcgagcatagcgagtggctgtaagaaattgtccatgccaccaattccactgctacttgcccaggtagtgatcagtgagagttagaagcaattttttctctaaccgatgaggcagaagaaaagttaacagtatttaaagcagcatttctctcttaacgttcctgggagactccaacaaatggagaccagaaacaaggcaaccacgaccttgctaggttctctgaggaggggactttctatgttcacgtcccaccttcttcgaggacatgaccaagggacaggatcatacagatgaggtgaggggatggttagcagcgataaacattctcagacccttggagagaaaccgttgctagcttgctggtcccgaaagattgcaactttggctgctacagaaaggatagaacctttttggggggagggtggggagggagatatttatttgtgcccagaagcagttatgtatgcttcttgtcttggttactgtacaagatacaaatgactcgagttgtggattgcaagaaactcttttattaaacttggaacaaccatttaaatgaaggattttgtgagatagaattcaattaaagcgatttgaatgcacagtaagtggataatctgagtacaatgaaatttcttaagttttagaacatgagataaagttgtatactctactttcatgttaaaatgttaatcatgattactttaagcccacatccactgagtaaagagtcactttaaactttataaatcaaagagatattaggaacattcagaattatttgtgttttgtttttgttttacattgttgctgcactggcaataagtatgtggcactgtttttatttgtttatgttatttaaatacacacccagacacacacacacacagtttttgctttttctggaaaatctttctttctcttctctctccatgaaaattaaaacacacaagtgaatgaagtaattacatagtccaagattagaaatacaagtaaaatatataggtataggtagatagagtgcctttctgtttcttttcttttcttttttctttttttgttcttccttcctttcttccctcctccccctcatccttccctttctccttcttttcccttttttttttttttttgacctgggagtaataaagttactttttaaatgcacgtatgcaatcttttattcctcttgttttatggataagagatttgttcaggtcaaaagttgcaaaactgttctgaagcttaatattagagacccaagtaagattgtttttagtcttgcttgaggaatgcacactccatttaaaaaattgtgcgctctgtagatttggattttacagcagcaattacttggctaaattagagtactgcaatcttgtaagtagaaaacagccaccatgacaataaacaaaaacacttaaaaatatttttagcttgttttacctacatctagtttcatttcatcttgctttgctttgttgactctgctaccgctgatgtttgccttgtcaatatcagaataggggcatcagtgtcccgtgaaatacattttgttgtgctatgagcctctgtaatcaaatgcttgtactcagaagagagtgtaaaatcagcatttctatgtaacatatatctctaattatctgtgtaattttataacatactttgacaaccccagtgagttacttaataataaagatcttaaaataatgcaaaaa

SEQ ID NO: 23185 - DNA, 2614 bp, Homo sapiens
  source 1..2614: mol_type = unassigned DNA
gttgcatacagatgagttggcagccggtctgagctggcccacagactcataaaatcaacagggcctcgggtaccctcacctagcatatccaaactcttgcatcaaaggtgcagggacttgctcacatcgagaatctggttgctttcttggagaccaagaaaatgagtttttgtttctacatttactccagcaatccatgaggactttataggaattttgcaccattctgaatggatacatttggatttctcaacatttgttcagcttcctaatgactgttgtgacaattgctctataccagtgaatgccaactgtttatctctgctctgaacaggtttcttctctactgtgccttcatccccatcctgggccctgacaaagacagtgtgacaagttctgagccccacaggtggaatcccaaaccaagcagctcttgctggtcaccccaagatctacttatacatgaagttttgaaaatcatctcctgaacctcttctgacagagatcagggtgttgacagaaagtatgttcaaacatcttcggaaatgggtcgtcactcgcttttttgggcattctcggcaaagagcaaggctagtctccaaagatggaaggtgcaacatagaatttggcaatgtggaggcacagtcaaggtttatattctttgtggacatctggacaacggtacttgacctcaagtggagatacaaaatgaccattttcatcacagccttcttggggagttggtttttctttggtctcctgtggtatgcagtagcgtacattcacaaagacctcccggaattccatccttctgccaatcacactccctgtgtggagaatattaatggcttgacctcagcttttctgttttctctggagactcaagtgaccattggatatggattcaggtgtgtgacagaacagtgtgccactgccatttttctgcttatctttcagtctatacttggagttataatcaattctttcatgtgtggggccatcttagccaagatctccaggcccaaaaaacgtgccaagaccattacgttcagcaagaacgcagtgatcagcaaacggggagggaagctttgcctcctaatccgagtggctaatctcaggaagagccttcttattggcagtcacatttatggaaagcttctgaagaccacagtcactcctgaaggagagaccattattttggaccagatcaatatcaactttgtagttgacgctgggaatgaaaatttattcttcatctccccattgacaatttaccatgtcattgatcacaacagccctttcttccacatggcagcggagacccttctccagcaggactttgaattagtggtgtttttagatggcacagtggagtccaccagtgctacctgccaagtccggacatcctatgtcccagaggaggtgctttggggctaccgttttgctcccatagtatccaagacaaaggaagggaaataccgagtggatttccataactttagcaagacagtggaagtggagacccctcactgtgccatgtgcctttataatgagaaagatgttagagccaggatgaagagaggctatgacaaccccaacttcatcttgtcagaagtcaatgaaacagatgacaccaaaatgtaacagtggcttttcaacgggagtaaagcaaagtctctaaagctcctagtacctagaagcattatgaagcagtcaacaatttaggggtacgaaagtaggatgagagccttcaaagtctaccagcacaaagacccctgagccccgcaattgtgatcccacaagacatgcatctccacaaggctactgtattagaacgtgcaatgcatttatatgaaactggtgtatggaagacataggtgctctcttgaaatcttaaatatgattatttgagctcatataaggtggattggagcagataaaattatcaaaagtttcatgaacaggccaaacaaaatattttttaaagtttccttaaagaagttatgaactttagaaaggatcaggggacaataataatctcattttgattctactgataagaatgactccacttttaatgtggacttttactcatggaaaaattgtctcctaatttggggagatgaaccaaccaatcaatgacaagaaaacgcttacacaaagaacaatttgaggctctaagcttctcatgtggtacgtttagacagaggctaaatctgcacactagaatcttgatgataccttcctgcaagacagaatgctttagttaaaagtggtgatgatatttctttcaatctgtattggatggcttaaagggctataaatctgtttataaagagcatttcctgctcttcgaagacagcaatgaggagttggaaggtgcaaagtcagtagagaagggaatgtatcattaatgcacctgagaagaaacagtttcatgtgttcctccacctagagtttgtactggaatgctatttctaaagaagaagtgggaaagagagaggaatgggatggagccccacagtcagaatgttactatgtctttctttccctgacagcccatcttcctaaaagggaccagcttatggaaggctcgaccttgaggggaaagttt

SEQ ID NO: 23186 - DNA, 1674 bp, Homo sapiens
  source 1..1674: mol_type = unassigned DNA
acacaaattagcgtcagtccactgactgtcgcctacaataaattaggctgagtctaaaagaaatcagtctgcatagaaagaccaacaaccagcaccacttccttgctttttccagccatgaatgcttccagtcggaatgtgtttgacacgttgatcagggtgttgacagaaagtatgttcaaacatcttcggaaatgggtcgtcactcgcttttttgggcattctcggcaaagagcaaggctagtctccaaagatggaaggtgcaacatagaatttggcaatgtggaggcacagtcaaggtttatattctttgtggacatctggacaacggtacttgacctcaagtggagatacaaaatgaccattttcatcacagccttcttggggagttggtttttctttggtctcctgtggtatgcagtagcgtacattcacaaagacctcccggaattccatccttctgccaatcacactccctgtgtggagaatattaatggcttgacctcagcttttctgttttctctggagactcaagtgaccattggatatggattcaggtgtgtgacagaacagtgtgccactgccatttttctgcttatctttcagtctatacttggagttataatcaattctttcatgtgtggggccatcttagccaagatctccaggcccaaaaaacgtgccaagaccattacgttcagcaagaacgcagtgatcagcaaacggggagggaagctttgcctcctaatccgagtggctaatctcaggaagagccttcttattggcagtcacatttatggaaagcttctgaagaccacagtcactcctgaaggagagaccattattttggaccagatcaatatcaactttgtagttgacgctgggaatgaaaatttattcttcatctccccattgacaatttaccatgtcattgatcacaacagccctttcttccacatggcagcggagacccttctccagcaggactttgaattagtggtgtttttagatggcacagtggagtccaccagtgctacctgccaagtccggacatcctatgtcccagaggaggtgctttggggctaccgttttgctcccatagtatccaagacaaaggaagggaaataccgagtggatttccataactttagcaagacagtggaagtggagacccctcactgtgccatgtgcctttataatgagaaagatgttagagccaggatgaagagaggctatgacaaccccaacttcatcttgtcagaagtcaatgaaacagatgacaccaaaatgtaacagtggcttttcaacgggagtaaagcaaagtctctaaagctcctagtacctagaagcattatgaagcagtcaacaatttaggggtacgaaagtaggatgagagccttcaaagtctaccagcacaaagacccctgagccccgcaattgtgatcccacaagacatgcatctccacaaggctactgtattagaacgtgcaatgcatttatatgaaactggtgtatggaagacataggtgctctcttgaaatcttaaatatgattatttgagctcatataaggtggattggagcagataaaattatcaaaagtttcatgaacaggccaaacaaaatattttttaaagtttccttaaagaagttatgaactttagaaaggatcagg

SEQ ID NO: 23187 - DNA, 2616 bp, Homo sapiens
  source 1..2616: mol_type = unassigned DNA
gttgcatacagatgagttggcagccggtctgagctggcccacagactcataaaatcaacagggcctcgggtaccctcacctagcatatccaaactcttgcatcaaaggtgcagggacttgctcacatcgagaatctggttgctttcttggagaccaagaaaatgagtttttgtttctacatttactccagcaatccatgaggtttcttctctactgtgccttcatccccatcctgggccctgacaaagacagtgtgacaagttctgagccccacaggtggaatcccaaaccaagcagctcttgctggtcaccccaagatctacttatacatgaagttttgaaaatcatctcctgaacctcttctgacagagatcagggtgttgacagaaagtatgttcaaacatcttcggaaatgggtcgtcactcgcttttttgggcattctcggcaaagagcaaggctagtctccaaagatggaaggtgcaacatagaatttggcaatgtggaggcacagtcaaggtttatattctttgtggacatctggacaacggtacttgacctcaagtggagatacaaaatgaccattttcatcacagccttcttggggagttggtttttctttggtctcctgtggtatgcagtagcgtacattcacaaagacctcccggaattccatccttctgccaatcacactccctgtgtggagaatattaatggcttgacctcagcttttctgttttctctggagactcaagtgaccattggatatggattcaggtgtgtgacagaacagtgtgccactgccatttttctgcttatctttcagtctatacttggagttataatcaattctttcatgtgtggggccatcttagccaagatctccaggcccaaaaaacgtgccaagaccattacgttcagcaagaacgcagtgatcagcaaacggggagggaagctttgcctcctaatccgagtggctaatctcaggaagagccttcttattggcagtcacatttatggaaagcttctgaagaccacagtcactcctgaaggagagaccattattttggaccagatcaatatcaactttgtagttgacgctgggaatgaaaatttattcttcatctccccattgacaatttaccatgtcattgatcacaacagccctttcttccacatggcagcggagacccttctccagcaggactttgaattagtggtgtttttagatggcacagtggagtccaccagtgctacctgccaagtccggacatcctatgtcccagaggaggtgctttggggctaccgttttgctcccatagtatccaagacaaaggaagggaaataccgagtggatttccataactttagcaagacagtggaagtggagacccctcactgtgccatgtgcctttataatgagaaagatgttagagccaggatgaagagaggctatgacaaccccaacttcatcttgtcagaagtcaatgaaacagatgacaccaaaatgtaacagtggcttttcaacgggagtaaagcaaagtctctaaagctcctagtacctagaagcattatgaagcagtcaacaatttaggggtacgaaagtaggatgagagccttcaaagtctaccagcacaaagacccctgagccccgcaattgtgatcccacaagacatgcatctccacaaggctactgtattagaacgtgcaatgcatttatatgaaactggtgtatggaagacataggtgctctcttgaaatcttaaatatgattatttgagctcatataaggtggattggagcagataaaattatcaaaagtttcatgaacaggccaaacaaaatattttttaaagtttccttaaagaagttatgaactttagaaaggatcaggggacaataataatctcattttgattctactgataagaatgactccacttttaatgtggacttttactcatggaaaaattgtctcctaatttggggagatgaaccaaccaatcaatgacaagaaaacgcttacacaaagaacaatttgaggctctaagcttctcatgtggtacgtttagacagaggctaaatctgcacactagaatcttgatgataccttcctgcaagacagaatgctttagttaaaagtggtgatgatatttctttcaatctgtattggatggcttaaagggctataaatctgtttataaagagcatttcctgctcttcgaagacagcaatgaggagttggaaggtgcaaagtcagtagagaagggaatgtatcattaatgcacctgagaagaaacagtttcatgtgttcctccacctagagtttgtactggaatgctatttctaaagaagaagtgggaaagagagaggaatgggatggagccccacagtcagaatgttactatgtctttctttccctgacagcccatcttcctaaaagggaccagcttatggaaggctcgaccttgaggggaaagttttactgtgaaagtcttcttcagatccccacctgcatcattccgaatgtgtcctggaaaaaaactggtactcaaagctgcttaggaatcaaaatgttttcagtgtgttgattaatatagtaaatttctgaaactgtg

SEQ ID NO: 23188 - DNA, 5293 bp, Homo sapiens
  source 1..5293: mol_type = unassigned DNA
ggcgctgcggagggagggggcggcccggcccggcccagctctgcccccggccggcccgaccccggccccggcccccggacaagcccttatctgatcccagctccgggtttaagagtcctggcccggcccgtcgcacagctctgctcctaactcctgcccgccccgtccgtccatctgtcccgctgccccgcggcccatccaaggggccactccacctcggacccaagatgacgtcagttgccaaggtgtattacagtcagaccactcagacagaaagccggcccctaatgggcccagggatacgacggcggagagtcctgacaaaagatggtcgcagcaacgtgagaatggagcacattgccgacaagcgcttcctctacctcaaggacctgtggacaaccttcattgacatgcagtggcgctacaagcttctgctcttctctgcgacctttgcaggcacatggttcctctttggcgtggtgtggtatctggtagctgtggcacatggggacctgctggagctggaccccccggccaaccacaccccctgtgtggtacaggtgcacacactcactggagccttcctcttctcccttgaatcccaaaccaccattggctatggcttccgctacatcagtgaggaatgtccactggccattgtgcttcttattgcccagctggtgctcaccaccatcctggaaatcttcatcacaggtaccttcctggcgaagattgcccggcccaagaagcgggctgagaccattcgtttcagccagcatgcagttgtggcctcccacaatggcaagccctgcctcatgatccgagttgccaatatgcgcaaaagcctcctcattggctgccaggtgacaggaaaactgcttcagacccaccaaaccaaggaaggggagaacatccggctcaaccaggtcaatgtgactttccaagtagacacagcctctgacagccccttccttattctaccccttaccttctatcatgtggtagatgagaccagtcccttgaaagatctccctcttcgcagtggtgagggtgactttgagctggtgctgatcctaagtgggacagtggagtccaccagtgccacctgtcaggtgcgcacttcctacctgccagaggagatcctttggggctacgagttcacacctgccatctcactgtcagccagtggtaaatacatagctgactttagcctttttgaccaagttgtgaaagtggcctctcctagtggcctccgtgacagcactgtacgctacggagaccctgaaaagctcaagttggaggagtcattaagggagcaagctgagaaggagggcagtgcccttagtgtgcgcatcagcaatgtctgatgacctgttcccactcccccattcctctggtctcttttcctctcttccaatgccctggtaaggaatactacccgggtttactggagatcccccgaagcacccatcctccactccctcttctttaacccagtggcctgttggtagcttaggccaactggagtccaggttcgcctcccactgtcccctttccacttccccagcttctgccccaatacacatacctcccttaagccaggatgggggaaagagtgggattaggctgaagtggcttagaaggcctcagccatgcttggatactcacattaggaggaccatgtggttggaaggatagactgccccctacctcccaccaccaccatgaagtttggtgacttgaggctggagctccctctgttacctttccatctagcaagttcccaaaggcaagactctctctgatggtcactttgtggtctgtgctttcagaaatacaggaatctgatatcaacatatcctagggtttctaccaatctctgttgaaagaagccagggtttgccactgtgaagcttgatttctgctggtgacttctgaccataagctagaaccatggtcgccactgttttccctctgtagtttctcaagtgaacactctcaggatacccagttccctcatagcctctgttctcagagaattggagttggcccaagaaacataaacatataaccacccatatctatcctggattctgaactcttcaatttggagtgactaacacaagttgttatctaaacctttaaacctatcttccaggcagcccagagaagatctgtttccctgtgtcctgtgaatggaaggacccaagccaatatgttcctttgaaaagagtccagtacccaggccccatggaaaggtctgaaaataatattccagattacactgtacctggcttctcttcttcctttcctgctcagcctagatccttcttccttaaccccaactctttgggagaagggagggaaaatgcaagggccttcctctcttaacacggatgctcaagtaaaactagattcacagggcacagattccccagaaagttaacacaatcccaccatgagggatgggtaaattctcagatttccaaactgctgtacagagcctctgagaattggtgatgctttgttaaggtttgggcaggagcagaactctgtggctggcagccactattctcagttacacctcccagtgcccttctgaaaagtgccagctatttcattaggcaatgctggaaggaaatgaaattataccttctgatcaaataaccatggcttccctcagccattcctgagacttggtataaaatgaagaaatcagtgtcatctctactctcctctgccatgaggccattttcagacaagttaaaaagtagactttaagagatcaaactcagcctattccttgttccctggtggggtctgtggtaagggtcagggaagggcatataggcaccagagctttatccaaagccccaaatccctagagtgctttctggtctcactttggtaccaaggaagcctcacatagtggtactgcatagtcccactataagtcaagttgcagtttaaggtggtctcagccaattgttacaagctacagaatatatacatgcatctatgtacagagccttgcagagaaacacaaaattttgaggctagacccatgatcaccaccaactataattgcacaaggtcttgttatattgatctctcctcgaactcaactaactatatcttgaaaacaaagacccttcggtgtccatctacagtaaaccccaccattaccttctagttggcataaaaacaagaaccacaaaaacttgaaaaatctgaaacagagaacagaaggccaagagccagcttctgcgttctcaactttattcaacattagacttaccttatttctttcagtgtgtagggacaagatgtactgctgtgtgtgtgtgtgtgtgtgtgtgtgtgtgtgtgtgtgtgtgtgtgtgtgtctataccttcctatccattgccaagttaacctccatctggtttatttggccatgctatgctttcttcccattcccctgctgtctattctaagcccccagactcaagcctctagactcttggatgaaacagtgagaagaaaacattttctgacttacccttttggaatctcctccattattacccaggctttgctttaagttgcactttaaatcacactgtcctattaatgcgatctggcatcttctcccacaagccccctacagggaacaactaccccctaccttaactctaaatggttctttagactatagtctgtctcctctgacctgaaatcctcttttaggcaataggccgagctttagaagcagccaggtctggtgagaaatgggcccccataccaactgtggacttggaatatcagcagagtagtaggcacagttgtaaaaaggggagatttcggtaggcacaggtgtaaaaaggggagatttcagaagacgggcgaaacaactgatgggggaagatacctggggtgagaagatgagaaagaaatgatgctgagggacctagtgaaatcaatgaaactcttgagtcttgcttaggctcgcaaacaagaagtggggaggcttgggaaattaggatatgacatatatgaaaggtttatctaagaagaaagaaacagagataatatatatatagaaagatgtatatagatgtatatatgcccaaatatattgaatgtacagaaaggaaatattcagagactttagcattgggggcagatatcttggcctggttatggggtaggacacccagattttcagacttacaatcagtggtcctggtttcaacatggaagtgagatagctgatgaaggatttcaagtctggaaatgggaaagggaggggtagaagttccttttcagaaataaagaggcattcatgaaggcttttgttgaatcctatgctactgataggaccaggaagagaggaactcggaggacaatagggaggggaagtcttggaaaatctaccacttacactgtgtgtccccatccccagcagcgtcctgccactgtagcgcctttttaaaataaataaaataaaataaagcaccattttgtttccctttcatgaagtacactgtatttccgtcttccacaggggtgggagctgctattgctctagcccctgaaatcaaactcaggagctgaacactttggtgtatgggaggcactaatgggaagcctcaaccctggaatccaaatgccaggactaatagctgttaggctgaagatctcccaaggtcaaggcccagccttttgtgtggctgcaagcagcccaaagagaaagccatggattccagaagagttccaatcctggcatttgggcatggagggtgatgctttggttttgatgcttctgaatgaaaatgaggagtggggttaccagctgctctaggggatggtgaagttccatgagaggcttccgaaatctctgcaatgtgcttcaccccattattcccccaacccctgtcagcctaataaaatcatccagtagtttccctataaggtctgagcagagaaagaaagccagttatactattgctacaagtccaggacactgtgccctctccatggctgctgccctggtcctttattcttgctagctaacctagttcacttgtacagtaacacactacctttgctggaaagttagcatgggtctccaggctcagtaatggccaactctactgatgcagaagtatttagggatgttttttccattcattgcactaaagactaaaccaggtcaaatttatctaggaaaaaaaaggtgtgtaagatttgttttgtttttgtctgttaaaaataagctactaaataaaatggatgactctttggttgtca

SEQ ID NO: 23189 - DNA, 2801 bp, Homo sapiens
  source 1..2801: mol_type = unassigned DNA
ggcagggttgggggctccctaggcgccaggcaggtgggctcaagggtgaggctgttttttttgttttgttttttgtttttgagacggagtctcgctctgtcgcccaggctggagtgcagtggcgtgatcttggctcactgcaacctccgcctctcgggttcaagcgattctcctgcctcagcttcctgagtagctgggattacaggtgcgcaccaccatgcccggctaacttttgtatttttagtagagatggggtttcaccatgttggtcaggctggtctcgaactcctgacctagtgatctgccctcctcagcctcccaacgtactgggattacaggcgtgagccaccgcgcccggcctgaggctggtattaagaagtgaagtgggacccaggtggaggtaaggaagagtctggtggggagttatctcagaagtgaggccagcacaggctgagtgcagccccagggtgagaaggtgcccaccgagaggactctgcagtgaggccctaggccacgtccgaggggtgcctccgatgggggaagcccctccctgggggtcaccggagccatgctgtcccgcaagggcatcatccccgaggaatacgtgctgacacgcctggcagaggaccctgccaagcccaggtaccgtgcccgccagcggagggcccgctttgtgtccaagaaaggcaactgcaacgtggcccacaagaacatccgggagcagggccgcttcctgcaggacgtgttcaccacgctggtggacctcaagtggccacacacattgctcatcttcaccatgtccttcctgtgcagctggctgctcttcgccatggcctggtggctcatcgccttcgcccacggtgacctggcccccagcgagggcactgctgagccctgtgtcaccagcatccactccttctcgtctgccttccttttctccattgaggtccaagtgactattggctttggggggcgcatggtgactgaggagtgcccactggccatcctgatcctcatcgtgcagaacatcgtggggctcatgatcaacgccatcatgcttggctgcatcttcatgaagactgcccaagcccaccgcagggctgagaccctcatcttcagcaagcatgcggtgatcgccctgcgccacggccgcctctgcttcatgctacgtgtgggtgacctccgcaagagcatgatcatcagcgccaccatccacatgcaggtggtacgcaagaccaccagccccgagggcgaggtggtgcccctccaccaggtggacatccccatggagaacggcgtgggtggcaacagcatcttcctggtggccccgctgatcatctaccatgtcattgatgccaacagcccactctacgacctggcacccagcgacctgcaccaccaccaggacctcgagatcatcgtcatcctggaaggcgtggtggaaaccacgggcatcaccacccaggcccgcacctcctacctggccgatgagatcctgtggggccagcgctttgtgcccattgtagctgaggaggacggacgttactctgtggactactccaagtttggcaacaccgtcaaagtgcccacaccactctgcacggcccgccagcttgatgaggaccacagcctactggaagctctgaccctcgcctcagcccgcgggcccctgcgcaagcgcagcgtgcccatggccaaggccaagcccaagttcagcatctctccagattccctgtcctgagccatggtctctcgggccccccacacgcgtgtgtacacacggaccatgtggtatgtagcccggccagggcctggtgtgaggctgggccagcctcagctcagcctccccctgctgctcatccagggtgttacaaggcacttgtcactatgctatttctggcctcagcaggaacctgtactgggttatttttgtccctgctcctcccaacccaattcaggactggctcacccctctcccccgcccaaggctgcagaggctgtgggaggtactgggccctagagctgtgcgtccagccagtcctgggtccccacgattgaccagccacactctgggccggtggctggggaagaacaatccccgagggctgctgctttgcgtctgtggctccaagaagtgcctgtggtcaggccccagctctacttggtccctgaaaaagcacctggctaagggctgggcctggccagcagggagggcagttgatgagagagggtgttcccgctggagggttggtgctgtggagcctacaccggcagggacagcctggggctgacagggctcccctccgagggccagtttcaggtctggaaggggaggaagcaggggaaggtgacctgaggaggctcggctttgtagagccccgctcaggcacagggaggaggagatgccagggctcctgccttttgccacatcggcctcgtgcagtgagggctctgtgggctggggctgctgcccctgcctacctcctgcctgtccccagaggctgaggagagggggtactgtgcccaccacacatgattaggcctcagacccaactctggtcctggctccacaacagtggctgccactcactttgtccagaaggtggcttgggggtggatatctttgggttgctggaaaaggtgtgggaaggttcaggatggtgggagggactgaggtccctgaggtgaagaggcccttggtcctgacgggtttgacccgtgcctggacccttggagcagtgttgtgtgaacttgcctagaactctgccttctccgttgtcaataaagcctccccctcatga

SEQ ID NO: 23190 - DNA, 2455 bp, Homo sapiens
  source 1..2455: mol_type = unassigned DNA
ggcgcggagctgggtgcgcgccgagcctctgcctcccgccgcctcctcgccctccattcctcgctccccgtcttctcccggccacaccgccactgctgccgcctccctgggaacagtagccgggggagggggactggcgcggtcagagcctgcgaggaggtgcggggcgccggggcgtaggggagcgcgccgggccctgcccgagatcagataacagccggcgggggagggggtgggccggccgtgctcacagccggaccgagggaccgacgccagccgccccggcccaagcgagcgcccagcggccgggggcgccgtccaggcgcgcgcccccgacccgtggctggaccagggcgatccgctttgcagagaagacgcgcccctcggcatggagcgcccccgggagctgccctgaggcggtggcggcagcggcggcgatgcagccagcgcggcagctgccggggccaggaacggccgcccggagcttggaggacgccgagcgcgccgcgcccgggccactgaccgaggatgttctagtgactggatcctttccagttggtgcctgggaaatggcagccactactaattcagccttgaagacagtaccgtgcccactcagcaccattacatagaagatagaactcaagaggagccgccctgcctggagctagcctgggggcgagccagggtcccccaacccccgggatgaccgcggccagccgggccaacccctacagcatcgtgtcatcggaggaggacgggctgcacctggtcaccatgtcgggcgccaacggcttcggcaacggcaaggtgcacacgcggcgcaggtgccgcaaccgcttcgtcaagaagaatggccagtgcaacattgagttcgccaacatggacgagaagtcacagcgctacctggctgacatgttcaccacctgtgtggacatccgctggcggtacatgctgctcatcttctcgctggccttccttgcctcctggctgctgttcggcatcatcttctgggtcatcgcggtggcacacggtgacctggagccggctgagggccggggccgcacaccctgtgtgatgcaggtgcacggcttcatggcggccttcctcttctccatcgagacgcagaccaccatcggctacgggctgcgctgtgtgacggaggagtgcccggtggccgtcttcatggtggtggcccagtccatcgtgggctgcatcatcgactccttcatgattggtgccatcatggccaagatggcaaggcccaagaagcgggcacagacgctgctgttcagccacaacgccgtggtggccctgcgtgacggcaagctctgcctcatgtggcgtgtgggtaacctgcgcaagagccacattgtggaggcccatgtgcgcgcgcagctcatcaagccgcgggtcaccgaggagggcgagtacatcccgctggaccagatcgacatcgatgtgggcttcgacaagggcctggaccgcatctttctggtgtcgcccatcaccatcttgcatgagattgacgaggccagcccgctcttcggcatcagccggcaggacctggagacggacgactttgagatcgtggtcatcctggaaggcatggtggaggccacagccatgaccacccaggcccgcagctcctacctggccaatgagatcctgtggggtcaccgctttgagcccgtgctcttcgaggagaagaaccagtacaagattgactactcgcacttccacaagacctatgaggtgccctctacgccccgctgcagtgcgaaggatctggtagagaacaagttcctgctgcccagcgccaactccttctgctacgagaacgagctggccttcctgagccgtgacgaggaggatgaggcggacggagaccaggacggccgaagccgggacggcctcagcccccaggccaggcatgactttgacagactccaggctggcggcggggtcctggagcagcggccctacagacgggagtcagagatctgagccaaccttggccgacatgcagcatccacccccggctggggagaggccccgcggtcgctcaggggccccgggtttgagcagaacgggcccagtgccctgggttgcagactcagtagcgttttagtcgttttatgtttctttgcaacggcctcagaagtttggccggagagggggcagccagagcggcagcccccggcctcagaggctatcacaggctcagggcaaagaagtggcctcctggggggccaggccacgagggccagggcttctgcctgaagatggagctgcagcctgcggggaagcagctcagctcgatggtgggcccagcctctgctgtccaaggctggctagctgcggtgctccttgctggtttttaacttggggagaaacaccgggtttcagctttcttgaccttagcttgggtgagactgtttacaaaaaaaaaaaa

SEQ ID NO: 23191 - DNA, 2950 bp, Homo sapiens
  source 1..2950: mol_type = unassigned DNA
accagtccaagaagagaacctacaaactagacttgtagattaaaattatctgatcaaaaaggcagactctgtaaatttccttaagacctaccttggcataaaggctgacccagcaaaagaactgagaaatacagcctgagatggacagcagtaattgcaaagttattgctcctctcctaagtcaaagataccggaggatggtcaccaaggatggccacagcacacttcaaatggatggcgctcaaagaggtcttgcatatcttcgagatgcttggggaatcctaatggacatgcgctggcgttggatgatgttggtcttttctgcttcttttgttgtccactggcttgtctttgcagtgctctggtatgttctggctgagatgaatggtgatctggaactagatcatgatgccccacctgaaaaccacactatctgtgtcaagtatatcaccagtttcacagctgcattctccttctccctggagacacaactcacaattggttatggtaccatgttccccagtggtgactgtccaagtgcaatcgccttacttgccatacaaatgctcctaggcctcatgctagaggcttttatcacaggtgcttttgtggcgaagattgcccggccaaaaaatcgagctttttcaattcgctttactgacacagcagtagtagctcacatggatggcaaacctaatcttatcttccaagtggccaacacccgacctagccctctaaccagtgtccgggtctcagctgtactctatcaggaaagagaaaatggcaaactctaccagaccagtgtggatttccaccttgatggcatcagttctgacgaatgtccattcttcatctttccactaacgtactatcactccattacaccatcaagtcctctggctactctgctccagcatgaaaatccttctcactttgaattagttgtattcctttcagcaatgcaggagggcactggagaaatatgccaaaggaggacatcctacctaccgtctgaaatcatgttacatcactgttttgcatctctgttgacccgaggttccaaaggtgaatatcaaatcaagatggagaattttgacaagactgtccctgaatttccaactcctctggtttctaaaagcccaaacaggactgacctggatatccacatcaatggacaaagcattgacaattttcagatctctgaaacaggactgacagaataagacttatccattttttaatgtattaaatacacccagccagttatgcagctactttttctttactgtatctcatgttttcttttttcaatgctaattatagctctctacatcacggtaatcatgcctatgcctacataagaatggctgagctaacaatacacattctggaaacataacactctacattacaaagtttgttacctgctgaaatcaatgtaactcaacttgacagacacttatacagaaatgttgctggtgaatttataagaatgtggtatgatactagtaatgaaggcaaaatggacagtgaagtttaacacaactgaactctaagaaaatcaaccattaatctctcattttcatctgcaaattgaagcaacagtttagtttcaaacctagctccctgggtggaatgacgacttcactatacttagtgaatatcctttaagagctgggatttttttcaagacaacaaagatcattcatttggttctttatactatgaaacttgagtaagtattacctccttaatttttaacaactaagaacaaaaattaacgagaaaaacaacaaagtacagatttatacataaacctaaaagcatttgaacatgacacccgaacacatacatatatgttcacttatttgtggcagaaggtgatcagataagctccagcccaaatggaacctgtggggtggtattttgcattgcaaggagacgcaaaattttattttaaaactgtcctccataataatcaaacggtgattcatctaaatgacttctagcaacctaagtaaaaacattcccctcctatgtatgattcatttgatcatataaaacatcatgatggctctaattcataaatacaaaaatatatttaagtctttatagatataaagctttacttagatataacttgagtgagtagggaaaaaaatctacagtagataaagcaaaagataattaggcaacaaagcattttcaaactcaaattcctgtttccaacttcaaatagttttttctataaacacaaaatcagtgtttattcaccagtaggaggttggactagatgaactctattatttctttctaaatctaatagtctataaaaattatgtttcctctgttttttattttatctatgctaaaatgagccctttcccttatgtccagtttaagatgatcatttgcatgattttcatttcaataaaaaaaagagaaactgtccttaaaacaaaacaaaaaccaaaaaagtcaccctatcaggtttcaaacagatttgtggctgttcttttctgaaatttcccttattcaggtttctgtgggaaaaatgaaagattaaccttccccactggtgatgacctaggcaggaatcatctcttgaaataaatactagctgagtaaaggcaagcaggtgtgaagagcagggctcagcagcaagtcacatttttctactatttgaccaaaaggaaaagaaaataaagaagaactctggagtggtctaagactgataatagcagaagaatatcaagaacacagaaacttaattattgtgaacttttgctgtttgaaaatcttagacattcattcttaagtagaaatcagaccaacagattttcccaacccaagactattgtaacacataaagacagcaagaattcttatttctataataaattaacaagattcacctaacctttgaaaataaagtagtattgaagactta

SEQ ID NO: 23192 - DNA, 1099 bp, Homo sapiens
  source 1..1099: mol_type = unassigned DNA
agtccaagaagagaacctacaaactagacttgtagattaaaattatctgatcaaaaaggcagactctgtaaatttccttaagacctaccttggcataaaggctgacccagcaaaagaactgagaaatacagcctgagatggacagcagtaattgcaaagttattgctcctctcctaagtcaaagataccggaggatggtcaccaaggatggccacagcacacttcaaatggatggcgctcaaagaggtcttgcatatcttcgagatgcttggggaatcctaatggacatgcgctggcgttggatgatgttggtcttttctgcttcttttgttgtccactggcttgtctttgcagtgctctggtgcttttgtggcgaagattgcccggccaaaaaatcgagctttttcaattcgctttactgacacagcagtagtagctcacatggatggcaaacctaatcttatcttccaagtggccaacacccgacctagccctctaaccagtgtccgggtctcagctgtactctatcaggaaagagaaaatggcaaactctaccagaccagtgtggatttccaccttgatggcatcagttctgacgaatgtccattcttcatctttccactaacgtactatcactccattacaccatcaagtcctctggctactctgctccagcatgaaaatccttctcactttgaattagttgtattcctttcagcaatgcaggagggcactggagaaatatgccaaaggaggacatcctacctaccgtctgaaatcatgttacatcactgttttgcatctctgttgacccgaggttccaaaggtgaatatcaaatcaagatggagaattttgacaagactgtccctgaatttccaactcctctggtttctaaaagcccaaacaggactgacctggatatccacatcaatggacaaagcattgacaattttcagatctctgaaacaggactgacagaataagacttatccattttttaatgtattaaatacacccagccagttatgcagctactttttctttactgtatctcatgttttcttttttcaatgctaattatagctctctacatcacgg

SEQ ID NO: 23193 - DNA, 1177 bp, Homo sapiens
  source 1..1177: mol_type = unassigned DNA
agcttactaatttactcttgattttagagaaatacagcctgagatggacagcagtaattgcaaagttattgctcctctcctaagtcaaagataccggaggatggtcaccaaggatggccacagcacacttcaaatggatggcgctcaaagaggtcttgcatatcttcgagatgcttggggaatcctaatggacatgcgctggcgttggatgatgttggtcttttctgcttcttttgttgtccactggcttgtctttgcagtgctctggtatgttctggctgagatgaatggtgatctggaactagatcatgatgccccacctgaaaaccacactatctgtgtcaagtatatcaccagtttcacagctgcattctccttctccctggagacacaactcacaattggttatggtaccatgttccccagtggtgactgtccaagtgcaatcgccttacttgccatacaaatgctcctaggcctcatgctagaggcttttatcacaggtgcttttgtggcgaagattgcccggccaaaaaatcgagctttttcaattcgctttactgacacagcagtagtagctcacatggatggcaaacctaatcttatcttccaagtggccaacacccgacctagccctctaaccagtgtccgggtctcagctgtactctatcaggaaagagaaaatggcaaactctaccagaccagtgtggatttccaccttgatggcatcagttctgacgaatgtccattcttcatctttccactaacgtactatcactccattacaccatcaagtcctctggctactctgctccagcatgaaaatccttctcactttgaattagttgtattcctttcagcaatgcaggagggcactggagaaatatgccaaaggaggacatcctacctaccgtctgaaatcatgttacatcactgttttgcatctctgttgacccgaggttccaaaggtgaatatcaaatcaagatggagaattttgacaagactgtccctgaatttccaactcctctggtttctaaaagcccaaacaggactgacctggatatccacatcaatggacaaagcattgacaattttcagatctctgaaacaggactgacagaataagacttatccattttttaatgtattaaatacacccagccagttatgcagcta

SEQ ID NO: 23194 - DNA, 2863 bp, Homo sapiens
  source 1..2863: mol_type = unassigned DNA
aggtgtttggagagcccggactggatgcccactagaatcctgtgctgtgaacagtgagagagttttcttcattttgaggaaccctaaacacctatctttcccaaggcaacctgtctggactgagcatttctctgacttgacataacttcccatccagccaggagtctgcactcttcagtctttgcaggcagtagcagaatcccatggtagccaggtgggtgaaggggagcgaggacgttctacctgccttgaagaagacacctgacctgcggagtgagtgaccagtgtttccagagcctggcaatggatgccattcacatcggcatgtccagcacccccctggtgaagcacactgctggggctgggctcaaggccaacagaccccgcgtcatgtccaagagtgggcacagcaacgtgagaattgacaaagtggatggcatatacctactctacctgcaagacctgtggaccacagttatcgacatgaagtggagatacaaactcaccctgttcgctgccacttttgtgatgacctggttcctttttggagtcatctactatgccatcgcgtttattcatggggacttagaacccggtgagcccatttcaaatcataccccctgcatcatgaaagtggactctctcactggggcgtttctcttttccctggaatcccagacaaccattggctatggagtccgttccatcacagaggaatgtcctcatgccatcttcctgttggttgctcagttggtcatcacgaccttgattgagatcttcatcaccggaaccttcctggccaaaatcgccagacccaaaaagcgggctgagaccatcaagttcagccactgtgcagtcatcaccaagcagaatgggaagctgtgcttggtgattcaggtagccaatatgaggaagagcctcttgattcagtgccagctctctggcaagctcctgcagacccacgtcaccaaggagggggagcggattctcctcaaccaagccactgtcaaattccacgtggactcctcctctgagagccccttcctcattctgcccatgacattctaccatgtgctggatgagacgagccccctgagagacctcacaccccaaaacctaaaggagaaggagtttgagcttgtggtcctcctcaatgccactgtggaatccaccagcgctgtctgccagagccgaacatcttatatcccagaggaaatctactggggttttgagtttgtgcctgtggtatctctctccaaaaatggaaaatatgtggctgatttcagtcagtttgaacagattcggaaaagcccagattgcacattttactgtgcagattctgagaaacagcaactcgaggagaagtacaggcaggaggatcagagggaaagagaactgaggacacttttattacaacagagcaatgtctgatcacaggggcgccatccaggtttaaccctgcaagctgtttccacatcagaactcccttcaaacacaaagattgctgtgaaaacgaaaatgtgtagacgcactctcaaaaactgcacggacatacaaaatcaatcttttcctttgatcttgtggctaaaccagcatttctgtgtttgagagatttcctgttaggtgcttcgtctgaaagtgaactctcataattcaaattgtataaaataaagctacatttctaagagcttggtgtagggcaattggaataatgtcctgttagataaacagacatttagcaatcctgacattaaaaggaaatgtatttctatacaagattattagctgtaatacaagatatttatttaaccaatgaccttatggctgagagttgaattgtggttcagtattcattgatctcactgctttaaaacatgctctttttgttcaagcaggaaaaatattatatctaattatgtctatgtggtaatacctaaaaagaggtagagagactctatgttcacaaaatatagtaatttcatttttacctttcttcagtggactgaattgtatggaaggaaattgatcagatctgtaattcacaactgtggaaacctacacaaatggggctgatgccattgtttcctctattttattttatttatttttgaatccactatctctttccattcaaaatatttccattcaaaatgtggttcacagacccgccacatcagcaccatccgagagcttattagtaatgtgtagattctcatgtcccagccagacttacagaattggggtctgtatcttaacaagaaccccagatgatttgtgtacaaatgaaagttcgaaagctgtgctctggacagtgttctcaaagcaactttctgaagccgtgtggaaaactgactctgtgtgggtcccgtatccctgtggcatccagacctggcctctcttcatttcattattattggccaatatttctttcagccatttcatttcttatctattaaaatggcttgcccataaaggaactgcataggattatcccctgacattccaagagcaaaataaagctcttgagagtaattgttgtctcagtcatgcttgctgattacagttagcacaaaagaaaaattcagctgcctgacaatacaggaaatgttctcagatgctgatgtttgtaaggtccggtggggccatgaggaagaagaggagctgaaggtaagaaactcataaacaagatgactctttgatgcatgaacaagatttgaaaatctcaagcctgtaaagaatacccctgctatttaaataaagctcataccaagaggtaacattttgccccgggccaaattcaggggtctagtgccctgcattcctttgaggcaaaaaataaatgggctatgactggttaaatgtc

SEQ ID NO: 23195 - DNA, 532 bp, Homo sapiens
  source 1..532: mol_type = unassigned DNA
aggtgtttggagagcccggactggatgcccactagaatcctgtgctggcaacctgtctggactgagcatttctctgacttgacataacttcccatccagccaggagtctgcactcttcagtctttgcaggacaggtgggagttaaccaagaaagggagaaaatgaagaaccttcaggaaggaattcatgtgccagatgtgggctgagagggcacccagctgctcaggaaggggcagtagcagaatcccatggtagccaggtgggtgaaggggagcgaggacgttctacctgccttgaagaagacacctgacctgcggagtgagtgaccagtgtttccagagcctggcaatggatgccattcacatcggcatgtccagcacccccctggtgaagcacactgctggggctgggctcaaggccaacagaccccgcgtcatgtccaagagtgggcacagcaacgtgagaattgacaaagtggatggcatatacctactctacctgcaagacctgtggaccacagttatcgacatga

SEQ ID NO: 23196 - DNA, 665 bp, Homo sapiens
  source 1..665: mol_type = unassigned DNA
aaaatattctagactcttcccttccagcgctcactgtttacttcctctgcacttccccttcctgcctccccgtgtgccggcagtagcagaatcccatggtagccaggtgggtgaaggggagcgaggacgttctacctgccttgaagaagacacctgacctgcggagtgagtgaccagtgtttccagagcctggcaatggatgccattcacatcggcatgtccagcacccccctggtgaagcacactgctggggctgggctcaaggccaacagaccccgcgtcatgtccaagagtgggcacagcaacgtgagaattgacaaagtggatggcatatacctactctacctgcaagacctgtggaccacagttatcgacatgaagtggagatacaaactcaccctgttcgctgccacttttgtgatgacctggttcctttttggagtcatctactatgccatcgcgtttattcatggggacttagaacccggtgagcccatttcaaatcataccccctgcatcatgaaagtggactctctcactggggcgtttctcttttccctggaatcccagacaaccattggctatggagtccgttccatcacagaggaatgtcctcatgccatcttcctgttggttgctcagttggtcatcacgaccttgattga

SEQ ID NO: 23197 - DNA, 715 bp, Homo sapiens
  source 1..715: mol_type = unassigned DNA
aggtgtttggagagcccggactggatgcccactagaatcctgtgctggcaacctgtctggactgagcatttctctgacttgacataacttcccatccagccaggagtctgcactcttcagtctttgcaggcagtagcagaatcccatggtagccaggtgggtgaaggggagcgaggacgttctacctgccttgaagaagacacctgacctgcggagtgagtgaccagtgtttccagagcctggcaatggatgccattcacatcggcatgtccagcacccccctggtgaagcacactgctggggctgggctcaaggccaacagaccccgcgtcatgtccaagagtgggcacagcaacgtgagaattgacaaagtggatggcatatacctactctacctgcaagacctgtggaccacagttatcgacatgaagtggagatacaaactcaccctgttcgctgccacttttgtgatgacctggttcctttttggagtcatctactatgccatcgcgtttattcatggggacttagaacccggtgagcccatttcaaatcataccccctgcatcatgaaagtggactctctcactggggcgtttctcttttccctggaatcccagacaaccattggctatggagtccgttccatcacagaggaatgtcctcatgccatcttcctgttggttgctcagttggtcatcacgaccttgattga

SEQ ID NO: 23198 - DNA, 2914 bp, Homo sapiens
  source 1..2914: mol_type = unassigned DNA
acaggagcacgtagcctgcaggtgtgggttgtacacaggcttccccctgctgagtcagttccccagatctcttcatcacttccccagatctctgggatcttcagctgagattgggccccagcacctggactcaaggacaggtgggagttaaccaagaaagggagaaaatgaagaaccttcaggaaggaattcatgtgccagatgtgggctgagagggcacccagctgctcaggaaggggcagtagcagaatcccatggtagccaggtgggtgaaggggagcgaggacgttctacctgccttgaagaagacacctgacctgcggagtgagtgaccagtgtttccagagcctggcaatggatgccattcacatcggcatgtccagcacccccctggtgaagcacactgctggggctgggctcaaggccaacagaccccgcgtcatgtccaagagtgggcacagcaacgtgagaattgacaaagtggatggcatatacctactctacctgcaagacctgtggaccacagttatcgacatgaagtggagatacaaactcaccctgttcgctgccacttttgtgatgacctggttcctttttggagtcatctactatgccatcgcgtttattcatggggacttagaacccggtgagcccatttcaaatcataccccctgcatcatgaaagtggactctctcactggggcgtttctcttttccctggaatcccagacaaccattggctatggagtccgttccatcacagaggaatgtcctcatgccatcttcctgttggttgctcagttggtcatcacgaccttgattgagatcttcatcaccggaaccttcctggccaaaatcgccagacccaaaaagcgggctgagaccatcaagttcagccactgtgcagtcatcaccaagcagaatgggaagctgtgcttggtgattcaggtagccaatatgaggaagagcctcttgattcagtgccagctctctggcaagctcctgcagacccacgtcaccaaggagggggagcggattctcctcaaccaagccactgtcaaattccacgtggactcctcctctgagagccccttcctcattctgcccatgacattctaccatgtgctggatgagacgagccccctgagagacctcacaccccaaaacctaaaggagaaggagtttgagcttgtggtcctcctcaatgccactgtggaatccaccagcgctgtctgccagagccgaacatcttatatcccagaggaaatctactggggttttgagtttgtgcctgtggtatctctctccaaaaatggaaaatatgtggctgatttcagtcagtttgaacagattcggaaaagcccagattgcacattttactgtgcagattctgagaaacagcaactcgaggagaagtacaggcaggaggatcagagggaaagagaactgaggacacttttattacaacagagcaatgtctgatcacaggggcgccatccaggtttaaccctgcaagctgtttccacatcagaactcccttcaaacacaaagattgctgtgaaaacgaaaatgtgtagacgcactctcaaaaactgcacggacatacaaaatcaatcttttcctttgatcttgtggctaaaccagcatttctgtgtttgagagatttcctgttaggtgcttcgtctgaaagtgaactctcataattcaaattgtataaaataaagctacatttctaagagcttggtgtagggcaattggaataatgtcctgttagataaacagacatttagcaatcctgacattaaaaggaaatgtatttctatacaagattattagctgtaatacaagatatttatttaaccaatgaccttatggctgagagttgaattgtggttcagtattcattgatctcactgctttaaaacatgctctttttgttcaagcaggaaaaatattatatctaattatgtctatgtggtaatacctaaaaagaggtagagagactctatgttcacaaaatatagtaatttcatttttacctttcttcagtggactgaattgtatggaaggaaattgatcagatctgtaattcacaactgtggaaacctacacaaatggggctgatgccattgtttcctctattttattttatttatttttgaatccactatctctttccattcaaaatatttccattcaaaatgtggttcacagacccgccacatcagcaccatccgagagcttattagtaatgtgtagattctcatgtcccagccagacttacagaattggggtctgtatcttaacaagaaccccagatgatttgtgtacaaatgaaagttcgaaagctgtgctctggacagtgttctcaaagcaactttctgaagccgtgtggaaaactgactctgtgtgggtcccgtatccctgtggcatccagacctggcctctcttcatttcattattattggccaatatttctttcagccatttcatttcttatctattaaaatggcttgcccataaaggaactgcataggattatcccctgacattccaagagcaaaataaagctcttgagagtaattgttgtctcagtcatgcttgctgattacagttagcacaaaagaaaaattcagctgcctgacaatacaggaaatgttctcagatgctgatgtttgtaaggtccggtggggccatgaggaagaagaggagctgaaggtaagaaactcataaacaagatgactctttgatgcatgaacaagatttgaaaatctcaagcctgtaaagaatacccctgctatttaaataaagctcataccaagaggtaacattttgccccgggccaaattcaggggtctagtgccctgcattcctttgaggcaaaaaataaatgggctatgactggttaaatgtc

SEQ ID NO: 23199 - DNA, 2747 bp, Homo sapiens
  source 1..2747: mol_type = unassigned DNA
ctgtctttcacccataaaaactgaagccatgtgccagaagccctcgtggctcaagggctctgtccttggacacggatgagggcagctgggcggtgggaccgaggctctgcctgaatgctcagcttctgcaagctggggtggagagtgtgttcctgcctaccggctcagccagcacaggagcacgtagcctgcaggtgtgggttgtacacaggcttccccctgctgagtcagttccccagatctcttcatcacttccccagatctctgggatcttcagctgagattgggccccagcacctggactcaaggacaggtgggagttaaccaagaaagggagaaaatgaagaaccttcaggaaggaattcatgtgccagatgtgggctgagagggcacccagctgctcaggaaggggcagtagcagaatcccatggtagccaggtgggtgaaggggagcgaggacgttctacctgccttgaagaagacacctgacctgcggagtgagtgaccagagcctggcaatggatgccattcacatcggcatgtccagcacccccctggtgaagcacactgctggggctgggctcaaggccaacagaccccgcgtcatgtccaagagtgggcacagcaacgtgagaattgacaaagtggatggcatatacctactctacctgcaagacctgtggaccacagttatcgacatgaagtggagatacaaactcaccctgttcgctgccacttttgtgatgacctggttcctttttggagtcatctactatgccatcgcgtttattcatggggacttagaacccggtgagcccatttcaaatcataccccctgcatcatgaaagtggactctctcactggggcgtttctcttttccctggaatcccagacaaccattggctatggagtccgttccatcacagaggaatgtcctcatgccatcttcctgttggttgctcagttggtcatcacgaccttgattgagatcttcatcaccggaaccttcctggccaaaatcgccagacccaaaaagcgggctgagaccatcaagttcagccactgtgcagtcatcaccaagcagaatgggaagctgtgcttggtgattcaggtagccaatatgaggaagagcctcttgattcagtgccagctctctggcaagctcctgcagacccacgtcaccaaggagggggagcggattctcctcaaccaagccactgtcaaattccacgtggactcctcctctgagagccccttcctcattctgcccatgacattctaccatgtgctggatgagacgagccccctgagagacctcacaccccaaaacctaaaggagaaggagtttgagcttgtggtcctcctcaatgccactgtggaatccaccagcgctgtctgccagagccgaacatcttatatcccagaggaaatctactggggttttgagtttgtgcctgtggtatctctctccaaaaatggaaaatatgtggctgatttcagtcagtttgaacagattcggaaaagcccagattgcacattttactgtgcagattctgagaaacagcaactcgaggagaagtacaggcaggaggatcagagggaaagagaactgaggacacttttattacaacagagcaatgtctgatcacaggggcgccatccaggtttaaccctgcaagctgtttccacatcagaactcccttcaaacacaaagattgctgtgaaaacgaaaatgtgtagacgcactctcaaaaactgcacggacatacaaaatcaatcttttcctttgatcttgtggctaaaccagcatttctgtgtttgagagatttcctgttaggtgcttcgtctgaaagtgaactctcataattcaaattgtataaaataaagctacatttctaagagcttggtgtagggcaattggaataatgtcctgttagataaacagacatttagcaatcctgacattaaaaggaaatgtatttctatacaagattattagctgtaatacaagatatttatttaaccaatgaccttatggctgagagttgaattgtggttcagtattcattgatctcactgctttaaaacatgctctttttgttcaagcaggaaaaatattatatctaattatgtctatgtggtaatacctaaaaagaggtagagagactctatgttcacaaaatatagtaatttcatttttacctttcttcagtggactgaattgtatggaaggaaattgatcagatctgtaattcacaactgtggaaacctacacaaatggggctgatgccattgtttcctctattttattttatttatttttgaatccactatctctttccattcaaaatatttccattcaaaatgtggttcacagacccgccacatcagcaccatccgagagcttattagtaatgtgtagattctcatgtcccagccagacttacagaattggggtctgtatcttaacaagaaccccagatgatttgtgtacaaatgaaagttcgaaagctgtgctctggacagtgttctcaaagcaactttctgaagccgtgtggaaaactgactctgtgtgggtcccgtatccctgtggcatccagacctggcctctcttcatttcattattattggccaatatttctttcagccatttcatttcttatctattaaaatggcttgcccataaaggaactgcataggattatcccctgacattccaagagcaaaataaagctcttgagagtaa

SEQ ID NO: 23200 - DNA, 2732 bp, Homo sapiens
  source 1..2732: mol_type = unassigned DNA
cagatctctgggatcttcagctgagattgggccccagcacctggactcaaggcagtagcagaatcccatggtagccaggtgggtgaaggggagcgaggacgttctacctgccttgaagaagacacctgacctgcggagtgagtgaccagtgtttccagagcctggcaatggatgccattcacatcggcatgtccagcacccccctggtgaagcacactgctggggctgggctcaaggccaacagaccccgcgtcatgtccaagagtgggcacagcaacgtgagaattgacaaagtggatggcatatacctactctacctgcaagacctgtggaccacagttatcgacatgaagtggagatacaaactcaccctgttcgctgccacttttgtgatgacctggttcctttttggagtcatctactatgccatcgcgtttattcatggggacttagaacccggtgagcccatttcaaatcataccccctgcatcatgaaagtggactctctcactggggcgtttctcttttccctggaatcccagacaaccattggctatggagtccgttccatcacagaggaatgtcctcatgccatcttcctgttggttgctcagttggtcatcacgaccttgattgagatcttcatcaccggaaccttcctggccaaaatcgccagacccaaaaagcgggctgagaccatcaagttcagccactgtgcagtcatcaccaagcagaatgggaagctgtgcttggtgattcaggtagccaatatgaggaagagcctcttgattcagtgccagctctctggcaagctcctgcagacccacgtcaccaaggagggggagcggattctcctcaaccaagccactgtcaaattccacgtggactcctcctctgagagccccttcctcattctgcccatgacattctaccatgtgctggatgagacgagccccctgagagacctcacaccccaaaacctaaaggagaaggagtttgagcttgtggtcctcctcaatgccactgtggaatccaccagcgctgtctgccagagccgaacatcttatatcccagaggaaatctactggggttttgagtttgtgcctgtggtatctctctccaaaaatggaaaatatgtggctgatttcagtcagtttgaacagattcggaaaagcccagattgcacattttactgtgcagattctgagaaacagcaactcgaggagaagtacaggcaggaggatcagagggaaagagaactgaggacacttttattacaacagagcaatgtctgatcacaggggcgccatccaggtttaaccctgcaagctgtttccacatcagaactcccttcaaacacaaagattgctgtgaaaacgaaaatgtgtagacgcactctcaaaaactgcacggacatacaaaatcaatcttttcctttgatcttgtggctaaaccagcatttctgtgtttgagagatttcctgttaggtgcttcgtctgaaagtgaactctcataattcaaattgtataaaataaagctacatttctaagagcttggtgtagggcaattggaataatgtcctgttagataaacagacatttagcaatcctgacattaaaaggaaatgtatttctatacaagattattagctgtaatacaagatatttatttaaccaatgaccttatggctgagagttgaattgtggttcagtattcattgatctcactgctttaaaacatgctctttttgttcaagcaggaaaaatattatatctaattatgtctatgtggtaatacctaaaaagaggtagagagactctatgttcacaaaatatagtaatttcatttttacctttcttcagtggactgaattgtatggaaggaaattgatcagatctgtaattcacaactgtggaaacctacacaaatggggctgatgccattgtttcctctattttattttatttatttttgaatccactatctctttccattcaaaatatttccattcaaaatgtggttcacagacccgccacatcagcaccatccgagagcttattagtaatgtgtagattctcatgtcccagccagacttacagaattggggtctgtatcttaacaagaaccccagatgatttgtgtacaaatgaaagttcgaaagctgtgctctggacagtgttctcaaagcaactttctgaagccgtgtggaaaactgactctgtgtgggtcccgtatccctgtggcatccagacctggcctctcttcatttcattattattggccaatatttctttcagccatttcatttcttatctattaaaatggcttgcccataaaggaactgcataggattatcccctgacattccaagagcaaaataaagctcttgagagtaattgttgtctcagtcatgcttgctgattacagttagcacaaaagaaaaattcagctgcctgacaatacaggaaatgttctcagatgctgatgtttgtaaggtccggtggggccatgaggaagaagaggagctgaaggtaagaaactcataaacaagatgactctttgatgcatgaacaagatttgaaaatctcaagcctgtaaagaatacccctgctatttaaataaagctcataccaagaggtaacattttgccccgggccaaattcaggggtctagtgccctgcattcctttgaggcaaaaaataaatgggctatgactggttaaatgtccaaaa

SEQ ID NO: 23201 - DNA, 2583 bp, Homo sapiens
  source 1..2583: mol_type = unassigned DNA
ctcctctgcccaatgtctcccaatctctttcctttctctcttcagttcctccaggtaattcttactcaaacttgtaccaacttgtttttgactgacagtgaacagtgagagagttttcttcattttgaggaaccctaaacacctatctttcccaaggcaacctgtctggactgagcatttctctgacttgacataacttcccatccagccaggagtctgcactcttcagtctttgcaggcagtagcagaatcccatggtagccaggtgggtgaaggggagcgaggacgttctacctgccttgaagaagacacctgacctgcggagtgagtgaccagtgtttccagagcctggcaatggatgccattcacatcggcatgtccagcacccccctggtgaagcacactgctggggctgggctcaaggccaacagaccccgcgtcatgtccaagagtgggcacagcaacgtgagaattgacaaagtggatggcatatacctactctacctgcaagacctgtggaccacagttatcgacatgaagtggagatacaaactcaccctgttcgctgccacttttgtgatgacctggttcctttttggagtcatctactatgccatcgcgtttattcatggggacttagaacccggtgagcccatttcaaatcataccccctgcatcatgaaagtggactctctcactggggcgtttctcttttccctggaatcccagacaaccattggctatggagtccgttccatcacagaggaatgtcctcatgccatcttcctgttggttgctcagttggtcatcacgaccttgattgagatcttcatcaccggaaccttcctggccaaaatcgccagacccaaaaagcgggctgagaccatcaagttcagccactgtgcagtcatcaccaagcagaatgggaagctgtgcttggtgattcaggtagccaatatgaggaagagcctcttgattcagtgccagctctctggcaagctcctgcagacccacgtcaccaaggagggggagcggattctcctcaaccaagccactgtcaaattccacgtggactcctcctctgagagccccttcctcattctgcccatgacattctaccatgtgctggatgagacgagccccctgagagacctcacaccccaaaacctaaaggagaaggagtttgagcttgtggtcctcctcaatgccactgtggaatccaccagcgctgtctgccagagccgaacatcttatatcccagaggaaatctactggggttttgagtttgtgcctgtggtatctctctccaaaaatggaaaatatgtggctgatttcagtcagtttgaacagattcggaaaagcccagattgcacattttactgtgcagattctgagaaacagcaactcgaggagaagtacaggcaggaggatcagagggaaagagaactgaggacacttttattacaacagagcaatgtctgatcacaggggcgccatccaggtttaaccctgcaagctgtttccacatcagaactcccttcaaacacaaagattgctgtgaaaacgaaaatgtgtagacgcactctcaaaaactgcacggacatacaaaatcaatcttttcctttgatcttgtggctaaaccagcatttctgtgtttgagagatttcctgttaggtgcttcgtctgaaagtgaactctcataattcaaattgtataaaataaagctacatttctaagagcttggtgtagggcaattggaataatgtcctgttagataaacagacatttagcaatcctgacattaaaaggaaatgtatttctatacaagattattagctgtaatacaagatatttatttaaccaatgaccttatggctgagagttgaattgtggttcagtattcattgatctcactgctttaaaacatgctctttttgttcaagcaggaaaaatattatatctaattatgtctatgtggtaatacctaaaaagaggtagagagactctatgttcacaaaatatagtaatttcatttttacctttcttcagtggactgaattgtatggaaggaaattgatcagatctgtaattcacaactgtggaaacctacacaaatggggctgatgccattgtttcctctattttattttatttatttttgaatccactatctctttccattcaaaatatttccattcaaaatgtggttcacagacccgccacatcagcaccatccgagagcttattagtaatgtgtagattctcatgtcccagccagacttacagaattggggtctgtatcttaacaagaaccccagatgatttgtgtacaaatgaaagttcgaaagctgtgctctggacagtgttctcaaagcaactttctgaagccgtgtggaaaactgactctgtgtgggtcccgtatccctgtggcatccagacctggcctctcttcatttcattattattggccaatatttctttcagccatttcatttcttatctattaaaatggcttgcccataaaggaactgcataggattatcccctgacattccaagagcaaaataaagctcttgagagtaa

SEQ ID NO: 23202 - DNA, 727 bp, Homo sapiens
  source 1..727: mol_type = unassigned DNA
actctctctctctgtctctcactttctctcctttcctccctccctccctccctccctccttccctatccctccctcctctgcccaatgtctcccaatctctttcctttctctcttcagttcctccaggtaattcttactcaaacttgtaccaacttgtttttgactgacagtgaacagtgagagagttttcttcattttgaggaaccctaaacacctatctttcccaaggcaacctgtctggactgagcatttctctgacttgacataacttcccatccagccaggagtctgcactcttcagtctttgcaggacaggtgggagttaaccaagaaagggagaaaatgaagaaccttcaggaaggaattcatgtgccagatgtgggctgagagggcacccagctgctcaggaaggggcagtagcagaatcccatggtagccaggtgggtgaaggggagcgaggacgttctacctgccttgaagaagacacctgacctgcggagtgagtgaccaggaatgtgggggaaatttatgtcagtcatcaggcaggtactagaagatgctaggggcctcacagacagcttgttcccggctgttaacatggagcagagcgttccctggggctgagcatgggagcccagcacttcttatagtgtttccagagcctggcaatggatgccattcacatcggcatgtccagcacccccctggtgaagcacactgctgggg

SEQ ID NO: 23203 - DNA, 521 bp, Homo sapiens
  source 1..521: mol_type = unassigned DNA
gcagtagcagaatcccatggtagccaggtgggtgaaggggagcgaggacgttctacctgccttgaagaagacacctgacctgcggatgtttccagagcctggcaatggatgccattcacatcggcatgtccagcacccccctggtgaagcacactgctggggctgggctcaaggccaacagaccccgcgtcatgtccaagagtgggcacagcaacgtgagaattgacaaagtggatggcatatacctactctacctgcaagacctgtggaccacagttatcgacatgaagtggagatacaaactcaccctgttcgctgccacttttgtgatgacctggttcctttttggagtcatctactatgccatcgcgtttattcatggggacttagaacccggtgagcccatttcaaatcataccccctgcatcatgaaagtggactctctcactggggcgtttctcttttccctggaatcccagacaaccattggctatggagtccgttccatcacagaggaatgt

SEQ ID NO: 23204 - DNA, 1115 bp, Homo sapiens
  source 1..1115: mol_type = unassigned DNA
gtggctcaagggctctgtccttggacacggatgagggcagctgggcggtgggaccgaggctctgcctgaatgctcagcttctgcaagctggggtggagagtgtgttcctgcctaccggctcagccagcacaggagcacgtagcctgcaggtgtgggttgtacacaggcttccccctgctgagtcagttccccagatctcttcatcacttccccagatctctgggatcttcagctgagattgggccccagcacctggactcaaggcagtagcagaatcccatggtagccaggtgggtgaaggggagcgaggacgttctacctgccttgaagaagacacctgacctgcggagtgagtgaccagtgtttccagagcctggcaatggatgccattcacatcggcatgtccagcacccccctggtgaagcacactgctggggctgggctcaaggccaacagaccccgcgtcatgtccaagagtgggcacagcaacgtgagaattgacaaagtggatggcatatacctactctacctgcaagacctgtggaccacagttatcgacatgaagtggagatacaaactcaccctgttcgctgccacttttgtgatgacctggttcctttttggagtcatctactatgccatcgcgtttattcatggggacttagaacccggtgagcccatttcaaatcataccccctgcatcatgaaagtggactctctcactggggcgtttctcttttccctggaatcccagacaaccattggctatggagtccgttccatcacagaggaatgtcctcatgccatcttcctgttggttgctcagttggtcatcacgaccttgattgagatcttcatcaccggaaccttcctggccaaaatcgccagacccaaaaagcgggctgagaccatcaagttcagccactgtgcagtcatcaccaagcagaatgggaagctgtgcttggtgattcaggtagccaatatgaggaagagcctcttgattcagtgccagctctctggcaagctcctgcagacccacgtcaccaaggagggggagcggattctcctcaaccaagccactgtcaaattccacgtggactcctcctctgagagcc

SEQ ID NO: 23205 - DNA, 711 bp, Homo sapiens
  source 1..711: mol_type = unassigned DNA
ggtgtttggagagcccggactggatgcccactagaatcctgtgctgtgaacagtgagagagttttcttcattttgaggaaccctaaacacctatctttcccaaggcaacctgtctggactgagcatttctctgacttgacataacttcccatccagccaggagtctgcactcttcagtctttgcaggagatgttggaaacagagactggatccctgaggagatgctgttagaccaggctgagctcaaggcttgtccctaaggcagctggtgaaggaaaggttcgacttggtggtagaagccctggactggagtccccacctatgggctgagggatcctccacaagtgattcaacttcttagtttctcacctacaaaaggtgggagttaaccaagaaagggagaaaatgaagaaccttcaggaaggaattcatgtgccagatgtgggctgagagggcacccagctgctcaggaaggggcagtagcagaatcccatggtagccaggtgggtgaaggggagcgaggacgttctacctgccttgaagaagacacctgacctgcggagtgagtgaccagtgtttccagagcctggcaatggatgccattcacatcggcatgtccagcacccccctggtgaagcacactgctggggctgggctcaaggccaacagaccccgcgtcatgtccaagagtgggcacagcaacgtgagaat

SEQ ID NO: 23206 - DNA, 595 bp, Homo sapiens
  source 1..595: mol_type = unassigned DNA
cgtcttcagaggaaggatagctgtacagcgtggtgaaggactcaatgagaagtgaacagtgagagagttttcttcattttgaggaaccctaaacacctatctttcccaaggcaacctgtctggactgagcatttctctgacttgacataacttcccatccagccaggagtctgcactcttcagtctttgcagataacttttaagtggtgaagagtataaatcgtggttttccaagtgtagtctaaggtctaacagcatcggggatatctgggaaattatcagaactacagaccctctggctgcaccccaaacctgctgaatcggaaattctgaggcagtagcagaatcccatggtagccaggtgggtgaaggggagcgaggacgttctacctgccttgaagaagacacctgacctgcggagtgagtgaccagtgtttccagagcctggcaatggatgccattcacatcggcatgtccagcacccccctggtgaagcacactgctggggctgggctcaaggccaacagaccccgcgtcatgtccaagagtgggcacagcaacgtgagaattgacaaagtggatggcatatacctac

SEQ ID NO: 23207 - DNA, 313 bp, Homo sapiens
  source 1..313: mol_type = unassigned DNA
cgtcttcagaggaaggatagctgtacagcgtggtgaaggactcaatgagaaggcagtagcagaatcccatggtagccaggtgggtgaaggggagcgaggacgttctacctgccttgaagaagacacctgacctgcggagtgagtgaccagtgtttccagagcctggcaatggatgccattcacatcggcatgtccagcacccccctggtgaagcacactgctggggctgggctcaaggccaacagaccccgcgtcatgtccaagagtgggcacagcaacgtgagaattgacaaagtggatggcatatacctac

SEQ ID NO: 23208 - DNA, 304 bp, Homo sapiens
  source 1..304: mol_type = unassigned DNA
cgtcttcagaggaaggatagctgtacagcgtggtgaaggactcaatgagaaggcagtagcagaatcccatggtagccaggtgggtgaaggggagcgaggacgttctacctgccttgaagaagacacctgacctgcggagtgagtgaccagagcctggcaatggatgccattcacatcggcatgtccagcacccccctggtgaagcacactgctggggctgggctcaaggccaacagaccccgcgtcatgtccaagagtgggcacagcaacgtgagaattgacaaagtggatggcatatacctac

SEQ ID NO: 23209 - DNA, 626 bp, Homo sapiens
  source 1..626: mol_type = unassigned DNA
cgtcttcagaggaaggatagctgtacagcgtggtgaaggactcaatgagaaggtgcattgcccatccttcagagagctctgtgtgaatccataaaaggtgcttaaagcttttcactccatgaagcctcatctgtctcatgaaagcaataaattgaacagtgagagagttttcttcattttgaggaaccctaaacacctatctttcccaaggcaacctgtctggactgagcatttctctgacttgacataacttcccatccagccaggagtctgcactcttcagtctttgcagataacttttaagtggtgaagagtataaatcgtggttttccaagtgtagtctaaggtctaacagcatcggggatatctgggaaattatcagaactacagaccctctggctgcaccccaaacctgctgaatcggaaattctgaggcagtagcagaatcccatggtagccaggtgggtgaaggggagcgaggacgttctacctgccttgaagaagacacctgacctgcggagtgagtgaccagtgtttccagagcctggcaatggatgccattcacatcggcatgtccagcacccccctggtgaagcacactgctggggctgggctcaaggccaaca

SEQ ID NO: 23210 - DNA, 740 bp, Homo sapiens
  source 1..740: mol_type = unassigned DNA
cgtcttcagaggaaggatagctgtacagcgtggtgaaggactcaatgagaaggtgcattgcccatccttcagagagctctgtgtgaatccataaaaggtgcttaaagcttttcactccatgaagcctcatctgtctcatgaaagcaataaatgtgtttggagagcccggactggatgcccactagaatcctgtgctgtgaacagtgagagagttttcttcattttgaggaaccctaaacacctatctttcccaaggcaacctgtctggactgagcatttctctgacttgacataacttcccatccagccaggagtctgcactcttcagtctttgcagataacttttaagtggtgaagagtataaatcgtggttttccaagtgtagtctaaggtctaacagcatcggggatatctgggaaattatcagaactacagaccctctggctgcaccccaaacctgctgaatcggaaattctgaggcagtagcagaatcccatggtagccaggtgggtgaaggggagcgaggacgttctacctgccttgaagaagacacctgacctgcggagtgagtgaccagtgtttccagagcctggcaatggatgccattcacatcggcatgtccagcacccccctggtgaagcacactgctggggctgggctcaaggccaacagaccccgcgtcatgtccaagagtgggcacagcaacgtgagaattgacaaagtggatggcatatacctac

SEQ ID NO: 23211 - DNA, 555 bp, Homo sapiens
  source 1..555: mol_type = unassigned DNA
cgtcttcagaggaaggatagctgtacagcgtggtgaaggactcaatgagaaggtgcattgcccatccttcagagagctctgtgtgaatccataaaaggtgcttaaagcttttcactccatgaagcctcatctgtctcatgaaagcaataaatataacttttaagtggtgaagagtataaatcgtggttttccaagtgtagtctaaggtctaacagcatcggggatatctgggaaattatcagaactacagaccctctggctgcaccccaaacctgctgaatcggaaattctgaggcagtagcagaatcccatggtagccaggtgggtgaaggggagcgaggacgttctacctgccttgaagaagacacctgacctgcggagtgagtgaccagtgtttccagagcctggcaatggatgccattcacatcggcatgtccagcacccccctggtgaagcacactgctggggctgggctcaaggccaacagaccccgcgtcatgtccaagagtgggcacagcaacgtgagaattgacaaagtggatggcatatacctac

SEQ ID NO: 23212 - DNA, 413 bp, Homo sapiens
  source 1..413: mol_type = unassigned DNA
cgtcttcagaggaaggatagctgtacagcgtggtgaaggactcaatgagaaggtgcattgcccatccttcagagagctctgtgtgaatccataaaaggtgcttaaagcttttcactccatgaagcctcatctgtctcatgaaagcaataaatgcagtagcagaatcccatggtagccaggtgggtgaaggggagcgaggacgttctacctgccttgaagaagacacctgacctgcggagtgagtgaccagtgtttccagagcctggcaatggatgccattcacatcggcatgtccagcacccccctggtgaagcacactgctggggctgggctcaaggccaacagaccccgcgtcatgtccaagagtgggcacagcaacgtgagaattgacaaagtggatggcatatacctac

SEQ ID NO: 23213 - DNA, 4002 bp, Homo sapiens
  source 1..4002: mol_type = unassigned DNA
tgtctggagcttttctttcctttattattaactaaagagcattctctaccattgcccagctgaaagcacctagctcatagattctctgtggggagagtgaataaagaatgggggattgaggcacagagtgttaaaatagtgagacacaggattctaactggcagactggcactttatctcaattcttaactgctgtgttgcctctcactttaaagacatccacattccaccctgggccttgcccgtctggtgagcccaatctctgctggtcagtcacgcagttgaggtcagggaaggagtaactcaagatgattttgatgttgcagttttaaatttcactttgacttgagctgggaaatcctttggcctattataccatggatgctaaaaatggttctaactgaaaacccaaaccaagaaatagcaacaagtctagaattcttactactacaaaactcacctggatccctaagggcacagcaaagaatgagctattacggcagcagctatcatattatcaatgcggacgcaaaatacccaggctacccgccagagcacattatagctgagaagagaagagcaagaagacgattacttcacaaagatggcagctgtaatgtctacttcaagcacatttttggagaatggggaagctatgtggttgacatcttcaccactcttgtggacaccaagtggcgccatatgtttgtgatattttctttatcttatattctctcgtggttgatatttggctctgtcttttggctcatagcctttcatcatggcgatctattaaatgatccagacatcacaccttgtgttgacaacgtccattctttcacaggggcctttttgttctccctagagacccaaaccaccataggatatggttatcgctgtgttactgaagaatgttctgtggccgtgctcatggtgatcctccagtccatcttaagttgcatcataaatacctttatcattggagctgccttggccaaaatggcaactgctcgaaagagagcccaaaccattcgtttcagctactttgcacttataggtatgagagatgggaagctttgcctcatgtggcgcattggtgattttcggccaaaccacgtggtagaaggaacagttagagcccaacttctccgctatacagaagacagtgaagggaggatgacgatggcatttaaagacctcaaattagtcaacgaccaaatcatcctggtcaccccggtaactattgtccatgaaattgaccatgagagccctctgtatgcccttgaccgcaaagcagtagccaaagataactttgagattttggtgacatttatctatactggtgattccactggaacatctcaccaatctagaagctcctatgttccccgagaaattctctggggccataggtttaatgatgtcttggaagttaagaggaagtattacaaagtgaactgcttacagtttgaaggaagtgtggaagtatatgcccccttttgcagtgccaagcaattggactggaaagaccagcagctccacatagaaaaagcaccaccagttcgagaatcctgcacgtcggacaccaaggcgagacgaaggtcatttagtgcagttgccattgtcagcagctgtgaaaaccctgaggagaccaccacttccgccacacatgaatatagggaaacaccttatcagaaagctctcctgactttaaacagaatctctgtagaatcccaaatgtagtcctaaattgcaattatgagggctaccactgaatcattttatctttcagccaatcaagtcgttgtaaacgtggcttttttgaaagtgttatggctatgttttatgatgatgctgggtaagtagagtaagttaaacttggtaaaagataatctaaaaattccatagttctcagttattaaaatttttcttgttcgccaattttgtattaagaatgctattaagcctaattgattaaaatttatcttttttattatcttacatgcttgtatcttcagttggaggtgtagtattcaaaaacggggaatgaaggcaggaaggaggctggaataaataaaaataaaaatagacaagtaagacagcataaataatacatttttaaacatgtcaacattgataatacaatgaagatttaccataaaaagtatcatatctaaccaagatatgcaaaagatgcattcagtaagctgtaacgttgagaaatgtaactgtgaaatcagctcaccagttcaagtcactaggtttgccacttggaccgtcttggtttcagcgagcatagcgagtggctgtaagaaattgtccatgccaccaattccactgctacttgcccaggtagtgatcagtgagagttagaagcaattttttctctaaccgatgaggcagaagaaaagttaacagtatttaaagcagcatttctctcttaacgttcctgggagactccaacaaatggagaccagaaacaaggcaaccacgaccttgctaggttctctgaggaggggactttctatgttcacgtcccaccttcttcgaggacatgaccaagggacaggatcatacagatgaggtgaggggatggttagcagcgataaacattctcagacccttggagagaaaccgttgctagcttgctggtcccgaaagattgcaactttggctgctacagaaaggatagaacctttttggggggagggtggggagggagatatttatttgtgcccagaagcagttatgtatgcttcttgtcttggttactgtacaagatacaaatgactcgagttgtggattgcaagaaactcttttattaaacttggaacaaccatttaaatgaaggattttgtgagatagaattcaattaaagcgatttgaatgcacagtaagtggataatctgagtacaatgaaatttcttaagttttagaacatgagataaagttgtatactctactttcatgttaaaatgttaatcatgattactttaagcccacatccactgagtaaagagtcactttaaactttataaatcaaagagatattaggaacattcagaattatttgtgttttgtttttgttttacattgttgctgcactggcaataagtatgtggcactgtttttatttgtttatgttatttaaatacacacccagacacacacacacacagtttttgctttttctggaaaatctttctttctcttctctctccatgaaaattaaaacacacaagtgaatgaagtaattacatagtccaagattagaaatacaagtaaaatatataggtataggtagatagagtgcctttctgtttcttttcttttcttttttctttttttgttcttccttcctttcttccctcctccccctcatccttccctttctccttcttttcccttttttttttttttttgacctgggagtaataaagttactttttaaatgcacgtatgcaatcttttattcctcttgttttatggataagagatttgttcaggtcaaaagttgcaaaactgttctgaagcttaatattagagacccaagtaagattgtttttagtcttgcttgaggaatgcacactccatttaaaaaattgtgcgctctgtagatttggattttacagcagcaattacttggctaaattagagtactgcaatcttgtaagtagaaaacagccaccatgacaataaacaaaaacacttaaaaatatttttagcttgttttacctacatctagtttcatttcatcttgctttgctttgttgactctgctaccgctgatgtttgccttgtcaatatcagaataggggcatcagtgtcccgtgaaatacattttgttgtgctatgagcctctgtaatcaaatgcttgtactcagaagagagtgtaaaatcagcatttctatgtaacatatatctctaattatctgtgtaattttataacatactttgacaaccccagtgagttacttaataataaagatcttaaaataatgc

SEQ ID NO: 23214 - DNA, 4009 bp, Homo sapiens
  source 1..4009: mol_type = unassigned DNA
gagaactcagtggcctttgtctgtggtgaatgtatccggaaaggcaaagaagagagagattctcctgtggggtttctcatctccatggcggtaggtgctgacagcttcagaagggtactaacagggccaagagaaaagggccctgagatgctcagctacggtgctcttacaagatgaaaaggacatggggttcagatctgcacttcatcatctttcactaagacatccacattccaccctgggccttgcccgtctggtgagcccaatctctgctggtcagtcacgcagttgaggtcagggaaggagtaactcaagatgattttgatgttgcagttttaaatttcactttgacttgagctgggaaatcctttggcctattataccatggatgctaaaaatggttctaactgaaaacccaaaccaagaaatagcaacaagtctagaattcttactactacaaaactcacctggatccctaagggcacagcaaagaatgagctattacggcagcagctatcatattatcaatgcggacgcaaaatacccaggctacccgccagagcacattatagctgagaagagaagagcaagaagacgattacttcacaaagatggcagctgtaatgtctacttcaagcacatttttggagaatggggaagctatgtggttgacatcttcaccactcttgtggacaccaagtggcgccatatgtttgtgatattttctttatcttatattctctcgtggttgatatttggctctgtcttttggctcatagcctttcatcatggcgatctattaaatgatccagacatcacaccttgtgttgacaacgtccattctttcacaggggcctttttgttctccctagagacccaaaccaccataggatatggttatcgctgtgttactgaagaatgttctgtggccgtgctcatggtgatcctccagtccatcttaagttgcatcataaatacctttatcattggagctgccttggccaaaatggcaactgctcgaaagagagcccaaaccattcgtttcagctactttgcacttataggtatgagagatgggaagctttgcctcatgtggcgcattggtgattttcggccaaaccacgtggtagaaggaacagttagagcccaacttctccgctatacagaagacagtgaagggaggatgacgatggcatttaaagacctcaaattagtcaacgaccaaatcatcctggtcaccccggtaactattgtccatgaaattgaccatgagagccctctgtatgcccttgaccgcaaagcagtagccaaagataactttgagattttggtgacatttatctatactggtgattccactggaacatctcaccaatctagaagctcctatgttccccgagaaattctctggggccataggtttaatgatgtcttggaagttaagaggaagtattacaaagtgaactgcttacagtttgaaggaagtgtggaagtatatgcccccttttgcagtgccaagcaattggactggaaagaccagcagctccacatagaaaaagcaccaccagttcgagaatcctgcacgtcggacaccaaggcgagacgaaggtcatttagtgcagttgccattgtcagcagctgtgaaaaccctgaggagaccaccacttccgccacacatgaatatagggaaacaccttatcagaaagctctcctgactttaaacagaatctctgtagaatcccaaatgtagtcctaaattgcaattatgagggctaccactgaatcattttatctttcagccaatcaagtcgttgtaaacgtggcttttttgaaagtgttatggctatgttttatgatgatgctgggtaagtagagtaagttaaacttggtaaaagataatctaaaaattccatagttctcagttattaaaatttttcttgttcgccaattttgtattaagaatgctattaagcctaattgattaaaatttatcttttttattatcttacatgcttgtatcttcagttggaggtgtagtattcaaaaacggggaatgaaggcaggaaggaggctggaataaataaaaataaaaatagacaagtaagacagcataaataatacatttttaaacatgtcaacattgataatacaatgaagatttaccataaaaagtatcatatctaaccaagatatgcaaaagatgcattcagtaagctgtaacgttgagaaatgtaactgtgaaatcagctcaccagttcaagtcactaggtttgccacttggaccgtcttggtttcagcgagcatagcgagtggctgtaagaaattgtccatgccaccaattccactgctacttgcccaggtagtgatcagtgagagttagaagcaattttttctctaaccgatgaggcagaagaaaagttaacagtatttaaagcagcatttctctcttaacgttcctgggagactccaacaaatggagaccagaaacaaggcaaccacgaccttgctaggttctctgaggaggggactttctatgttcacgtcccaccttcttcgaggacatgaccaagggacaggatcatacagatgaggtgaggggatggttagcagcgataaacattctcagacccttggagagaaaccgttgctagcttgctggtcccgaaagattgcaactttggctgctacagaaaggatagaacctttttggggggagggtggggagggagatatttatttgtgcccagaagcagttatgtatgcttcttgtcttggttactgtacaagatacaaatgactcgagttgtggattgcaagaaactcttttattaaacttggaacaaccatttaaatgaaggattttgtgagatagaattcaattaaagcgatttgaatgcacagtaagtggataatctgagtacaatgaaatttcttaagttttagaacatgagataaagttgtatactctactttcatgttaaaatgttaatcatgattactttaagcccacatccactgagtaaagagtcactttaaactttataaatcaaagagatattaggaacattcagaattatttgtgttttgtttttgttttacattgttgctgcactggcaataagtatgtggcactgtttttatttgtttatgttatttaaatacacacccagacacacacacacacagtttttgctttttctggaaaatctttctttctcttctctctccatgaaaattaaaacacacaagtgaatgaagtaattacatagtccaagattagaaatacaagtaaaatatataggtataggtagatagagtgcctttctgtttcttttcttttcttttttctttttttgttcttccttcctttcttccctcctccccctcatccttccctttctccttcttttcccttttttttttttttttgacctgggagtaataaagttactttttaaatgcacgtatgcaatcttttattcctcttgttttatggataagagatttgttcaggtcaaaagttgcaaaactgttctgaagcttaatattagagacccaagtaagattgtttttagtcttgcttgaggaatgcacactccatttaaaaaattgtgcgctctgtagatttggattttacagcagcaattacttggctaaattagagtactgcaatcttgtaagtagaaaacagccaccatgacaataaacaaaaacacttaaaaatatttttagcttgttttacctacatctagtttcatttcatcttgctttgctttgttgactctgctaccgctgatgtttgccttgtcaatatcagaataggggcatcagtgtcccgtgaaatacattttgttgtgctatgagcctctgtaatcaaatgcttgtactcagaagagagtgtaaaatcagcatttctatgtaacatatatctctaattatctgtgtaattttataacatactttgacaaccccagtgagttacttaataataaagatcttaaaataatgc

SEQ ID NO: 23215 - DNA, 3921 bp, Homo sapiens
  source 1..3921: mol_type = unassigned DNA
tgtctggagcttttctttcctttattattaactaaagagcattctctaccattgcccagctgaaagcacctagctcatagattctctgtggggagagtgaataaagaatgggggattgaggcacagagtgttaaaatagtgagacacaggattctaactggcagactggcactttatctcaattcttaactgctgtgttgcctctcactttaaaggagtaactcaagatgattttgatgttgcagttttaaatttcactttgacttgagctgggaaatcctttggcctattataccatggatgctaaaaatggttctaactgaaaacccaaaccaagaaatagcaacaagtctagaattcttactactacaaaactcacctggatccctaagggcacagcaaagaatgagctattacggcagcagctatcatattatcaatgcggacgcaaaatacccaggctacccgccagagcacattatagctgagaagagaagagcaagaagacgattacttcacaaagatggcagctgtaatgtctacttcaagcacatttttggagaatggggaagctatgtggttgacatcttcaccactcttgtggacaccaagtggcgccatatgtttgtgatattttctttatcttatattctctcgtggttgatatttggctctgtcttttggctcatagcctttcatcatggcgatctattaaatgatccagacatcacaccttgtgttgacaacgtccattctttcacaggggcctttttgttctccctagagacccaaaccaccataggatatggttatcgctgtgttactgaagaatgttctgtggccgtgctcatggtgatcctccagtccatcttaagttgcatcataaatacctttatcattggagctgccttggccaaaatggcaactgctcgaaagagagcccaaaccattcgtttcagctactttgcacttataggtatgagagatgggaagctttgcctcatgtggcgcattggtgattttcggccaaaccacgtggtagaaggaacagttagagcccaacttctccgctatacagaagacagtgaagggaggatgacgatggcatttaaagacctcaaattagtcaacgaccaaatcatcctggtcaccccggtaactattgtccatgaaattgaccatgagagccctctgtatgcccttgaccgcaaagcagtagccaaagataactttgagattttggtgacatttatctatactggtgattccactggaacatctcaccaatctagaagctcctatgttccccgagaaattctctggggccataggtttaatgatgtcttggaagttaagaggaagtattacaaagtgaactgcttacagtttgaaggaagtgtggaagtatatgcccccttttgcagtgccaagcaattggactggaaagaccagcagctccacatagaaaaagcaccaccagttcgagaatcctgcacgtcggacaccaaggcgagacgaaggtcatttagtgcagttgccattgtcagcagctgtgaaaaccctgaggagaccaccacttccgccacacatgaatatagggaaacaccttatcagaaagctctcctgactttaaacagaatctctgtagaatcccaaatgtagtcctaaattgcaattatgagggctaccactgaatcattttatctttcagccaatcaagtcgttgtaaacgtggcttttttgaaagtgttatggctatgttttatgatgatgctgggtaagtagagtaagttaaacttggtaaaagataatctaaaaattccatagttctcagttattaaaatttttcttgttcgccaattttgtattaagaatgctattaagcctaattgattaaaatttatcttttttattatcttacatgcttgtatcttcagttggaggtgtagtattcaaaaacggggaatgaaggcaggaaggaggctggaataaataaaaataaaaatagacaagtaagacagcataaataatacatttttaaacatgtcaacattgataatacaatgaagatttaccataaaaagtatcatatctaaccaagatatgcaaaagatgcattcagtaagctgtaacgttgagaaatgtaactgtgaaatcagctcaccagttcaagtcactaggtttgccacttggaccgtcttggtttcagcgagcatagcgagtggctgtaagaaattgtccatgccaccaattccactgctacttgcccaggtagtgatcagtgagagttagaagcaattttttctctaaccgatgaggcagaagaaaagttaacagtatttaaagcagcatttctctcttaacgttcctgggagactccaacaaatggagaccagaaacaaggcaaccacgaccttgctaggttctctgaggaggggactttctatgttcacgtcccaccttcttcgaggacatgaccaagggacaggatcatacagatgaggtgaggggatggttagcagcgataaacattctcagacccttggagagaaaccgttgctagcttgctggtcccgaaagattgcaactttggctgctacagaaaggatagaacctttttggggggagggtggggagggagatatttatttgtgcccagaagcagttatgtatgcttcttgtcttggttactgtacaagatacaaatgactcgagttgtggattgcaagaaactcttttattaaacttggaacaaccatttaaatgaaggattttgtgagatagaattcaattaaagcgatttgaatgcacagtaagtggataatctgagtacaatgaaatttcttaagttttagaacatgagataaagttgtatactctactttcatgttaaaatgttaatcatgattactttaagcccacatccactgagtaaagagtcactttaaactttataaatcaaagagatattaggaacattcagaattatttgtgttttgtttttgttttacattgttgctgcactggcaataagtatgtggcactgtttttatttgtttatgttatttaaatacacacccagacacacacacacacagtttttgctttttctggaaaatctttctttctcttctctctccatgaaaattaaaacacacaagtgaatgaagtaattacatagtccaagattagaaatacaagtaaaatatataggtataggtagatagagtgcctttctgtttcttttcttttcttttttctttttttgttcttccttcctttcttccctcctccccctcatccttccctttctccttcttttcccttttttttttttttttgacctgggagtaataaagttactttttaaatgcacgtatgcaatcttttattcctcttgttttatggataagagatttgttcaggtcaaaagttgcaaaactgttctgaagcttaatattagagacccaagtaagattgtttttagtcttgcttgaggaatgcacactccatttaaaaaattgtgcgctctgtagatttggattttacagcagcaattacttggctaaattagagtactgcaatcttgtaagtagaaaacagccaccatgacaataaacaaaaacacttaaaaatatttttagcttgttttacctacatctagtttcatttcatcttgctttgctttgttgactctgctaccgctgatgtttgccttgtcaatatcagaataggggcatcagtgtcccgtgaaatacattttgttgtgctatgagcctctgtaatcaaatgcttgtactcagaagagagtgtaaaatcagcatttctatgtaacatatatctctaattatctgtgtaattttataacatactttgacaaccccagtgagttacttaataataaagatcttaaaataatgc

SEQ ID NO: 23216 - DNA, 5363 bp, Homo sapiens
  source 1..5363: mol_type = unassigned DNA
gcgcactggagccctggccagcgcgcagccttcccggcgccggcgggctgggtcttgggaattctggtttgctttggctcactcgctttttacaaaccactggatcttacatgcctctgtaccccccacttccactccatgtccccatgctcctgcgccagcaacaggacatgttctctggatgtcagctgagtcattaaagtaactctgcatgtcagtagacagaccttggtagaaccacaaggctcccagagacacccatctctcctcatttttttggtgtgtgtgtcttcaccgaacattcaaaactgtttctccaaagcgttttgcaaaaactcagactgttttccaaagcagaagcactggagtccccagcagaagcgatgggcagtgtgcgaaccaaccgctacagcatcgtctcttcagaagaagacggtatgaagttggccaccatggcagttgcaaatggctttgggaacgggaagagtaaagtccacacccgacaacagtgcaggagccgctttgtgaagaaagatggccactgtaatgttcagttcatcaatgtgggtgagaaggggcaacggtacctcgcagacatcttcaccacgtgtgtggacattcgctggcggtggatgctggttatcttctgcctggctttcgtcctgtcatggctgttttttggctgtgtgttttggttgatagctctgctccatggggacctggatgcatccaaagagggcaaagcttgtgtgtccgaggtcaacagcttcacggctgccttcctcttctccattgagacccagacaaccataggctatggtttcagatgtgtcacggatgaatgcccaattgctgttttcatggtggtgttccagtcaatcgtgggctgcatcatcgatgctttcatcattggcgcagtcatggccaagatggcaaagccaaagaagagaaacgagactcttgtcttcagtcacaatgccgtgattgccatgagagacggcaagctgtgtttgatgtggcgagtgggcaatcttcggaaaagccacttggtggaagctcatgttcgagcacagctcctcaaatccagaattacttctgaaggggagtatatccctctggatcaaatagacatcaatgttgggtttgacagtggaatcgatcgtatatttctggtgtccccaatcactatagtccatgaaatagatgaagacagtcctttatatgatttgagtaaacaggacattgacaacgcagactttgaaatcgtggtcatactggaaggcatggtggaagccactgccatgacgacacagtgccgtagctcttatctagcaaatgaaatcctgtggggccaccgctatgagcctgtgctctttgaagagaagcactactacaaagtggactattccaggttccacaaaacttacgaagtccccaacactcccctttgtagtgccagagacttagcagaaaagaaatatatcctctcaaatgcaaattcattttgctatgaaaatgaagttgccctcacaagcaaagaggaagacgacagtgaaaatggagttccagaaagcactagtacggacacgccccctgacatagaccttcacaaccaggcaagtgtacctctagagcccaggcccttacggcgagagtcggagatatgactgactgattccttctctggaatagttactttacaacacggtctgttggtcagaggcccaaaacagttatacagatgacggtactggtcaagatgggtcaagcaagcggccacaagggactgaggcaagcacaatggtttcaaagaaagactgtaagctccatgattagcataaagcactaaccatgtctccatgtgacccgatggcacatagatgttgtagaataagttatgggtttttatgttttgttttgtgtttttccaaaacttgaacttgcaggcaagccttggttgggtatttgatttatccagaatgcttctctttagggaacaaggatgtttttaatggcataacaaaggcaagactctgccttaatttttgaaaagctgctaactacatgaacacaaatgtgtatttttgttgcagtgtagttttccttttgtgtaattttaaagtcagtgttgaattttattgaaagctcatgatgcgcttcaaagtggcaagtatttggctattaactgccaaaacaagagcctgattttttgaggccagtaattcgtttgctagaattgattttttttctctctctctttgttacataagggcattatgtaacactagccgaatggtagcctctgggttgttgtttttttcttttcctccatgatgttaatgggttatctcaaattttaagttaaactacctaaaataaataccaaagataatgcatatttttgcacagtggagcttacacttaaaagaaaacaaagccccatgggctgccttgaaatcaagagacaataactttgaacctcagcaagaccttgaaccgccggttcattttgcaccttattcagaaaatagagcatcatactcaccgagtctagtcagtgtagtgcttttaaaaattttgtcctttcatgtaacttttttattttaagaggaagaagaagaaaggggcacacacacacaataccgacgtctatcctttcctgctaggcagtgctggccaggctcatgtgtagtgtgcgagatggtgatgtactcttatatttttctgggcttttccttttgcacattccaaaattcatttcataagacaagatcttcataggacctccttggcatcctggcattctcaaaactgagccatccagcatgaaagataaatgggtttaaacccttgctgctgaatttattgcctggactgtcaggacatcaccagcccaccttcaccttagggaagatgccacacctggcctccacacttgctcttctgatcagtctgtctggattgagtcctacagtgtcagatagggcggcaaatgccaaagcagggaaacagggaggtgtggacaagccagtttgatgcagcacttcagatcaagtgcttaggaaggagaggaaacttgccttttttatggcagaggatagtaatgaaaatgtctcagtattttagggtcaatgagagccataaaaatataacataatcacaagtaaaggagataatggtctaaaacagctatttcccttttctgtgtgcatacttatgactgaatgtgagctaagcattttctcctgtggagccctagagcaggttactaaggaaggacacattgttttccagaagcctcccctgcctggctgactgccttgctagaaacataattttttttttctcactgaagctcaataatggaactctttttttttttttttttaatttaaagttccctatttgtgaattctgggattactgacttttctttttaattggagtctcaaaatcaactctcttatggtattatatctctgtatgccattaaaaaacagcttgttctagaatcatgtattttgtaaactgatgtttgtgatggtctctggttcttgaacagccatatctgaatgccgtgcctgcaaaactatgacaatttttgctgttttcagccttcagatttgatggcttgggaaactgaggtgttattttcaatgaaacaaagaaagagatgttaagcaagtggttgttttagatccaaatgtaaaggcaggtttgggaaggtgtttaaagagttggaggaattggggattgagttgtaaagaaaacttacagaagaggcaacaatttggttcttgacagtgagaggatattgagggcttcagctgctgctattatgatgttttgcaaaggaaaataatcaaaccaaagagtattcagtgatatgtaaattaaatgaagatacagtggagaatgggggtgaccacaaaagaggctccccctaaacacacagtgctgccacttaaaaagacttgagaaatttgaaagggggtgggtatggggggggcaagaaagagggagggaaatctttcaacttatttctgaaaaagagaaaaaaatataaaatttctggtgcacaggtttgttttttcaagaaaattttgcagaagctatgtttttaaagtgtacattttataaagtttatcagatattttcatatttaaagccaaatgtaaatagaggtctgtaaagaaaaataattgccatagaaagtataatttcagtgcagtaatttctgagagctagtacctatatgctaccggttagcatggttttagcaaatatataccagccttataaggttcgtattgctatgttcttctgttatttatttcagcatggactgttcatttgaaacctttttctagttattagcgttttaacagttacaagctttaaatggcaattttttttttttttttttttttttttttttttttgtcaagagccaagacacaggtaatgcacgacattgattgctgcattttaccttcaaaatatttgtccttattgactgggtctccttaattaatgtacacatgtcattagaatgcagacggaggggactcaccatgaatatctggggttgattcccagatgtgtgttgcttctctattgcaagcagattccctgttggatttacttcggatttattcccttttaaagaatttttgcccatatctggaagggcactatatttttgggaggagccatagattcctggttatcctatttttaaacaaaatgtagacaaagtgaactctattttgattattgagaaaggagtagttttctatccctctaagagtatacttgaatcagacattttaaggatgtcactatggcactgttgtcatttccaaattcctagaaaagtttgttttactttgtttttattctgttaatgcattctttcttctctttacttcctttcttaccagtacactcctatctcaactctgtttatttgatgagttctgtcccgtaaatcatatttcccttacaattaataaatgtcacttcatattttataataaaccactcagtaaaagcaaaagcttgtcctgagaagtagagtgagttctttttcactctgtgtctaataatgttaaggtgggaaaaaaaaaagtgtggcatagctacctgcccatccccaaccctcagcaaagtagaatctcttttctggtaattttgggtttccgctctgggctctggcaagttgaacaatcctagccattgacaatcgtgatagttattattttcccatttgctgtctttttgtatctaaagtcttcctattgtactgcacaaaccatggattgtacatatttttatatattatgtcttattttattatttct

SEQ ID NO: 23217 - DNA, 1685 bp, Homo sapiens
  source 1..1685: mol_type = unassigned DNA
tgggaggcgctgaagcgagggcagatctgagtgtctgtaggagttgctattccaaaaaaaatcattactctctaattgttctgattttagatcagcaaagcgtgccgggcggtggtggagagactgagggcggacaaggcgagagggaacgagccgtccacccttcggagaagcctaggcgccttgacatgttctctggatgtcagctgagtcattaaagtaactctgcatgtcagtagacagaccttggtagaaccacaaggctcccagagacacccatctctcctcatttttttggtgtgtgtgtcttcaccgaacattcaaaactgtttctccaaagcgttttgcaaaaactcagactgttttccaaagcagaagcactggagtccccagcagaagcgatgggcagtgtgcgaaccaaccgctacagcatcgtctcttcagaagaagacggtatgaagttggccaccatggcagttgcaaatggctttgggaacgggaagagtaaagtccacacccgacaacagtgcaggagccgctttgtgaagaaagatggccactgtaatgttcagttcatcaatgtgggtgagaaggggcaacggtacctcgcagacatcttcaccacgtgtgtggacattcgctggcggtggatgctggttatcttctgcctggctttcgtcctgtcatggctgttttttggctgtgtgttttggttgatagctctgctccatggggacctggatgcatccaaagagggcaaagcttgtgtgtccgaggtcaacagcttcacggctgccttcctcttctccattgagacccagacaaccataggctatggtttcagatgtgtcacggatgaatgcccaattgctgttttcatggtggtgttccagtcaatcgtgggctgcatcatcgatgctttcatcattggcgcagtcatggccaagatggcaaagccaaagaagagaaacgagactcttgtcttcagtcacaatgccgtgattgccatgagagacggcaagctgtgtttgatgtggcgagtgggcaatcttcggaaaagccacttggtggaagctcatgttcgagcacagctcctcaaatccagaattacttctgaaggggagtatatccctctggatcaaatagacatcaatgttgggtttgacagtggaatcgatcgtatatttctggtgtccccaatcactatagtccatgaaatagatgaagacagtcctttatatgatttgagtaaacaggacattgacaacgcagactttgaaatcgtggtcatactggaaggcatggtggaagccactgccatgacgacacagtgccgtagctcttatctagcaaatgaaatcctgtggggccaccgctatgagcctgtgctctttgaagagaagcactactacaaagtggactattccaggttccacaaaacttacgaagtccccaacactcccctttgtagtgccagagacttagcagaaaagaaatatatcctctcaaatgcaaattcattttgctatgaaaatgaagttgccctcacaagcaaagaggaagacgacagtgaaaatggagttccagaaagcactagtacggacacgccccctgacatagaccttcacaaccaggcaagtgtacctctagagcccaggcccttacggcgagagtcggagatatga

SEQ ID NO: 23218 - DNA, 5021 bp, Homo sapiens
  source 1..5021: mol_type = unassigned DNA
caggcaggtaaaggcagcttcttaggcagccagcgagttggcaggtgggttgggactcgcttgtcaactcattaattttaagcagtcagtttgggggtactgcaggataatcaggagggccgtggggagtcaagaggtgacccgggatgccggtggtggggaaagaaaagaggagcctctggaagcttggaggcaaaattgcgcttgggttcctgttccttgcatccctcctggcttgagtgcgggagaacactttttaaagactcaccttggaaagaaggcctccgtcccaggggagaaggagaggcgtctgcagggggcagagaccgcagctacctgccgggtgcgccccccacccaggagcgctcgcttcgccccctttcctcccccgcccccacctccttattggtgctagtttgcagcgcccagctcctgcgccttcgcttcgcgtttgaatctggctcgccccttcgtattatgtctgcactccgaaggaaatttggggacgattatcaggtagtgaccacatcgtccagcggctcgggcttgcagccccaggggccaggccaggaccctcagcagcagcttgtgcccaagaagaagcggcagcggttcgtggacaagaacggccggtgcaatgtacagcacggcaacctgggcagcgagacaagccgctacctctcggacctcttcaccacgctggtggacctcaagtggcgctggaacctcttcatcttcattctcacctacaccgtggcctggcttttcatggcgtccatgtggtgggtgatcgcctacactcggggcgacctgaacaaagcccacgtcggtaactacacgccttgcgtggccaatgtctataacttcccttctgccttcctcttcttcatcgagacggaggccaccatcggctatggctaccgatacatcacagacaagtgccccgagggcatcatcctcttcctcttccagtccatcctgggctccatcgtggacgccttcctcatcggctgcatgttcatcaagatgtcccagcccaagaagcgcgccgagaccctcatgttcagcgagcacgcggtgatctccatgagggacggaaaactcacgcttatgttccgggtgggcaacctgcgcaacagccacatggtctccgcgcagattcgctgcaagctgctcaaatctcggcagacacctgagggtgagttccttccccttgaccaacttgaactggatgtaggttttagtacaggggcagatcaactttttcttgtgtcccccctcacaatttgccacgtgatcgatgccaaaagccccttttatgacctatcccagcgaagcatgcaaactgaacagttcgagattgtcgtcatcctagaaggcattgtggaaacaactgggatgacttgtcaagctcgaacatcatatactgaagatgaagttctttggggtcatcgtttttttcctgtaatttccttagaagagggattctttaaagttgattactcccagttccatgcaacatttgaagtccccaccccaccttacagtgtgaaagagcaggaggaaatgcttctcatgtcgtcccctttaatagcaccagccataactaacagcaaagaaagacataattctgtggaatgcttagatggactagatgatattactacaaaactaccatctaagctgcagaaaattactggaagagaagactttcccaaaaaactcttgaggatgagttctacaacttcagaaaaagcctacagcttgggagacttgcccatgaaacttcaacgaataagttcagttccgggcaactcagaagaaaaactggtatctaaaaccaccaagatgttatctgatcccatgagccagtctgtggctgatttgccaccaaagcttcaaaagatggctggaggagcagctaggatggaagggaaccttccagccaaattaagaaaaatgaactctgatcgcttcacataacaaagcactcccttaggcattatttaatgtttgatttagtaatagtccaatatttggcgatgaggtaattctccctaaggaatctgaaagtatattttcctcccagttctacaagcatatttgagaacccttcctttcccaagtattgcgaatgtgcagaaagcaacagttacggagggaggacatcataaggaagttattaacgggcatgtattatcacatcaagcatgcaataatgtgcaaattttgcatttagttttatggcatgatttatatatggcatatttatattgtatattctggaaaaaaaatatatatatatatttaaaggggagatactctccctgacatttctaacatatgtattaagccaaacatgagtgaatagctttcagggcgataaaactaaatatatgtctgtgtgtgtgtgtgtatgtatacacacatatacatatatatatacacatacatacacatacatacatacatacatatatatctgataaaattgtgatgttttgttcaaagttgtagttcttgtgcatgtttactttattagagtaggaaggctactggcattaattattaataccaaatattttagccttaaatttttgtcattttaaaatctgatttaatgttttctgctgtttaaggtcttgggaggctttcaattgtattttatatgagagaatcacacaagtttgtgctatctatggccctgcaaaaatataaccattacatgtttaaattgtaaattttagagcataccagtactcagtatagcattgaacatttcttatgatttttaaaagttgctagtactggggagaaataattgttgattaatttgagaattattcctttcctagactaattaaaatctggaaatctgttttgtatatgatctaatacaaagatgagctctgaacaaacactgaatcatgttaatagacagtagccaagttatattgaatatatcagaatctgtgtgaagttacacaattaattgtccctgtttcaaactgagtaaattggaaacattttctttctttttctggaaattttgtccattttaaaaaccaatcattttaagaagacatgacaatgcaatgaaacagatgataaatatttatgcttaaaatatgtatgtctaattgagtctcttttttattctgttttcttgtttatggcatttgttgtaacaggatagactttttcctcacctaggaaacctatcccatgcctgtcacttatagttcaggaggaagtttttgcacagaccagagagaaattaaaattagatgataaattgaagatatcttacacacagttttttggtgaacactgattttattggtgtcttagatccctagtctacccaaataattttaacagtactgttttttctaatcctgaagtctgatatttatgactcattagcaggaatcaaaactagtgatcagtagaacactttcaaaataaaaatttggaatgcagacttttatgaaaatttaaaagtgctccttaacagaatatcatgggttttcctataaaacttctttaagtattgtaattccagtctgccccaactttaaaaaaaattcttattaatatgtcagtcattaattgctagtttgggctctcattatttcctgttttttaacaattttgtgataattttattattggcaaattaatacatcaacacttaaatcattgactataataataccttctggctacctctgtatcaaccaaattctgtaggtgcaaacatataccagggaattcttactggcaaaatgatcaatctggagtgtgcatccactgtgaatggagcaaattgccctatacccattgataacctagctttcttagtttgtagatgtaggaaacaaaatagtgacagagagagaagggggtccacagggcatggtatatttatcagcagtggaaaaaaagtgcatagatcatttagtccaagaacttaaaactaaatagagccataatttactttggagagtcattttaatttgtctttggtaccaaggagaagacggaaccaaaaacaaactctccaagtatattcacacattcaacaaaatttttgcatgccttctatgtcgtaggcatttttagttcctggggatttggacatggctaagtcagagaaggccattgctcaccatgaacactgtataccagaaggagagtggggaggagacaaaaaacaaataagaccacttcagacaatcaaagtatcagttaagagaatgaaaacaggcctgactcagtggctcacgcctgtaatcccagtactttgggaggcggaggttgggggatcacctgaggtcaggagatcgagaccagcctggacaacatggtgaaaacccgtctctactaaaaatacaaaaattaactgggcatggtggcaggcacctgtaatcccagctactggggaagctgaggcaggagaatcgtttgaacctgggaggcggaggttgcagtgagccaagattctgccactgcactccagcctgggtgacagtgcgagactccatctcaacatcaaaaaaaaaaaaaaaaaaaaaaaaaaaaaaaaaaaaaaaaagaataaaaacagggtaacataatgcaaagtaactgtgtggaataaaaattgattattttagaaaatgtgactggcttaggacggggataatatgtgaacagaaatctatctcatgagaaagtgctactgttgtcaaaattaccttatctgagtgaatggtattttttttatcttttccacacatgcgtgggaaaggtatgatttctgcatgtaattgcagtttaacccttatttctaggttgatcataggtcccagtttacccaggaaaattccagtttatacctgttgtacctgtgtaattattggtagcactccctttcactcttacaatgtcttggtttggatgatatatggtgaagtttttgttgaaactaaattatgaagtctgatatatttggataaaaataaagaattgcttttctt

SEQ ID NO: 23219 - DNA, 1095 bp, Homo sapiens
  source 1..1095: mol_type = unassigned DNA
attggtgctagtttgcagcgcccagctcctgcgccttcgcttcgcgtttgaatctggctcgccccttcgtattatgtctgcactccgaaggaaatttggggacgattatcaggtagtgaccacatcgtccagcggctcgggcttgcagccccaggggccaggccaggaccctcagcagcagcttgtgcccaagaagaagcggcagcggttcgtggacaagaacggccggtgcaatgtacagcacggcaacctgggcagcgagacaagccgctacctctcggacctcttcaccacgctggtggacctcaagtggcgctggaacctcttcatcttcattctcacctacaccgtggcctggcttttcatggcgtccatgtggtgggtgatcgcctacactcggggcgacctgaacaaagcccacgtcggtaactacacgccttgcgtggccaatgtctataacttcccttctgccttcctcttcttcatcgagacggaggccaccatcggctatggctaccgatacatcacagacaagtgccccgagggcatcatcctcttcctcttccagtccatcctgggctccatcgtggacgccttcctcatcggctgcatgttcatcaagatgtcccagcccaagaagcgcgccgagaccctcatgttcagcgagcacgcggtgatctccatgagggacggaaaactcacgcttatgttccgggtgggcaacctgcgcaacagccacatggtctccgcgcagattcgctgcaagctgctcaaaggatgacttgtcaagctcgaacatcatatactgaagatgaagttctttggggtcatcgtttttttcctgtaatttccttagaagagggattctttaaagttgattactcccagttccatgcaacatttgaagtccccaccccaccttacagtgtgaaagagcaggaggaaatgcttctcatgtcgtcccctttaatagcaccagccataactaacagcaaagaaagacataattctgtggaatgcttagatggactagatgatattactacaaaactaccatctaagctgcagaaaattactggaagagaagactttccc

SEQ ID NO: 23220 - DNA, 2065 bp, Homo sapiens
  source 1..2065: mol_type = unassigned DNA
gggagcggcgcgggacggccgggacgcgcggagaccccaagacccacgcgcagaccgagcggcagccggggaggggagcgcgggccggccggccgagttcgcgggcagggggcgccgggactcccctttccgcgcccgggacgccgcccgccggatcgcgccttgggatgtagcgcccgctcgccgcctcccggactctcgtcggaccctccgcccagcggccctgcgtcttcccaggtgaccacgccggcttcaggacatgcacggacacagccgcaacggccaggcccacgtgccccggcggaagcgccgcaaccgcttcgtcaagaagaacggccaatgcaacgtgtacttcgccaacctgagcaacaagtcgcagcgctacatggcggacatcttcaccacctgcgtggacacgcgctggcgctacatgctcatgatcttctccgcggccttccttgtctcctggctctttttcggcctcctcttctggtgtatcgccttcttccacggtgacctggaggccagcccaggggtgcctgcggcggggggcccggcggcgggtggtggcggagcagccccggtggcccccaagccctgcatcatgcacgtgaacggcttcctgggtgccttcctgttctcggtggagacgcagacgaccatcggctatgggttccggtgcgtgacagaggagtgcccgctggcagtcatcgctgtggtggtccagtccatcgtgggctgcgtcatcgactccttcatgattggcaccatcatggccaagatggcgcggcccaagaagcgggcgcagacgttgctgttcagccaccacgcggtcatttcggtgcgcgacggcaagctctgcctcatgtggcgcgtgggcaacctgcgcaagagccacattgtggaggcccacgtgcgggcccagctcatcaagccctacatgacccaggagggcgagtacctgcccctggaccagcgggacctcaacgtgggctatgacatcggcctggaccgcatcttcctggtgtcgcccatcatcattgtccacgagatcgacgaggacagcccgctttatggcatgggcaaggaggagctggagtcggaggactttgagatcgtggtcatcctggagggcatggtggaggccacggccatgaccacccaggcccgcagctcctacctggccagcgagatcctgtggggccaccgctttgagcctgtggtcttcgaggagaagagccactacaaggtggactactcacgttttcacaagacctacgaggtggccggcacgccctgctgctcggcccgggagctgcaggagagtaagatcaccgtgctgcccgccccaccgccccctcccagtgccttctgctacgagaacgagctggcccttatgagccaggaggaagaggagatggaggaggaggcagctgcggcggccgcggtggccgcaggcctgggcctggaggcgggttccaaggaggaggcgggcatcatccggatgctggagttcggcagccacctggacctggagcgcatgcaggcttccctcccgctggacaacatctcctaccgcagggagtctgccatctgacctccaggcccggccctcaccactgcccacaagagcctctgccgggggtgggatgccaggacaccccctcccacactcaggacagagccaaccctggctccgtggaccttctggaggaaggtgggggtttcaaagactgggggaccccttcctcctgactccagcacccaggcctgggaagagctcggccccgatcagcctgagttccgccagcgcctacttctggtggctctaggtccccggatccaccacccttcccccactgactcttcaaggacgtgccctctttgctctcagaaccttggggaaggtggctggactgctgggcgggggacatctcggggtttcagggtgggcagggggttagtttggggaggggggggtgcgtttcttttgcatgactgtggcctgttgctcatgactttcttttgtaaatatctataaatggagacagatggagacaccaaa

SEQ ID NO: 23221 - DNA, 1734 bp, Homo sapiens
  source 1..1734: mol_type = unassigned DNA
gagagagattgttccagctgctctcgctagagaaagggagtgacccaaggggccgcgagtgaagggacaggatggcttaggtacctctgcccacaggaccccacaacagggagaggttccagctacagctcctccgtggggtcatggcaggggctggggagtcccctcaaaagccctgagcccccctgcaccgccgctaagggacaccccagaagttagcatcagtgggactcggaagctccgatctcaacaaggccagaagctcatagaactttctgaagggagcaggtcatcagccttagcatgagccccggagcatcagtgtctgctggccgttgtgtgcatcccagctatggctggcgattctaggaatgccatgaaccaggacatggagattggagtcactccctgggaccccaagaagattccaaaacaggcccgcgattatgtccccattgccacagaccgtacgcgcctgctggccgagggcaagaagccacgccagcgctacatggagaagagtggcaagtgcaacgtgcaccacggcaacgtccaggagacctaccggtacctgagtgacctcttcaccaccctggtggacctcaagtggcgcttcaacttgctcgtcttcaccatggtttacactgtcacctggctgttcttcggcttcatttggtggctcattgcttatatccggggtgacctggaccatgttggcgaccaagagtggattccttgtgttgaaaacctcagtggcttcgtgtccgctttcctgttctccattgagaccgaaacaaccattgggtatggcttccgagtcatcacagagaagtgtccagaggggattatactcctcttggtccaggccatcctgggctccatcgtcaatgccttcatggtggggtgcatgtttgtcaagatcagccagcccaagaagagagcggagaccctcatgttttccaacaacgcagtcatctccatgcgggacgagaagctgtgcctcatgttccgggtgggcgacctccgcaactcccacatcgtggaggcctccatccgggccaagctcatcaagtcccggcagaccaaagagggggagttcatccccctgaaccagacagacatcaacgtgggctttgacacgggcgacgaccgcctcttccttgtgtctcctctgatcatctcccatgagatcaaccagaagagccctttctgggagatgtctcaggctcagctgcatcaggaagagtttgaagttgtggtcattctagaagggatggtggaagccacaggcatgacctgccaagcccggagctcctacatggatacagaggtgctctggggccaccgattcacaccagtcctcaccttggaaaagggcttctatgaggtggactacaacaccttccatgatacctatgagaccaacacacccagctgctgtgccaaggagctggcagaaatgaagagggaaggccggctcctccagtacctccccagccccccactgctggggggctgtgctgaggcagggctggatgcagaggctgagcagaatgaagaagatgagcccaaggggctgggtgggtccagggaggccaggggctcggtgtgaggggtgcagcctccctaagacctcctgtcactggcttcagtgaacacagacactgcagagcctgggagcaggggaggggaatagttgagtgtgctgtttgggggctcaggagccatcaaggc

SEQ ID NO: 23222 - DNA, 5940 bp, Homo sapiens
  source 1..5940: mol_type = unassigned DNA
atttgtaccagggacggagggagagaggagagggaggaggggacacacacacacacacacacacacacacacacacacacacacacagagagagagagagagagagagagagagagagagattgttccagctgctctcgctagagaaagggagtgacccaaggggccgcgagtgaagggacaggatggcttaggtacctctgcccacaggaccccacaacagggagaggttccagctacagctcctccgtggggtcatggcaggggctggggagtcccctcaaaagccctgagcccccctgcaccgccgctaagggacaccccagaagttagcatcagtgggactcggaagctccgatctcaacaacatcccagctatggctggcgattctaggaatgccatgaaccaggacatggagattggagtcactccctgggaccccaagaagattccaaaacaggcccgcgattatgtccccattgccacagaccgtacgcgcctgctggccgagggcaagaagccacgccagcgctacatggagaagagtggcaagtgcaacgtgcaccacggcaacgtccaggagacctaccggtacctgagtgacctcttcaccaccctggtggacctcaagtggcgcttcaacttgctcgtcttcaccatggtttacactgtcacctggctgttcttcggcttcatttggtggctcattgcttatatccggggtgacctggaccatgttggcgaccaagagtggattccttgtgttgaaaacctcagtggcttcgtgtccgctttcctgttctccattgagaccgaaacaaccattgggtatggcttccgagtcatcacagagaagtgtccagaggggattatactcctcttggtccaggccatcctgggctccatcgtcaatgccttcatggtggggtgcatgtttgtcaagatcagccagcccaagaagagagcggagaccctcatgttttccaacaacgcagtcatctccatgcgggacgagaagctgtgcctcatgttccgggtgggcgacctccgcaactcccacatcgtggaggcctccatccgggccaagctcatcaagtcccggcagaccaaagagggggagttcatccccctgaaccagacagacatcaacgtgggctttgacacgggcgacgaccgcctcttccttgtgtctcctctgatcatctcccatgagatcaaccagaagagccctttctgggagatgtctcaggctcagctgcatcaggaagagtttgaagttgtggtcattctagaagggatggtggaagccacaggcatgacctgccaagcccggagctcctacatggatacagaggtgctctggggccaccgattcacaccagtcctcaccttggaaaagggcttctatgaggtggactacaacaccttccatgatacctatgagaccaacacacccagctgctgtgccaaggagctggcagaaatgaagagggaaggccggctcctccagtacctccccagccccccactgctggggggctgtgctgaggcagggctggatgcagaggctgagcagaatgaagaagatgagcccaaggggctgggtgggtccagggaggccaggggctcggtgtgaggggtgcagcctccctaagacctcctgtcactggcttcagtgaacacagacactgcagagcctgggagcaggggaggggaatagttgagtgtgctgtttgggggctcaggagccatcaaggctgtggggaggaaccataaacccagccctcacagctcccagcacagggcctccctgagccagtggcatcctgcctgggccccccatggcagtgctgcctcttgtaggtgctggctaagggccaggccaggatgagtttccccatggtgaatgttaccggatggcatctgttctctccatgccctgggtcacttccttttttgggtctcacagacccctccaggggctgacacctagagagaaccatcaccttgtccctcattccttccaccctgaggcttgctgtggactcagagaggagacttacctgatgagagctcaaacctctagtctgggatgagctcacagagccctcatgagttaagatccatccatatcacataggcaattccttttaaatcagataccaacgacccattactgagaggtacagagcgtacagcccttggtgttctctgctgttatctgccaaatgtgtgtgtttttcctctgctgtgttctgtgtgtccagtgtagcctattggagaatcggtctcattagagtgactcttagaaggtggcctgggactagacagcccctctgagcacatgcatagtggcatcagcagcttcctggcctactcccaatcacactgtgccctgcacctcccaccaagggggaaccccagcagctggggcttttcgagtgctttttggcccaagaatctcagagtgcttctaatcatcacagtagtttttgtgttttgttttgttttgttttgttttgttttgttttgttttgtttttttcacaatctcagccagcctgcggtgtgacctggggagaaagttgagtgtcaggggacatgatgagccagttggccctgaaacaggaatggggcaaagagaaaggagagccaggagcatttaaaaatcagcatctgggccaggcaagatggctcacgcctgtgatcccagcattttgggaggccgaggcgggtggatcatgaggtcaggagatcgagaccatcctggctaacacggtgaaaccccgtctctactgaaaatacaaaaaattagccaggcatggtggcaggtgcctgtagtcccagctactcgggaagctgaggcagaagaatggcatgaacctgggaggtggaggttgcagtgagccaagatcatgccactgcactccagcctgggcgacagagcgagactccatctcaaaaaaaaaaaaaacatcagcatctgccccagttgtggccaagacactctgacctcagggctcagcaccttcaccatcaagttcagcctgagccaagctcccagcccactgctgaaaagcccctgggcctccctccacaggcagagttacaaccgggagggctgggcagggagggcagggagattgcctggggaaggcaaagggaatggctgcccctcccaggctggaaacaagagggcaagcggggtcagcaggagaattcgggggcagggtgagtgttaagaaaaaaagagtagagaagagcctgaaaatcagcaacttccagggcttttctgatctggaggcccaagagcaagggtggaggggggcagattgtcaggtcccgaaatgtgtgttgacacacacgggcttcgggttagctggcctgacatggagatagagtgccaatgttcccaggccacagaattatggaggcctcacccacagtattcacagctctcaactggcctttgagaatggaagccttttcctgccctggatatggcgcttcttcctgggagaggagcagagccacagagaggtaggaagttgaggcagagcaaagggaaggcttcagagcttaggcccggttcatctcagaagtgttttctaggcctggggctgaaaggaagaggggtggggcagcctgggacgggaactgcctctgtgggctccccactcccagggaggggctccataagctttgctcctgggctggatcttgagaggtgggcagggtcttcccaccagtggcagggtgtgcagttgtggtcccaagccttggagggaatggggaatgggctggcacccggctcagggaaagcagaagcagacagtgccccagcaggggagctgcatgcccccaggagtctcagaaaggcagcccatcactaaggctggatgcctttcagcagagctacagctggagccctccggctgaggccagcactcgcctgggactccctggaccccagggttactaacagcaaaaccattccacacccccttgccagatctaagcctgtcttaggaccgtcagtgcccccaggttagagctcatgggggtcaactaagcgagggagggaaggcgaaggcaaagctggccttgcacctggacagcggcctggctcctccccacacctgccttcatttatgactctgaaacatcccccacctgaccaagggagccactctccagttctctcactccaccagggccctccgtgagccaggaccaggtcacatctctcagccaagtctagaagctctggctagaggagaggaagcgtgcagagggtcctctgccaaagctccctgcctggcccgagcccgggcatgctgggattagtgcaacaccgccccagtgtgcctcctctgccttctatcatgccagtttaaaagcaagaagactcccccttcacatcctgaggaaatccccttcctggtgaccaactgatgcaatgaaagtttgaaaagttcttcattttctagaagttcttgaataaacatggacttactaaatgcagagtctgatgatggacagagtttcaaggggtcactttcaaaacatttaattaatttatttatgtagagacagggtctcgctctgtcgcccaggctggagtgcagtggtacaacctcagctcactgcaacctctgccacctcccaggttcaagcgattctcatgcttcagcctcctgagtagctgggattacaggcatgagccaccacgcccagccattttcaaaacactgctcctgcatacaaaccactcagaggccactgcccttggttctgtgatggctctgagcccatgccatcacatctgatggaccccagagagctgagccgtggtttaagatggggtcatgcgctggtcattcccacagtcttgagtatctccaaaatcccaaagtgatatttcactttcggaccctgaaagtttggagagctggtttcttgccttaatttaagctctctgagaatgtcccctgtagggagaagcctccaggaactcagaatagaactcgttcccactcattttccttgctccaccaatctgacgcctgacagatgtcaccactgcctgaaggatcctgtccccaggccagggcagaatgggcattgcctttgactctccccttcagactcccctcccaccggcctcctgtgtagtcagagaacccactgcccatcgcctcctgctgctgctttgaggttgaggtcctggcttgagcagttaccttgctggagaagaggagcccctgccatctggggagcactgtccctgctcgtgatctgtaacagtggggcgctttttcacaccccttatctcacggcttgcttccagcccccatcaatcctgtgcctcatgtgaggtgagccccagagaaacttaaattgcttgtactgaagttgccaaaaaccaaaagttgcccgttgtcatttttaagactgtgccctgaacacacctctgcccatgcgccatggagcatgtgttaggtgcctgccgtgggtcaggcacttgattctcaaaacactgccgagaagctcttaccaacgtgacagttgaggctgagagaggttcatgagcttgctcaaggccacgggtagtaataagaggcatggccttggtgccaagtgcctcccaaacaaacagccggggccgtggtcctgcctaaactctcacatccacggcaccacgctgggcccaggcaacagagataaggagagccctggctcttgggatggggtcgcgccgattcacatgctgtgccacggagccccggcttccatccatgatgtgcccctgtggcgggataattgggaaacaacctttttctgattcccagagaactaatgagctgcaaaaagagattagacagggaagaattgctttcggggagaagccacttactcggctcgccttggtttttgctaa

SEQ ID NO: 23223 - DNA, 1350 bp, Homo sapiens
  source 1..1350: mol_type = unassigned DNA
ggggtgggggtggccttccatcttgtgttctagtgaatcagaacagcccacttcactgatggtgtctttttaactcaaagcatcccagctatggctggcgattctaggaatgccatgaaccaggacatggagattggagtcactccctgggaccccaagaagattccaaaacaggcccgcgattatgtccccattgccacagaccgtacgcgcctgctggccgagggcaagaagccacgccagcgctacatggagaagagtggcaagtgcaacgtgcaccacggcaacgtccaggagacctaccggtacctgagtgacctcttcaccaccctggtggacctcaagtggcgcttcaacttgctcgtcttcaccatggtttacactgtcacctggctgttcttcggcttcatttggtggctcattgcttatatccggggtgacctggaccatgttggcgaccaagagtggattccttgtgttgaaaacctcagtggcttcgtgtccgctttcctgttctccattgagaccgaaacaaccattgggtatggcttccgagtcatcacagagaagtgtccagaggggattatactcctcttggtccaggccatcctgggctccatcgtcaatgccttcatggtggggtgcatgtttgtcaagatcagccagcccaagaagagagcggagaccctcatgttttccaacaacgcagtcatctccatgcgggacgagaagctgtgcctcatgttccgggtgggcgacctccgcaactcccacatcgtggaggcctccatccgggccaagctcatcaagtcccggcagaccaaagagggggagttcatccccctgaaccagacagacatcaacgtgggctttgacacgggcgacgaccgcctcttccttgtgtctcctctgatcatctcccatgagatcaaccagaagagccctttctgggagatgtctcaggctcagctgcatcaggaagagtttgaagttgtggtcattctagaagggatggtggaagccacaggcatgacctgccaagcccggagctcctacatggatacagaggtgctctggggccaccgattcacaccagtcctcaccttggaaaagggcttctatgaggtggactacaacaccttccatgatacctatgagaccaacacacccagctgctgtgccaaggagctggcagaaatgaagagggaaggccggctcctccagtacctccccagccccccactgctggggggctgtgctgaggcagggctggatgcagaggctgagcagaatgaagaagatgagcccaaggggctgggtgggtccagggaggccaggggctcggtgtga

SEQ ID NO: 23224 - DNA, 1325 bp, Homo sapiens
  source 1..1325: mol_type = unassigned DNA
tttcaacattcatacagggaaaacaggaaaagcacaaagaagaaactgcaacaatggccaagctgacagaatccatgactaacgtcctggagggcgactccatggatcaggacgtcgaaagcccagtggccattcaccagccaaagttgcctaagcaggccagggatgacctgccaagacacatcagccgagatcggaccaaaaggaaaatccagaggtacgtgaggaaagacggaaagtgcaatgttcatcacggcaacgtgagggagacctatcgctacctgaccgatatcttcaccacattagtggacctgaagtggagattcaacctattgatttttgtcatggtttacacagtgacctggctcttttttggaatgatctggtggttgatcgcatacatacggggagacatggaccacatagaggacccctcctggactccttgtgttaccaacctcaacgggttcgtctctgcttttttattctcaatagagacagaaaccaccattggttatggctaccgggtcatcacagataaatgcccagagggaattattcttctcttaatccaatctgtgttggggtccattgtcaatgcattcatggtgggatgcatgtttgtaaaaatctctcaacccaagaagagggcagagaccctggtcttttccacccatgcagtgatctccatgcgggatgggaaactgtgcctgatgttccgggtaggggaccttaggaattcccacattgtggaggcttccatcagagccaagttgatcaaatccaaacagacctcggagggggagttcatcccgttgaaccagacggatatcaacgtagggtattacacgggggatgaccgtctgtttctggtgtcaccgctgatcattagccatgaaattaaccaacagagtcctttctgggagatctccaaagcccagctgcccaaagaggaactggaaattgtggtcatcctagaaggaatggtggaagccacagggatgacatgccaagctcgaagctcctacatcaccagtgagatcctgtggggttaccggttcacacctgtcctgaccctggaggacgggttctacgaagttgactacaacagcttccatgagacctatgagaccagcaccccatcccttagtgccaaagagctggccgagttagccagcagggcagagctgcccctgagttggtctgtatccagcaaactcaaccaacatgcagaactggagactgaagaggaagaaaagaacctcgaagagcaaacagaaagaaatggtgatgtggcaaacctggagaatgaatccaaagtttag

SEQ ID NO: 23225 - DNA, 2534 bp, Homo sapiens
  source 1..2534: mol_type = unassigned DNA
ggagccgcgtcgcttcgtgcgctgccagcggggctcagccagtcggctggaattgagtagcattcattgaatctgcggatttcatgacgtctctctgcgtggtccaccacttttctcctaaccggggattttttttttcttctgccactcttatctttccccacttcattccacccagtctccctcccccgtccctgcccaaacgcgcgcccctccgcccctcccttggccccagcgcccagccctgctctccgcgctcggccagagggagccagtccggagacggccgcacctggctggagaggctgggcgggcggaggggtggagacccgcggacgccgggaagccggacctggagccggagcagccgcgagcagaatggagtctcctaacagcctctcggtgctgatgtgaaatttgaccatctgattccagtttttttcttttccttttcttttttgcatttccttccctcgccatccgtcgtgtagtgaattgttcagtcttgctccgtttcaagagaggagatcatgattgagtgaagccaccccgtccgcagccaggaaaagcacaaagaagaaactgcaacaatggccaagctgacagaatccatgactaacgtcctggagggcgactccatggatcaggacgtcgaaagcccagtggccattcaccagccaaagttgcctaagcaggccagggatgacctgccaagacacatcagccgagatcggaccaaaaggaaaatccagaggtacgtgaggaaagacggaaagtgcaatgttcatcacggcaacgtgagggagacctatcgctacctgaccgatatcttcaccacattagtggacctgaagtggagattcaacctattgatttttgtcatggtttacacagtgacctggctcttttttggaatgatctggtggttgatcgcatacatacggggagacatggaccacatagaggacccctcctggactccttgtgttaccaacctcaacgggttcgtctctgcttttttattctcaatagagacagaaaccaccattggttatggctaccgggtcatcacagataaatgcccagagggaattattcttctcttaatccaatctgtgttggggtccattgtcaatgcattcatggtgggatgcatgtttgtaaaaatctctcaacccaagaagagggcagagaccctggtcttttccacccatgcagtgatctccatgcgggatgggaaactgtgcctgatgttccgggtaggggaccttaggaattcccacattgtggaggcttccatcagagccaagttgatcaaatccaaacagacctcggagggggagttcatcccgttgaaccagacggatatcaacgtagggtattacacgggggatgaccgtctgtttctggtgtcaccgctgatcattagccatgaaattaaccaacagagtcctttctgggagatctccaaagcccagctgcccaaagaggaactggaaattgtggtcatcctagaaggaatggtggaagccacagggatgacatgccaagctcgaagctcctacatcaccagtgagatcctgtggggttaccggttcacacctgtcctgaccctggaggacgggttctacgaagttgactacaacagcttccatgagacctatgagaccagcaccccatcccttagtgccaaagagctggccgagttagccagcagggcagagctgcccctgagttggtctgtatccagcaaactcaaccaacatgcagaactggagactgaagaggaagaaaagaacctcgaagagcaaacagaaagaaatggtgatgtggcaaacctggagaatgaatccaaagtttagtgccctagctgggcaaacccttctcttctccccccaacacaatctttccttgtctctcattctctttctttttctgtctctcttgctttgttctttatttgtttatatttaatttttacatgaccagaaaacaaatcttcaaggtgtaaaatatctacctgccctctctcagttattcagattgacaaggtagacatggatttgatgaaagtgcaaagtgccctcatttgtggcccaagcctggtctcctcccaaaatactacacatccaactcctggagatttcagttacttacctgcatgtgttgtacaataccagatcactcaaaaaggtgtgtcaaagattttacctgggatatgacaagcaaggtttctggtgcctatttattcattcagtgagacacagagtggagccctcagttttatggatcccaattcatttcatctactacagggtgaggtgcttgcccccatgtgggtgtggcagttacagggcccaggtgagctgaagacaaaccactgtacatatatatgccttatgtaattattttctttttgtaattagtaataaaacccagcatgtacaaaagtaccatagaacagaactgctaaatactgtacatagatgtatcattaatgtaggtttagatatataactttagaaataagaagc

SEQ ID NO: 23226 - DNA, 2389 bp, Homo sapiens
  source 1..2389: mol_type = unassigned DNA
cctcctccttccactgaagtggccaagggagttgagctgagcagggggaggggaagatctacacccatcccccttcctctagccctccctgcgtttagattcagttgcaccttttattattttaactcttctccttaggacacgcagcccccaatttgtccctccggcctgggcggcccctggtcccgcgcgccagcatgggagagcgagggacctgcccgcggcccgccggcgtgtgcaaggaggtccagccgccgcgcccgctacccggagtctgaggacgggtgtccagggacggagaggcaggtgagagggaggtggctaagctggctatggtgacaggacgatgttggccagaaagagtatcatcccggaggagtatgtgctggcgcgcatcgccgcagagaacctgcgcaagccgcgcatccgagaccgcctccccaaagcccgcttcatcgccaagagcggggcctgcaacctggcgcataagaacatccgtgagcaaggacgctttctacaggacatcttcaccaccttggtggacctgaaatggcgccacacgctggtcatctttaccatgtccttcctctgcagctggctgctcttcgctatcatgtggtggctggtggcctttgcccatggggacatctatgcttacatggagaaaagtggaatggagaaaagtggtttggagtccactgtgtgtgtgactaatgtcaggtctttcacttctgcttttctcttctccattgaagttcaagttaccattgggtttggagggaggatgatgacagaggaatgccctttggccatcacggttttgattctccagaatattgtgggtttgatcatcaatgcagtcatgttaggctgcattttcatgaaaacagctcaggctcacagaagggcagaaactttgattttcagccgccatgctgtgattgccgtccgaaatggcaagctgtgcttcatgttccgagtgggtgacctgaggaaaagcatgatcattagtgcctctgtgcgcatccaggtggtcaagaaaacaactacacctgaaggggaggtggttcctattcaccaactggacattcctgttgataacccaatcgagagcaataacatttttctggtggcccctttgatcatctgccacgtgattgacaagcgcagtcccctgtatgacatctcagcaactgacctggccaaccaagacttggaggtcatagttattctggaaggagtggttgaaactactggcatcaccacacaagcacgaacctcctacattgctgaggagatccaatggggccaccgctttgtgtccattgtgactgaggaagaaggagtgtattctgtggattactccaaatttggcaacactgttaaagtagctgctccacggtgcagtgcccgagagctggatgagaaaccttccatccttattcagaccctccaaaagagtgaactgtctcatcaaaattctctgaggaagcgcaactccatgagaagaaacaattccatgaggaggaacaattctatccgaaggaacaattcttccctcatggtaccaaaggtgcaatttatgactccagaaggaaatcaaaacacatcggaatcatgacagcaagataaccccaagacagtcttttatcaagttttgacggtttatgctgggcactgccagactgaaccagagctggaacacaataatgtgtccttctacattttattacactaaatgatattcatattcaagcaacagcactttctgtagtaataaaaagtaacacaccaagtggaggattcatggcttatgcttgtttcatacatgtagaattcgcagtgatatacttaagttatgtgcaggggtgggtatgctcgtttctctcaatttgaaacacaagaattacactaatagtaacaggccttgagcacaaaatttggtcaagaaatgagtctgtttgaaatgcttagttggtgaaacccagatcgctgtgttactaatgatcactctggaaatgcaaatagaataggaggggaaaaaacaaaatcatgttaatgcgttttgtacatcagccttctcctgtctccatgataactgcatttggtaggaagcctgaggcaaaaactgcttaagtggatctgtttgtaagtggattcagttcattcgctttgtctgtcggtgactcctgaaggtttcctggtccatctcattgcggcctgttgggcagagctggacaaggtgtctttgaaggaaagctaagtcttgtctcatttaggactgggttccccacagtgacagtcacttccttcagcatctcacttcttcttctagaatccccacagggaaatactgtattgaatattttattaaaacattttctttgta

SEQ ID NO: 23227 - DNA, 507 bp, Homo sapiens
  source 1..507: mol_type = unassigned DNA
aagaagctgcaacatttcagaaagcaaccaattactgaggaccgaatgacctggccttatcagcgctgaagtgttaacggccgtccctgtttggggaggacgggtgtccagggacggagaggcaggtgagagggaggtggctaagctggctatggtgacaggacgatgttggccagaaagagtatcatcccggaggagtatgtgctggcgcgcatcgccgcagagaacctgcgcaagccgcgcatccgagaccgcctccccaaagcccgcttcatcgccaagagcggggcctgcaacctggcgcataagaacatccgtgagcaaggacgctttctacaggacatcttcaccaccttggtggacctgaaatggcgccacacgctggtcatctttaccatgtccttcctctgcagctggctgctcttcgctatcatgtggtggctggtggcctttgcccatggggacatctatgcttacatggagaaaagtggaatggagaaaagtggt

SEQ ID NO: 23228 - DNA, 1586 bp, Homo sapiens
  source 1..1586: mol_type = unassigned DNA
attattttaactcttctccttaggacacgcagcccgccggcgtgtgcaaggaggtccagccgccgcgcccgctacccggagtctgaggacgggtgtccagggacggagaggcaggtgagagggaggtggctaagctggctatggtgacaggacgatgttggccagaaagagtatcatcccggaggagtatgtgctggcgcgcatcgccgcagagaacctgcgcaagccgcgcatccgagaccgcctccccaaagcccgcttcatcgccaagagcggggcctgcaacctggcgcataagaacatccgtgagcaaggacgctttctacaggacatcttcaccaccttggtggacctgaaatggcgccacacgctggtcatctttaccatgtccttcctctgcagctggctgctcttcgctatcatgtggtggctggtggcctttgcccatggggacatctatgcttacatggagaaaagtggaatggagaaaagtggtttggagtccactgtgtgtgtgactaatgtcaggtctttcacttctgcttttctcttctccattgaagttcaagttaccattgggtttggagggaggatgatgacagaggaatgccctttggccatcacggttttgattctccagaatattgtgggtttgatcatcaatgcagtcatgttaggctgcattttcatgaaaacagctcaggctcacagaagggcagaaactttgattttcagccgccatgctgtgattgccgtccgaaatggcaagctgtgcttcatgttccgagtgggtgacctgaggaaaagcatgatcattagtgcctctgtgcgcatccaggtggtcaagaaaacaactacacctgaaggggaggtggttcctattcaccaactggacattcctgttgataacccaatcgagagcaataacatttttctggtggcccctttgatcatctgccacgtgattgacaagcgcagtcccctgtatgacatctcagcaactgacctggccaaccaagacttggaggtcatagttattctggaaggagtggttgaaactactggcatcaccacacaagcacgaacctcctacattgctgaggagatccaatggggccaccgctttgtgtccattgtgactgaggaagaaggagtgtattctgtggattactccaaatttggcaacactgttaaagtagctgctccacggtgcagtgcccgagagctggatgagaaaccttccatccttattcagaccctccaaaagagtgaactgtctcatcaaaattctctgaggaagcgcaactccatgagaagaaacaattccatgaggaggaacaattctatccgaaggaacaattcttccctcatggtaccaaaggtgcaatttatgactccagaaggaaatcaaaacacatcggaatcatgacagcaagataaccccaagacagtcttttatcaagttttgacggtttatgctgggcactgccagactgaaccagagctggaacacaataatgtgtccttctacattttattacactaaatgatattcatattcaagcaacagcactttctgtagtaat

SEQ ID NO: 23229 - DNA, 2055 bp, Homo sapiens
  source 1..2055: mol_type = unassigned DNA
gttcctggttctccagcaggaactgagagcaagggtcaggaggcgacaggtccaagtacagtagacactcaaagtgaaccctcagatatgaaagagccagatgaagaaaagaatgaccaacagggagaggcattggactcattgcagaagagaaagaacaagaaaaagaaaaagaagaggaaaaaatccccagtacccatagaaacccttaaagatgtttaaaaagagttaacttatcagaacacagatttaagtgaaattaaggaagaagagcaggtaaagtctactgacagaaagtcagcagtggaagcccaaaacgaggtgactgaaaatccaaaacagaaaattgcagcagaaagcagtgaaaatgttgattgtccagagaatcctaaaatgaagttggatggaaaacttgaccaagaaggcaatgatgtaaaaacagcagctgaggaggtactagctggtagagacacattagattttgaggatgtcacagttcaatcatcaggcccgagggctggtggtgaagaattagatgaaggtgttgcaaaagataatgctaaaatagctggtgccacttaaagcaatcctgaagaaccagagagcgaagatgcagatcactgcaccgtacccaaaaatgaaagtccctcacaggacattagtgatgcctgtgaagcagaaagtacagagaggtgtgggatgtcagaacatccaagtcagaccatcaggaaagctttagacagcaatagcctaaaaaaccatgacttgttggcaccaggaggagagccgggggacttcaatccagaaagcagagaagataccagaggagggaacgagaagggcaaaagcaaagaagaccgtaccatgtcctaagctgaggcaggcggcaggcgtggtgcacaggaagtctgagtgtgaggggctcttttctctccactgccaatgacagcctttcctgcctcagggaagaagagagagacagactacagtgatggagacccactagatgtgcacaagaggctgccatccagtgctggagaggaccgagccgtgatgctggggtttgccatgatgggcttctcagtcctaatgttcttcttgctcggaacaaccattctaaagccttttatgctcagcattcagagagaagaatcgacctgcactgccatccacacagatatcatggacgactggctggactgtgccttcacctgtggtgtgcactgccacggtcaggggaagtacccgtgtcttcaggtgtttgtgaacctcagccatccaggtcagaaagctctcctacattataatgaagaggctgtccagataaatcccaagtgcttttacacacctaagtgccaccaagatagaaatgatttgctcaacagtgctctggacataaaagaattcttcgatcacaaaaatggaacccccttttcatgcttctacagtccagccagccaatctgaagatgtcattcttataaaaaagtatgaccaaatggctatcttccactgtttattttggccttcactgactctgctaggtggtgccctgattgttggcatggtgagattaacacaacacctgtccttactgtgtgaaaaatatagcactgtagtcagagatgaggtaggtggaaaagtaccttatatagaacagcatcagttcaaactgtgcattatgaggaggagcaaaggaagagcagagaaatcttaagacggtggccaaattaaagtgctggccttcagatgtctgtgatttctgcaactgaggacctaattatgcctgtctgcaaactaataatgtaaaagcgtgatgttacagactgcagagttaaagaaaagcagacattgacagtttctgatgagcataaacagtaagtgcagtcacaggccaaacttcttgctaggaacagcaagactgggaagaggtcttaaatttagtgatactgttattattctatattctcaatatagtaacacatgcatcttgctgtgtcaaatgctttctgggccatcattaaaaggacattaaaaacgtttttcttctaatgaa

SEQ ID NO: 23230 - DNA, 1004 bp, Homo sapiens
  source 1..1004: mol_type = unassigned DNA
acagtgcaaagagagagaagcagcttcggctgcagcaaaccacgcaggtccttcttgatcatctagaactgaccgctccgccttgccaggagtctgcagaaccacgtggctagcctgcctgaagttctcacctctccaggaaggcggggggcttctaatggctgcagctgcgctgggggctgggggctcccgctgggactccacttccgtggatgtctaagcttcacctttcttgcgcccgcaggggcatgactcaggtgaaagggagccattttctcagacccctggcctcatgcagcccttcagcatccccgtgcaaatcacacttcagggcagccggaggcgccaggggaggacagcctttcctgcctcagggaagaagagagagacagactacagtgatggagacccactagatgtgcacaagaggctgccatccagtgctggagaggaccgagccgtgatgctggggtttgccatgatgggcttctcagtcctaatgttcttcttgctcggaacaaccattctaaagccttttatgctcagcattcagagagaagaatcgacctgcactgccatccacacagatatcatggacgactggctggactgtgccttcacctgtggtgtgcactgccacggtcaggggaagtacccgtgtcttcaggtgtttgtgaacctcagccatccaggtcagaaagctctcctacattataatgaagaggctgtccagataaatcccaagcgtgatgttacagactgcagagttaaagaaaagcagacattgacagtttctgatgagcataaacagtaagtgcagtcacaggccaaacttcttgctaggaacagcaagactgggaagaggtcttaaatttagtgatactgttattattctatattctcaatatagtaacacatgcatcttgctgtgtcaaatgctttctgggccatcattaaaaggacattaaaaacgtttttcttctaatgaatgcagtataccacag

SEQ ID NO: 23231 - DNA, 1485 bp, Homo sapiens
  source 1..1485: mol_type = unassigned DNA
tgccctgcgagaatgtatctcatcctttgctggagcaggtttgcaggcacagtggagagaggagagaagaaatgaagggacacttatgcagaaccatgagtggccagagaggaggagaaggagggtgagaggagcaaagaagccatgacaacttcataattctgagtggactgggcagtggccagaaattctggtggtggatatgctgcctttccaacaggtgaatatgaaagaataagtcaaaccctgttcaggacgctgttaattccaaatgtgaactttttgagtcattctttccatgtggaattcaaaggagaatgtaaacaaattttcaggagggacgtgcaatatccctgaaagataacaaagttcgtaacacttatttacatacaacattctctagttattgattaaacagatctctacagacttgcatgaggcaacatttcttaggcttgtttgctacaatatctttaaaaatacttgattacacatcactttagcttatttagatggacttttcaccaagctctgaactgggatttcattttgttgcattcatcctgctcacgagacacaggacagcctttcctgcctcagggaagaagagagagacagactacagtgatggagacccactagatgtgcacaagaggctgccatccagtgctggagaggaccgagccgtgatgctggggtttgccatgatgggcttctcagtcctaatgttcttcttgctcggaacaaccattctaaagccttttatgctcagcattcagagagaagaatcgacctgcactgccatccacacagatatcatggacgactggctggactgtgccttcacctgtggtgtgcactgccacggtcaggggaagtacccgtgtcttcaggtgtttgtgaacctcagccatccaggtcagaaagctctcctacattataatgaagaggctgtccagataaatcccaagtgcttttacacacctaagtgccaccaagatagaaatgatttgctcaacagtgctctggacataaaagaattcttcgatcacaaaaatggaacccccttttcatgcttctacagtccagccagccaatctgaagatgtcattcttataaaaaagtatgaccaaatggctatcttccactgtttattttggccttcactgactctgctaggtggtgccctgattgttggcatggtgagattaacacaacacctgtccttactgtgtgaaaaatatagcactgtagtcagagatgaggtaggtggaaaagtaccttatatagaacagcatcagttcaaactgtgcattatgaggaggagcaaaggaagagcagagaaatcttaagacggtggccaaattaaagtgctggccttcagatgtctgtgatttctgcaactgaggacctaattatgcctgtctgcaaactaataatgtaaaaggtaataattaaagtatcatattttcatgtgggaaaaaa

SEQ ID NO: 23232 - DNA, 1228 bp, Homo sapiens
  source 1..1228: mol_type = unassigned DNA
gcagcaaaccacgcaggtccttcttgatcatctagaactgaccgctccgccttgccaggagtctgcagaaccacgtggctagcctgcctgaagttctcacctctccaggaaggcggggggcttctaatggctgcagctgcgctgggggctgggggctcccgctgggactccacttccgtggatgtctaagcttcacctttcttgcgcccgcaggggcatgactcaggtgaaagggagccattttctcagacccctggcctcatgcagcccttcagcatccccgtgcaaatcacacttcagggcagccggaggcgccaggggaggacagcctttcctgcctcagggaagaagagagagacagactacagtgatggagacccactagatgtgcacaagaggctgccatccagtgctggagaggaccgagccgtgatgctggggtttgccatgatgggcttctcagtcctaatgttcttcttgctcggaacaaccattctaaagccttttatgctcagcattcagagagaagaatcgacctgcactgccatccacacagatatcatggacgactggctggactgtgccttcacctgtggtgtgcactgccacggtcaggggaagtacccgtgtcttcaggtgtttgtgaacctcagccatccaggtcagaaagctctcctacattataatgaagaggctgtccagataaatcccaagtgcttttacacacctaagtgccaccaagatagaaatgatttgctcaacagtgctctggacataaaagaattcttcgatcacaaaaatggaacccccttttcatgcttctacagtccagccagccaatctgaagatgtcattcttataaaaaagtatgaccaaatggctatcttccactgtttattttggccttcactgactctgctaggtggtgccctgattgttggcatggtgagattaacacaacacctgtccttactgtgtgaaaaatatagcactgtagtcagagatgaggtaggtggaaaagtaccttatatagaacagcatcagttcaaactgtgcattatgaggaggagcaaaggaagagcagagaaatcttaagacggtggccaaattaaagtgctggccttcagatgtctgtgatttctgcaactgaggacctaattatgcctgtctgcaaactaataatgtaaaaggtaataattaaagtatcatattttcatgtgggaaaaaa

SEQ ID NO: 23233 - DNA, 1608 bp, Homo sapiens
  source 1..1608: mol_type = unassigned DNA
gttcaccagacaccctgccctgcgagaatgtatctcatcctttgctggagcaggtttgcaggcacagtggagagaggagagaagaaatgaagggacacttatgcagaaccatgagtggccagagaggaggagaaggagggtgagaggagcaaagaagccatgacaacttcataattctgagtggactgggcagtggccagaaattctggtggtggatatgctgcctttccaacaggtgaatatgaaagaataagtcaaaccctgttcaggacgctgttaattccaaatgtgaactttttgagtcattctttccatgtggaattcaaaggagaatgtaaacaaattttcaggagggacgtgcaatatccctgaaagataacaaagttcgtaacacttatttacatacaacattctctagttattgattaaacagatctctacagacttgcatgaggcaacatttcttaggcttgtttgctacaatatctttaaaaatacttgattacacatcactttagcttatttagatggacttttcaccaagctctgaactgggatttcattttgttgcattcatcctgctcacgagacacaggtaggcagcaaatgagattatccctccagtccccatggattggaaatgttcccccttctttatgagctcactgcagtatctccttctccctttccccaaaggacagcctttcctgcctcagggaagaagagagagacagactacagtgatggagacccactagatgtgcacaagaggctgccatccagtgctggagaggaccgagccgtgatgctggggtttgccatgatgggcttctcagtcctaatgttcttcttgctcggaacaaccattctaaagccttttatgctcagcattcagagagaagaatcgacctgcactgccatccacacagatatcatggacgactggctggactgtgccttcacctgtggtgtgcactgccacggtcaggggaagtacccgtgtcttcaggtgtttgtgaacctcagccatccaggtcagaaagctctcctacattataatgaagaggctgtccagataaatcccaagtgcttttacacacctaagtgccaccaagatagaaatgatttgctcaacagtgctctggacataaaagaattcttcgatcacaaaaatggaacccccttttcatgcttctacagtccagccagccaatctgaagatgtcattcttataaaaaagtatgaccaaatggctatcttccactgtttattttggccttcactgactctgctaggtggtgccctgattgttggcatggtgagattaacacaacacctgtccttactgtgtgaaaaatatagcactgtagtcagagatgaggtaggtggaaaagtaccttatatagaacagcatcagttcaaactgtgcattatgaggaggagcaaaggaagagcagagaaatcttaagacggtggccaaattaaagtgctggccttcagatgtctgtgatttctgcaactgaggacctaattatgcctgtctgcaaactaataatgtaaaaggtaataattaaagtatcatattttcatgtgggaaaaaatttaaaa

SEQ ID NO: 23234 - DNA, 1159 bp, Homo sapiens
  source 1..1159: mol_type = unassigned DNA
tacagagaggtgtgggatgtcagaacatccaagtcagaccatcaggaaagctttagacagcaatagcctaaaaaaccatgacttgttggcaccaggaggagagccgggggacttcaatccagaaagcagagaagataccagaggagggaacgagaagggcaaaagcaaagaagaccgtaccatgtcctaagctgaggcaggcggcaggcgtggtgcacaggaagtctgagtgtgaggggctcttttctctccactgccaatgacagcctttcctgcctcagggaagaagagagagacagactacagtgatggagacccactagatgtgcacaagaggctgccatccagtgctggagaggaccgagccgtgatgctggggtttgccatgatgggcttctcagtcctaatgttcttcttgctcggaacaaccattctaaagccttttatgctcagcattcagagagaagaatcgacctgcactgccatccacacagatatcatggacgactggctggactgtgccttcacctgtggtgtgcactgccacggtcaggggaagtacccgtgtcttcaggtgtttgtgaacctcagccatccaggtcagaaagctctcctacattataatgaagaggctgtccagataaatcccaagtgcttttacacacctaagtgccaccaagatagaaatgatttgctcaacagtgctctggacataaaagaattcttcgatcacaaaaatggaacccccttttcatgcttctacagtccagccagccaatctgaagatgtcattcttataaaaaagtatgaccaaatggctatcttccactgtttattttggccttcactgactctgctaggtggtgccctgattgttggcatggtgagattaacacaacacctgtccttactgtgtgaaaaatatagcactgtagtcagagatgaggtaggtggaaaagtaccttatatagaacagcatcagttcaaactgtgcattatgaggaggagcaaaggaagagcagagaaatcttaagacggtggccaaattaaagtgctggccttcagatgtctgtgatttctgcaactgaggacctaattatgcctgtctgcaaactaataatgtaaaaggtaataattaaagtatcatattttcatgtgg

SEQ ID NO: 23235 - DNA, 6875 bp, Homo sapiens
  source 1..6875: mol_type = unassigned DNA
ccgggccgctgccgaggggccctgcccacccctgcccagcccggagcccaggcgagccagcgcggcgagcctcctcccctcccgcctgggtcgtcctgagtccgcgcccgctccagttgctgcagctgctgctgctggcggctgcggggagcgcggggcgcgcgccgaagaggcttgggcggcgaggacggggacgaggaggagtcggaggcggcaaggaggaagagcgagcggaggccgaggggctcagcggcgtggcgacaggactagggggtcccgagaacatgggctagcaggcggccacgggccggcggccggacgcggtgaacctgccgcggccgggcgcgcactggcgcggcgagccggagccgagcgcagccgggggaggagggctggcgcaggggcgcccgggcggagggggccgattatccattattaacgagttaccacctaataagcggagagcggctcgttagccgcgcgggaggcgctcggggaagggggtcaccggccgagcgcagcgcacacccgtggcgcacggcgggcggcgcggcgccgaggacacccgggaccgcgcgcggagccggggcgggcccgggggcggcgcagaccccgggcgcgggcggcccgcggcgccccctggctctcggcgctcggggccagcgcagcccggggcgagcggggcgcgggccggggagggggagctgcccgcgcactccatccccctcccccccgggcgggcggcggcggctcgctgtatatatctcggcgcaccccgccaggtcgcgcacagcgccccgagcccaggcgcctccccgcccccctcccgcgctccgcggcggcggcggcggcggcagcagtagcagcaatatggctgttgatgggtgtttggggtggcgctggcggcgggaggagctcccccgagcccctgcgccggctgcccgttgctagctatggcaaatggtggcggcggcggcggcggcagcagcggcggcggcggcggcggcggaggcagcagtcttagaatgagtagcaatatccacgcgaaccatctcagcctagacgcgtcctcctcctcctcctcctcctcttcctcttcttcttcttcctcctcctcttcctcctcgtcctcggtccacgagcccaagatggatgcgctcatcatcccggtgaccatggaggtgccgtgcgacagccggggccaacgcatgtggtgggctttcctggcctcctccatggtgactttcttcgggggcctcttcatcatcttgctctggcggacgctcaagtacctgtggaccgtgtgctgccactgcgggggcaagacgaaggaggcccagaagattaacaatggctcaagccaggcggatggcactctcaaaccagtggatgaaaaagaggaggcagtggccgccgaggtcggctggatgacctccgtgaaggactgggcgggggtgatgatatccgcccagacactgactggcagagtcctggttgtcttagtctttgctctcagcatcggtgcacttgtaatatacttcatagattcatcaaacccaatagaatcctgccagaatttctacaaagatttcacattacagatcgacatggctttcaacgtgttcttccttctctacttcggcttgcggtttattgcagccaacgataaattgtggttctggctggaagtgaactctgtagtggatttcttcacggtgccccccgtgtttgtgtctgtgtacttaaacagaagttggcttggtttgagatttttaagagctctgagactgatacagttttcagaaattttgcagtttctgaatattcttaaaacaagtaattccatcaagctggtgaatctgctctccatatttatcagcacgtggctgactgcagccgggttcatccatttggtggagaattcaggggacccatgggaaaatttccaaaacaaccaggctctcacctactgggaatgtgtctatttactcatggtcacaatgtccaccgttggttatggggatgtttatgcaaaaaccacacttgggcgcctcttcatggtcttcttcatcctcgggggactggccatgtttgccagctacgtccctgaaatcatagagttaataggaaaccgcaagaaatacgggggctcctatagtgcggttagtggaagaaagcacattgtggtctgcggacacatcactctggagagtgtttccaacttcctgaaggactttctgcacaaggaccgggatgacgtcaatgtggagatcgtttttcttcacaacatctcccccaacctggagcttgaagctctgttcaaacgacattttactcaggtggaattttatcagggttccgtcctcaatccacatgatcttgcaagagtcaagatagagtcagcagatgcatgcctgatccttgccaacaagtactgcgctgacccggatgcggaggatgcctcgaatatcatgagagtaatctccataaagaactaccatccgaagataagaatcatcactcaaatgctgcagtatcacaacaaggcccatctgctaaacatcccgagctggaattggaaagaaggtgatgacgcaatctgcctcgcagagttgaagttgggcttcatagcccagagctgcctggctcaaggcctctccaccatgcttgccaacctcttctccatgaggtcattcataaagattgaggaagacacatggcagaaatactacttggaaggagtctcaaatgaaatgtacacagaatatctctccagtgccttcgtgggtctgtccttccctactgtttgtgagctgtgttttgtgaagctcaagctcctaatgatagccattgagtacaagtctgccaaccgagagagccgtatattaattaatcctggaaaccatcttaagatccaagaaggtactttaggatttttcatcgcaagtgatgccaaagaagttaaaagggcatttttttactgcaaggcctgtcatgatgacatcacagatcccaaaagaataaaaaaatgtggctgcaaacggcttgaagatgagcagccgtcaacactatcaccaaaaaaaaagcaacggaatggaggcatgcggaactcacccaacacctcgcctaagctgatgaggcatgaccccttgttaattcctggcaatgatcagattgacaacatggactccaatgtgaagaagtacgactctactgggatgtttcactggtgtgcacccaaggagatagagaaagtcatcctgactcgaagtgaagctgccatgaccgtcctgagtggccatgtcgtggtctgcatctttggcgacgtcagctcagccctgatcggcctccggaacctggtgatgccgctccgtgccagcaactttcattaccatgagctcaagcacattgtgtttgtgggctctattgagtacctcaagcgggaatgggagacgcttcataacttccccaaagtgtccatattgcctggtacgccattaagtcgggctgatttaagggctgtcaacatcaacctctgtgacatgtgcgttatcctgtcagccaatcagaataatattgatgatacttcgctgcaggacaaggaatgcatcttggcgtcactcaacatcaaatctatgcagtttgatgacagcatcggagtcttgcaggctaattcccaagggttcacacctccaggaatggatagatcctctccagataacagcccagtgcacgggatgttacgtcaaccatccatcacaactggggtcaacatccccatcatcactgaactagtgaacgatactaatgttcagtttttggaccaagacgatgatgatgaccctgatacagaactgtacctcacgcagccctttgcctgtgggacagcatttgccgtcagtgtcctggactcactcatgagcgcgacgtacttcaatgacaatatcctcaccctgatacggaccctggtgaccggaggagccacgccggagctggaggctctgattgctgaggaaaacgcccttagaggtggctacagcaccccgcagacactggccaatagggaccgctgccgcgtggcccagttagctctgctcgatgggccatttgcggacttaggggatggtggttgttatggtgatctgttctgcaaagctctgaaaacatataatatgctttgttttggaatttaccggctgagagatgctcacctcagcacccccagtcagtgcacaaagaggtatgtcatcaccaacccgccctatgagtttgagctcgtgccgacggacctgatcttctgcttaatgcagtttgaccacaatgccggccagtcccgggccagcctgtcccattcctcccactcgtcgcagtcctccagcaagaagagctcctctgttcactccatcccatccacagcaaaccgacagaaccggcccaagtccagggagtcccgggacaaacagaagtacgtgcaggaagagcggctttgatatgtgtatccaccgccactgtgtgaaactgtatctgccactcatttccccagttggtgtttccaacaaagtaactttccctgttttcccctgtagtccccccctttttttttacacatatttgcatatgtatgatagtgtgcatgtggttgtcatttttatttcaccaccataaaacccttgagcacaacagcaaataagcagacggaccaaaagttatttatgattctgggggaaaaataacccaaaggcatgctccagacataaatagctcactgcaggaacgagttcacagattagaagggagcacttgtgatcaacgtcagttaggcagagcaagtttatttaatgtaaaagaaaagttgattctgatttatcaggattatcagggtgctttgggttttgattttgttgttgttgttgttttcctttctttctttttttatacacacaataagttagcacatgtttatttgaaacaagcaaccaaacagcaatgaaaacatattgattgtttccagtctctgggccgaagtattgcgaagcatttgaaaagctttcacgatttgtgtagatgattatgaaggacctgcttgttgcaagagaacatcagtgatttttttagttactcaccaaggccttttgtcccagagccagttccctctgggagttcttatgaacatttctcaccttaatatggaggagagaatagtattccaatcatggatgtatcaaattctagtcatttagtttaagtgaaaagaggtttgattgcatattaaattgttattctgtctccttatgttgccatatgaatagctattttttttctttcacttttgacatttgggatgaaaagccatatgtatcataaatatcagatgtaagtcattaaaaactgccttcctgggacttttacatcttttaaaaggtgaattacttaccttatgtacagaataaataatgctcaggaaagagcaagtatttttccatgcattctcaggggatctttttactcccctttgtttgattagttagggccccaatgccaggtaggaggaagggctggggcaatggtagagtgagaggaagacaaacccagctgcagatcatgcttttctaggagccgacatgctaaataaattagaatgtaggaggatcagccacagttgactcaacaaagacaaaagccagccaccaccttcaactgttggcacagctgtgcggtgctggctgtcccaatgcagaaagctggtgggaaggaattcctcatcatcactttctttaatgtagccaatttaggcagggtaatgacggcaatagagagctgctccttgtcattatgagacgtgggataagaagagtgcaacagtgagccaaacacattttggtatagttatttttttcttcttttgttttctttcttttttaacacttagtaagcatgagaggagaggtagaaaaatacccttttttcaacatatagttgtcagatgctttgtgcatgcaaatcatgctttaggcagtgcggtatttcttaaaaactggccaattcaccataaccaatttcccttatggatggactaggctggtatatacatatttgaaaagttttacttcaaagaattccatcgaatagaataggggtaaaagggaggaggaaaacatgtcacagctgtaccatctctaaaaaggtgtttttatggtgaatgttttggatttagattttggatcccccgtcccctcaagcatgatagttttggatatttgcttgctgtgtgaattgacaagcacttttactgacaaatggtgaggctcagtcagaacctccaccctcccccacaccaaagacaggggcagcgtagtattcaaaccagtattgtggtggggaataattgtatacatgtaaattatcaagccctatgagtggaagaattttttcaaattatttttgtccctctatatattgatttatattatgtataactatctctttatataaactatatataattatatatatataactatataattatatatatataactatatatataactatatatatgtatcccctagtattggatcatgaagagctcttcatgcattctttgcaaaggaggttataaagttacgccctcagaacatttataactataagaatgtgccagttaaagtgctcaacaggaaatatgacagtttaaaagcattgtaaaactcacatagcttacttctctctctaaagtgcaacaaggatgaatagaatgggccaaggtatgacaattaatggttctgcatgacctagccactgctgggggttttcttctataacgttgtccttgtgaaaacttttgtgaaattaaaaaaaaaggagttacaaat

SEQ ID NO: 23236 - DNA, 6018 bp, Homo sapiens
  source 1..6018: mol_type = unassigned DNA
agcaatatccacgcgaaccatctcagcctagacgcgtcctcctcctcctcctcctcctcttcctcttcttcttcttcctcctcctcttcctcctcgtcctcggtccacgagcccaagatggatgcgctcatcatcccggtgaccatggaggtgccgtgcgacagccggggccaacgcatgtggtgggctttcctggcctcctccatggtgactttcttcgggggcctcttcatcatcttgctctggcggacgctcaagtacctgtggaccgtgtgctgccactgcgggggcaagacgaaggaggcccagaagattaacaatggctcaagccaggcggatggcactctcaaaccagtggatgaaaaagaggaggcagtggccgccgaggtcggctggatgacctccgtgaaggactgggcgggggtgatgatatccgcccagacactgactggcagagtcctggttgtcttagtctttgctctcagcatcggtgcacttgtaatatacttcatagattcatcaaacccaatagaatcctgccagaatttctacaaagatttcacattacagatcgacatggctttcaacgtgttcttccttctctacttcggcttgcggtttattgcagccaacgataaattgtggttctggctggaagtgaactctgtagtggatttcttcacggtgccccccgtgtttgtgtctgtgtacttaaacagaagttggcttggtttgagatttttaagagctctgagactgatacagttttcagaaattttgcagtttctgaatattcttaaaacaagtaattccatcaagctggtgaatctgctctccatatttatcagcacgtggctgactgcagccgggttcatccatttggtggagaattcaggggacccatgggaaaatttccaaaacaaccaggctctcacctactgggaatgtgtctatttactcatggtcacaatgtccaccgttggttatggggatgtttatgcaaaaaccacacttgggcgcctcttcatggtcttcttcatcctcgggggactggccatgtttgccagctacgtccctgaaatcatagagttaataggaaaccgcaagaaatacgggggctcctatagtgcggttagtggaagaaagcacattgtggtctgcggacacatcactctggagagtgtttccaacttcctgaaggactttctgcacaaggaccgggatgacgtcaatgtggagatcgtttttcttcacaacatctcccccaacctggagcttgaagctctgttcaaacgacattttactcaggtggaattttatcagggttccgtcctcaatccacatgatcttgcaagagtcaagatagagtcagcagatgcatgcctgatccttgccaacaagtactgcgctgacccggatgcggaggatgcctcgaatatcatgagagtaatctccataaagaactaccatccgaagataagaatcatcactcaaatgctgcagtatcacaacaaggcccatctgctaaacatcccgagctggaattggaaagaaggtgatgacgcaatctgcctcgcagagttgaagttgggcttcatagcccagagctgcctggctcaaggcctctccaccatgcttgccaacctcttctccatgaggtcattcataaagattgaggaagacacatggcagaaatactacttggaaggagtctcaaatgaaatgtacacagaatatctctccagtgccttcgtgggtctgtccttccctactgtttgtgagctgtgttttgtgaagctcaagctcctaatgatagccattgagtacaagtctgccaaccgagagagccgtatattaattaatcctggaaaccatcttaagatccaagaaggtactttaggatttttcatcgcaagtgatgccaaagaagttaaaagggcatttttttactgcaaggcctgtcatgatgacatcacagatcccaaaagaataaaaaaatgtggctgcaaacggcccaagatgtccatctacaagagaatgagacgggcatgttgttttgattgcggacgttctgagcgtgactgctcatgcatgtcaggccgtgtgcgtggtaacgtggacacccttgagagagccttcccactttcttctgtctctgttaatgattgctccaccagtttccgtgcctttgaagatgagcagccgtcaacactatcaccaaaaaaaaagcaacggaatggaggcatgcggaactcacccaacacctcgcctaagctgatgaggcatgaccccttgttaattcctggcaatgatcagattgacaacatggactccaatgtgaagaagtacgactctactgggatgtttcactggtgtgcacccaaggagatagagaaagtcatcctgactcgaagtgaagctgccatgaccgtcctgagtggccatgtcgtggtctgcatctttggcgacgtcagctcagccctgatcggcctccggaacctggtgatgccgctccgtgccagcaactttcattaccatgagctcaagcacattgtgtttgtgggctctattgagtacctcaagcgggaatgggagacgcttcataacttccccaaagtgtccatattgcctggtacgccattaagtcgggctgatttaagggctgtcaacatcaacctctgtgacatgtgcgttatcctgtcagccaatcagaataatattgatgatacttcgctgcaggacaaggaatgcatcttggcgtcactcaacatcaaatctatgcagtttgatgacagcatcggagtcttgcaggctaattcccaagggttcacacctccaggaatggatagatcctctccagataacagcccagtgcacgggatgttacgtcaaccatccatcacaactggggtcaacatccccatcatcactgaactagtgaacgatactaatgttcagtttttggaccaagacgatgatgatgaccctgatacagaactgtacctcacgcagccctttgcctgtgggacagcatttgccgtcagtgtcctggactcactcatgagcgcgacgtacttcaatgacaatatcctcaccctgatacggaccctggtgaccggaggagccacgccggagctggaggctctgattgctgaggaaaacgcccttagaggtggctacagcaccccgcagacactggccaatagggaccgctgccgcgtggcccagttagctctgctcgatgggccatttgcggacttaggggatggtggttgttatggtgatctgttctgcaaagctctgaaaacatataatatgctttgttttggaatttaccggctgagagatgctcacctcagcacccccagtcagtgcacaaagaggtatgtcatcaccaacccgccctatgagtttgagctcgtgccgacggacctgatcttctgcttaatgcagtttgaccacaatgccggccagtcccgggccagcctgtcccattcctcccactcgtcgcagtcctccagcaagaagagctcctctgttcactccatcccatccacagcaaaccgacagaaccggcccaagtccagggagtcccgggacaaacagaagtacgtgcaggaagagcggctttgatatgtgtatccaccgccactgtgtgaaactgtatctgccactcatttccccagttggtgtttccaacaaagtaactttccctgttttcccctgtagtccccccctttttttttacacatatttgcatatgtatgatagtgtgcatgtggttgtcatttttatttcaccaccataaaacccttgagcacaacagcaaataagcagacggaccaaaagttatttatgattctgggggaaaaataacccaaaggcatgctccagacataaatagctcactgcaggaacgagttcacagattagaagggagcacttgtgatcaacgtcagttaggcagagcaagtttatttaatgtaaaagaaaagttgattctgatttatcaggattatcagggtgctttgggttttgattttgttgttgttgttgttttcctttctttctttttttatacacacaataagttagcacatgtttatttgaaacaagcaaccaaacagcaatgaaaacatattgattgtttccagtctctgggccgaagtattgcgaagcatttgaaaagctttcacgatttgtgtagatgattatgaaggacctgcttgttgcaagagaacatcagtgatttttttagttactcaccaaggccttttgtcccagagccagttccctctgggagttcttatgaacatttctcaccttaatatggaggagagaatagtattccaatcatggatgtatcaaattctagtcatttagtttaagtgaaaagaggtttgattgcatattaaattgttattctgtctccttatgttgccatatgaatagctattttttttctttcacttttgacatttgggatgaaaagccatatgtatcataaatatcagatgtaagtcattaaaaactgccttcctgggacttttacatcttttaaaaggtgaattacttaccttatgtacagaataaataatgctcaggaaagagcaagtatttttccatgcattctcaggggatctttttactcccctttgtttgattagttagggccccaatgccaggtaggaggaagggctggggcaatggtagagtgagaggaagacaaacccagctgcagatcatgcttttctaggagccgacatgctaaataaattagaatgtaggaggatcagccacagttgactcaacaaagacaaaagccagccaccaccttcaactgttggcacagctgtgcggtgctggctgtcccaatgcagaaagctggtgggaaggaattcctcatcatcactttctttaatgtagccaatttaggcagggtaatgacggcaatagagagctgctccttgtcattatgagacgtgggataagaagagtgcaacagtgagccaaacacattttggtatagttatttttttcttcttttgttttctttcttttttaacacttagtaagcatgagaggagaggtagaaaaatacccttttttcaacatatagttgtcagatgctttgtgcatgcaaatcatgctttaggcagtgcggtatttcttaaaaactggccaattcaccataaccaatttcccttatggatggactaggctggtatatacatatttgaaaagttttacttcaaagaattccatcgaatagaataggggtaaaagggaggaggaaaacatgtcacagctgtaccatctctaaaaaggtgtttttatggtgaatgttttggatttagattttggatcccccgtcccctcaagcatgatagttttggatatttgcttgctgtgtgaattgacaagcacttttactgacaaatggtgaggctcagtcagaacctccaccctcccccacaccaaagacaggggcagcgtagtattcaaaccagtattgtggtggggaataattgtatacatgtaaattatcaagccctatgagtggaagaattttttcaaattatttttgtccctctatatattgatttatattatgtataactatctctttatataaactatatataattatatatatataactatataattatatatatataactatatatataactatatatatgtatcccctagtattggatcatgaagagctcttcatgcattctttgcaaaggaggttataaagttacgccctcagaacatttataactataagaatgtgccagttaaagtgctcaacaggaaatatgacagtttaaaagcattgtaaaactcacatagcttacttctctctctaaagtgcaacaaggatgaatagaatgggccaaggtatgacaattaatggttctgcatgacctagccactgctgggggttttcttctataacgttgtccttgtgaaaacttttgtgaaattaaaaaaaaaggagttacaaat

SEQ ID NO: 23237 - DNA, 3720 bp, Homo sapiens
  source 1..3720: mol_type = unassigned DNA
atggcaaatggtggcggcggcggcggcggcagcagcggcggcggcggcggcggcggaggcagcagtcttagaatgagtagcaatatccacgcgaaccatctcagcctagacgcgtcctcctcctcctcctcctcctcttcctcttcttcttcttcctcctcctcttcctcctcgtcctcggtccacgagcccaagatggatgcgctcatcatcccggtgaccatggaggtgccgtgcgacagccggggccaacgcatgtggtgggctttcctggcctcctccatggtgactttcttcgggggcctcttcatcatcttgctctggcggacgctcaagtacctgtggaccgtgtgctgccactgcgggggcaagacgaaggaggcccagaagattaacaatggctcaagccaggcggatggcactctcaaaccagtggatgaaaaagaggaggcagtggccgccgaggtcggctggatgacctccgtgaaggactgggcgggggtgatgatatccgcccagacactgactggcagagtcctggttgtcttagtctttgctctcagcatcggtgcacttgtaatatacttcatagattcatcaaacccaatagaatcctgccagaatttctacaaagatttcacattacagatcgacatggctttcaacgtgttcttccttctctacttcggcttgcggtttattgcagccaacgataaattgtggttctggctggaagtgaactctgtagtggatttcttcacggtgccccccgtgtttgtgtctgtgtacttaaacagaagttggcttggtttgagatttttaagagctctgagactgatacagttttcagaaattttgcagtttctgaatattcttaaaacaagtaattccatcaagctggtgaatctgctctccatatttatcagcacgtggctgactgcagccgggttcatccatttggtggagaattcaggggacccatgggaaaatttccaaaacaaccaggctctcacctactgggaatgtgtctatttactcatggtcacaatgtccaccgttggttatggggatgtttatgcaaaaaccacacttgggcgcctcttcatggtcttcttcatcctcgggggactggccatgtttgccagctacgtccctgaaatcatagagttaataggaaaccgcaagaaatacgggggctcctatagtgcggttagtggaagaaagcacattgtggtctgcggacacatcactctggagagtgtttccaacttcctgaaggactttctgcacaaggaccgggatgacgtcaatgtggagatcgtttttcttcacaacatctcccccaacctggagcttgaagctctgttcaaacgacattttactcaggtggaattttatcagggttccgtcctcaatccacatgatcttgcaagagtcaagatagagtcagcagatgcatgcctgatccttgccaacaagtactgcgctgacccggatgcggaggatgcctcgaatatcatgagagtaatctccataaagaactaccatccgaagataagaatcatcactcaaatgctgcagtatcacaacaaggcccatctgctaaacatcccgagctggaattggaaagaaggtgatgacgcaatctgcctcgcagagttgaagttgggcttcatagcccagagctgcctggctcaaggcctctccaccatgcttgccaacctcttctccatgaggtcattcataaagattgaggaagacacatggcagaaatactacttggaaggagtctcaaatgaaatgtacacagaatatctctccagtgccttcgtgggtctgtccttccctactgtttgtgagctgtgttttgtgaagctcaagctcctaatgatagccattgagtacaagtctgccaaccgagagagccgtatattaattaatcctggaaaccatcttaagatccaagaaggtactttaggatttttcatcgcaagtgatgccaaagaagttaaaagggcatttttttactgcaaggcctgtcatgatgacatcacagatcccaaaagaataaaaaaatgtggctgcaaacggcgttgggaagaacattgttctttgtggagactggaaagcaagggaaatgtgagaagattaaactactgcaggggtcagcaaactttctctgtcaaagtcaaggttgcagctagatcacgctattccaaagatccatttgagttcaagaaggagactcccaattctcggcttgtgaccgagccagttgaagatgagcagccgtcaacactatcaccaaaaaaaaagcaacggaatggaggcatgcggaactcacccaacacctcgcctaagctgatgaggcatgaccccttgttaattcctggcaatgatcagattgacaacatggactccaatgtgaagaagtacgactctactgggatgtttcactggtgtgcacccaaggagatagagaaagtcatcctgactcgaagtgaagctgccatgaccgtcctgagtggccatgtcgtggtctgcatctttggcgacgtcagctcagccctgatcggcctccggaacctggtgatgccgctccgtgccagcaactttcattaccatgagctcaagcacattgtgtttgtgggctctattgagtacctcaagcgggaatgggagacgcttcataacttccccaaagtgtccatattgcctggtacgccattaagtcgggctgatttaagggctgtcaacatcaacctctgtgacatgtgcgttatcctgtcagccaatcagaataatattgatgatacttcgctgcaggacaaggaatgcatcttggcgtcactcaacatcaaatctatgcagtttgatgacagcatcggagtcttgcaggctaattcccaagggttcacacctccaggaatggatagatcctctccagataacagcccagtgcacgggatgttacgtcaaccatccatcacaactggggtcaacatccccatcatcactgaactagtgaacgatactaatgttcagtttttggaccaagacgatgatgatgaccctgatacagaactgtacctcacgcagccctttgcctgtgggacagcatttgccgtcagtgtcctggactcactcatgagcgcgacgtacttcaatgacaatatcctcaccctgatacggaccctggtgaccggaggagccacgccggagctggaggctctgattgctgaggaaaacgcccttagaggtggctacagcaccccgcagacactggccaatagggaccgctgccgcgtggcccagttagctctgctcgatgggccatttgcggacttaggggatggtggttgttatggtgatctgttctgcaaagctctgaaaacatataatatgctttgttttggaatttaccggctgagagatgctcacctcagcacccccagtcagtgcacaaagaggtatgtcatcaccaacccgccctatgagtttgagctcgtgccgacggacctgatcttctgcttaatgcagtttgaccacaatgccggccagtcccgggccagcctgtcccattcctcccactcgtcgcagtcctccagcaagaagagctcctctgttcactccatcccatccacagcaaaccgacagaaccggcccaagtccagggagtcccgggacaaacagaagtacgtgcaggaagagcggctttga

SEQ ID NO: 23238 - DNA, 3690 bp, Homo sapiens
  source 1..3690: mol_type = unassigned DNA
cttcttcctcctcctcttcctcctcgtcctcggtccacgagcccaagatggatgcgctcatcatcccggtgaccatggaggtgccgtgcgacagccggggccaacgcatgtggtgggctttcctggcctcctccatggtgactttcttcgggggcctcttcatcatcttgctctggcggacgctcaagtacctgtggaccgtgtgctgccactgcgggggcaagacgaaggaggcccagaagattaacaatggctcaagccaggcggatggcactctcaaaccagtggatgaaaaagaggaggcagtggccgccgaggtcggctggatgacctccgtgaaggactgggcgggggtgatgatatccgcccagacactgactggcagagtcctggttgtcttagtctttgctctcagcatcggtgcacttgtaatatacttcatagattcatcaaacccaatagaatcctgccagaatttctacaaagatttcacattacagatcgacatggctttcaacgtgttcttccttctctacttcggcttgcggtttattgcagccaacgataaattgtggttctggctggaagtgaactctgtagtggatttcttcacggtgccccccgtgtttgtgtctgtgtacttaaacagaagttggcttggtttgagatttttaagagctctgagactgatacagttttcagaaattttgcagtttctgaatattcttaaaacaagtaattccatcaagctggtgaatctgctctccatatttatcagcacgtggctgactgcagccgggttcatccatttggtggagaattcaggggacccatgggaaaatttccaaaacaaccaggctctcacctactgggaatgtgtctatttactcatggtcacaatgtccaccgttggttatggggatgtttatgcaaaaaccacacttgggcgcctcttcatggtcttcttcatcctcgggggactggccatgtttgccagctacgtccctgaaatcatagagttaataggaaaccgcaagaaatacgggggctcctatagtgcggttagtggaagaaagcacattgtggtctgcggacacatcactctggagagtgtttccaacttcctgaaggactttctgcacaaggaccgggatgacgtcaatgtggagatcgtttttcttcacaacatctcccccaacctggagcttgaagctctgttcaaacgacattttactcaggtggaattttatcagggttccgtcctcaatccacatgatcttgcaagagtcaagatagagtcagcagatgcatgcctgatccttgccaacaagtactgcgctgacccggatgcggaggatgcctcgaatatcatgagagtaatctccataaagaactaccatccgaagataagaatcatcactcaaatgctgcagtatcacaacaaggcccatctgctaaacatcccgagctggaattggaaagaaggtgatgacgcaatctgcctcgcagagttgaagttgggcttcatagcccagagctgcctggctcaaggcctctccaccatgcttgccaacctcttctccatgaggtcattcataaagattgaggaagacacatggcagaaatactacttggaaggagtctcaaatgaaatgtacacagaatatctctccagtgccttcgtgggtctgtccttccctactgtttgtgagctgtgttttgtgaagctcaagctcctaatgatagccattgagtacaagtctgccaaccgagagagccgtatattaattaatcctggaaaccatcttaagatccaagaaggtactttaggatttttcatcgcaagtgatgccaaagaagttaaaagggcatttttttactgcaaggcctgtcatgatgacatcacagatcccaaaagaataaaaaaatgtggctgcaaacggcttgaagatgagcagccgtcaacactatcaccaaaaaaaaagcaacggaatggaggcatgcggaactcacccaacacctcgcctaagctgatgaggcatgaccccttgttaattcctggcaatgatcagattgacaacatggactccaatgtgaagaagtacgactctactgggatgtttcactggtgtgcacccaaggagatagagaaagtcatcctgactcgaagtgaagctgccatgaccgtcctgagtggccatgtcgtggtctgcatctttggcgacgtcagctcagccctgatcggcctccggaacctggtgatgccgctccgtgccagcaactttcattaccatgagctcaagcacattgtgtttgtgggctctattgagtacctcaagcgggaatgggagacgcttcataacttccccaaagtgtccatattgcctggtacgccattaagtcgggctgatttaagggctgtcaacatcaacctctgtgacatgtgcgttatcctgtcagccaatcagaataatattgatgatacttcgctgcaggacaaggaatgcatcttggcgtcactcaacatcaaatctatgcagtttgatgacagcatcggagtcttgcaggctaattcccaagggttcacacctccaggaatggatagatcctctccagataacagcccagtgcacgggatgttacgtcaaccatccatcacaactggggtcaacatccccatcatcactgaactagtgaacgatactaatgttcagtttttggaccaagacgatgatgatgaccctgatacagaactgtacctcacgcagccctttgcctgtgggacagcatttgccgtcagtgtcctggactcactcatgagcgcgacgtacttcaatgacaatatcctcaccctgatacggaccctggtgaccggaggagccacgccggagctggaggctctgattgctgaggaaaacgcccttagaggtggctacagcaccccgcagacactggccaatagggaccgctgccgcgtggcccagttagctctgctcgatgggccatttgcggacttaggggatggtggttgttatggtgatctgttctgcaaagctctgaaaacatataatatgctttgttttggaatttaccggctgagagatgctcacctcagcacccccagtcagtgcacaaagaggtatgtcatcaccaacccgccctatgagtttgagctcgtgccgacggacctgatcttctgcttaatgcagtttgaccacaatgccggccagtcccgggccagcctgtcccattcctcccactcgtcgcagtcctccagcaagaagagctcctctgttcactccatcccatccacagcaaaccgacagaaccggcccaagtccagggagtcccgggacaaacagaatgcaacaaggatgaatagaatgggccaagcagaaaagaaatggtttacagatgaaccggataatgcctatcccagaaacattcaaatcaagcccatgagtacccacatggctaaccagatcaaccaatataaatccacaagcagcttgattccaccaatcagagaagttgaagatgaatgttgactcccaggagaccagaactatttttttaaagcctgacaaacttcataaatggtgatgtgacttttcttcttacatgctgaatcactggtggaaacgttaggataagcaagaattgccagaaaataaagtagacagatctttc

SEQ ID NO: 23239 - DNA, 3646 bp, Homo sapiens
  source 1..3646: mol_type = unassigned DNA
cccaagatggatgcgctcatcatcccggtgaccatggaggtgccgtgcgacagccggggccaacgcatgtggtgggctttcctggcctcctccatggtgactttcttcgggggcctcttcatcatcttgctctggcggacgctcaagtacctgtggaccgtgtgctgccactgcgggggcaagacgaaggaggcccagaagattaacaatggctcaagccaggcggatggcactctcaaaccagtggatgaaaaagaggaggcagtggccgccgaggtcggctggatgacctccgtgaaggactgggcgggggtgatgatatccgcccagacactgactggcagagtcctggttgtcttagtctttgctctcagcatcggtgcacttgtaatatacttcatagattcatcaaacccaatagaatcctgccagaatttctacaaagatttcacattacagatcgacatggctttcaacgtgttcttccttctctacttcggcttgcggtttattgcagccaacgataaattgtggttctggctggaagtgaactctgtagtggatttcttcacggtgccccccgtgtttgtgtctgtgtacttaaacagaagttggcttggtttgagatttttaagagctctgagactgatacagttttcagaaattttgcagtttctgaatattcttaaaacaagtaattccatcaagctggtgaatctgctctccatatttatcagcacgtggctgactgcagccgggttcatccatttggtggagaattcaggggacccatgggaaaatttccaaaacaaccaggctctcacctactgggaatgtgtctatttactcatggtcacaatgtccaccgttggttatggggatgtttatgcaaaaaccacacttgggcgcctcttcatggtcttcttcatcctcgggggactggccatgtttgccagctacgtccctgaaatcatagagttaataggaaaccgcaagaaatacgggggctcctatagtgcggttagtggaagaaagcacattgtggtctgcggacacatcactctggagagtgtttccaacttcctgaaggactttctgcacaaggaccgggatgacgtcaatgtggagatcgtttttcttcacaacatctcccccaacctggagcttgaagctctgttcaaacgacattttactcaggtggaattttatcagggttccgtcctcaatccacatgatcttgcaagagtcaagatagagtcagcagatgcatgcctgatccttgccaacaagtactgcgctgacccggatgcggaggatgcctcgaatatcatgagagtaatctccataaagaactaccatccgaagataagaatcatcactcaaatgctgcagtatcacaacaaggcccatctgctaaacatcccgagctggaattggaaagaaggtgatgacgcaatctgcctcgcagagttgaagttgggcttcatagcccagagctgcctggctcaaggcctctccaccatgcttgccaacctcttctccatgaggtcattcataaagattgaggaagacacatggcagaaatactacttggaaggagtctcaaatgaaatgtacacagaatatctctccagtgccttcgtgggtctgtccttccctactgtttgtgagctgtgttttgtgaagctcaagctcctaatgatagccattgagtacaagtctgccaaccgagagagccgtatattaattaatcctggaaaccatcttaagatccaagaaggtactttaggatttttcatcgcaagtgatgccaaagaagttaaaagggcatttttttactgcaaggcctgtcatgatgacatcacagatcccaaaagaataaaaaaatgtggctgcaaacggcttgaagatgagcagccgtcaacactatcaccaaaaaaaaagcaacggaatggaggcatgcggaactcacccaacacctcgcctaagctgatgaggcatgaccccttgttaattcctggcaatgatcagattgacaacatggactccaatgtgaagaagtacgactctactgggatgtttcactggtgtgcacccaaggagatagagaaagtcatcctgactcgaagtgaagctgccatgaccgtcctgagtggccatgtcgtggtctgcatctttggcgacgtcagctcagccctgatcggcctccggaacctggtgatgccgctccgtgccagcaactttcattaccatgagctcaagcacattgtgtttgtgggctctattgagtacctcaagcgggaatgggagacgcttcataacttccccaaagtgtccatattgcctggtacgccattaagtcgggctgatttaagggctgtcaacatcaacctctgtgacatgtgcgttatcctgtcagccaatcagaataatattgatgatacttcgctgcaggacaaggaatgcatcttggcgtcactcaacatcaaatctatgcagtttgatgacagcatcggagtcttgcaggctaattcccaagggttcacacctccaggaatggatagatcctctccagataacagcccagtgcacgggatgttacgtcaaccatccatcacaactggggtcaacatccccatcatcactgaactagtgaacgatactaatgttcagtttttggaccaagacgatgatgatgaccctgatacagaactgtacctcacgcagccctttgcctgtgggacagcatttgccgtcagtgtcctggactcactcatgagcgcgacgtacttcaatgacaatatcctcaccctgatacggaccctggtgaccggaggagccacgccggagctggaggctctgattgctgaggaaaacgcccttagaggtggctacagcaccccgcagacactggccaatagggaccgctgccgcgtggcccagttagctctgctcgatgggccatttgcggacttaggggatggtggttgttatggtgatctgttctgcaaagctctgaaaacatataatatgctttgttttggaatttaccggctgagagatgctcacctcagcacccccagtcagtgcacaaagaggtatgtcatcaccaacccgccctatgagtttgagctcgtgccgacggacctgatcttctgcttaatgcagtttgaccacaatgccggccagtcccgggccagcctgtcccattcctcccactcgtcgcagtcctccagcaagaagagctcctctgttcactccatcccatccacagcaaaccgacagaaccggcccaagtccagggagtcccgggacaaacagaatgcaacaaggatgaatagaatgggccaagaaaagaaatggtttacagatgaaccggataatgcctatcccagaaacattcaaatcaagcccatgagtacccacatggctaaccagatcaaccaatataaatccacaagcagcttgattccaccaatcagagaagttgaagatgaatgttgactcccaggagaccagaactatttttttaaagcctgacaaacttcataaatggtgatgtgacttttcttcttacatgctgaatcactggtggaaacgttaggataagcaagaattgccagaaaataaagtagacagatctttc

SEQ ID NO: 23240 - DNA, 3774 bp, Homo sapiens
  source 1..3774: mol_type = unassigned DNA
cggcggcggcggcggcggcggaggcagcagtcttagaatgagtagcaatatccacgcgaaccatctcagcctagacgcgtcctcctcctcctcctcctcctcttcctcttcttcttcttcctcctcctcttcctcctcgtcctcggtccacgagcccaagatggatgcgctcatcatcccggtgaccatggaggtgccgtgcgacagccggggccaacgcatgtggtgggctttcctggcctcctccatggtgactttcttcgggggcctcttcatcatcttgctctggcggacgctcaagtacctgtggaccgtgtgctgccactgcgggggcaagacgaaggaggcccagaagattaacaatggctcaagccaggcggatggcactctcaaaccagtggatgaaaaagaggaggcagtggccgccgaggtcggctggatgacctccgtgaaggactgggcgggggtgatgatatccgcccagacactgactggcagagtcctggttgtcttagtctttgctctcagcatcggtgcacttgtaatatacttcatagattcatcaaacccaatagaatcctgccagaatttctacaaagatttcacattacagatcgacatggctttcaacgtgttcttccttctctacttcggcttgcggtttattgcagccaacgataaattgtggttctggctggaagtgaactctgtagtggatttcttcacggtgccccccgtgtttgtgtctgtgtacttaaacagaagttggcttggtttgagatttttaagagctctgagactgatacagttttcagaaattttgcagtttctgaatattcttaaaacaagtaattccatcaagctggtgaatctgctctccatatttatcagcacgtggctgactgcagccgggttcatccatttggtggagaattcaggggacccatgggaaaatttccaaaacaaccaggctctcacctactgggaatgtgtctatttactcatggtcacaatgtccaccgttggttatggggatgtttatgcaaaaaccacacttgggcgcctcttcatggtcttcttcatcctcgggggactggccatgtttgccagctacgtccctgaaatcatagagttaataggaaaccgcaagaaatacgggggctcctatagtgcggttagtggaagaaagcacattgtggtctgcggacacatcactctggagagtgtttccaacttcctgaaggactttctgcacaaggaccgggatgacgtcaatgtggagatcgtttttcttcacaacatctcccccaacctggagcttgaagctctgttcaaacgacattttactcaggtggaattttatcagggttccgtcctcaatccacatgatcttgcaagagtcaagatagagtcagcagatgcatgcctgatccttgccaacaagtactgcgctgacccggatgcggaggatgcctcgaatatcatgagagtaatctccataaagaactaccatccgaagataagaatcatcactcaaatgctgcagtatcacaacaaggcccatctgctaaacatcccgagctggaattggaaagaaggtgatgacgcaatctgcctcgcagagttgaagttgggcttcatagcccagagctgcctggctcaaggcctctccaccatgcttgccaacctcttctccatgaggtcattcataaagattgaggaagacacatggcagaaatactacttggaaggagtctcaaatgaaatgtacacagaatatctctccagtgccttcgtgggtctgtccttccctactgtttgtgagctgtgttttgtgaagctcaagctcctaatgatagccattgagtacaagtctgccaaccgagagagccgtatattaattaatcctggaaaccatcttaagatccaagaaggtactttaggatttttcatcgcaagtgatgccaaagaagttaaaagggcatttttttactgcaaggcctgtcatgatgacatcacagatcccaaaagaataaaaaaatgtggctgcaaacggcttgaagatgagcagccgtcaacactatcaccaaaaaaaaagcaacggaatggaggcatgcggaactcacccaacacctcgcctaagctgatgaggcatgaccccttgttaattcctggcaatgatcagattgacaacatggactccaatgtgaagaagtacgactctactgggatgtttcactggtgtgcacccaaggagatagagaaagtcatcctgactcgaagtgaagctgccatgaccgtcctgagtggccatgtcgtggtctgcatctttggcgacgtcagctcagccctgatcggcctccggaacctggtgatgccgctccgtgccagcaactttcattaccatgagctcaagcacattgtgtttgtgggctctattgagtacctcaagcgggaatgggagacgcttcataacttccccaaagtgtccatattgcctggtacgccattaagtcgggctgatttaagggctgtcaacatcaacctctgtgacatgtgcgttatcctgtcagccaatcagaataatattgatgatacttcgctgcaggacaaggaatgcatcttggcgtcactcaacatcaaatctatgcagtttgatgacagcatcggagtcttgcaggctaattcccaagggttcacacctccaggaatggatagatcctctccagataacagcccagtgcacgggatgttacgtcaaccatccatcacaactggggtcaacatccccatcatcactgaactagtgaacgatactaatgttcagtttttggaccaagacgatgatgatgaccctgatacagaactgtacctcacgcagccctttgcctgtgggacagcatttgccgtcagtgtcctggactcactcatgagcgcgacgtacttcaatgacaatatcctcaccctgatacggaccctggtgaccggaggagccacgccggagctggaggctctgattgctgaggaaaacgcccttagaggtggctacagcaccccgcagacactggccaatagggaccgctgccgcgtggcccagttagctctgctcgatgggccatttgcggacttaggggatggtggttgttatggtgatctgttctgcaaagctctgaaaacatataatatgctttgttttggaatttaccggctgagagatgctcacctcagcacccccagtcagtgcacaaagaggtatgtcatcaccaacccgccctatgagtttgagctcgtgccgacggacctgatcttctgcttaatgcagtttgaccacaatgccggccagtcccgggccagcctgtcccattcctcccactcgtcgcagtcctccagcaagaagagctcctctgttcactccatcccatccacagcaaaccgacagaaccggcccaagtccagggagtcccgggacaaacagaacagaaaagaaatggtttacagatgaaccggataatgcctatcccagaaacattcaaatcaagcccatgagtacccacatggctaaccagatcaaccaatataaatccacaagcagcttgattccaccaatcagagaagttgaagatgaatgttgactcccaggagaccagaactatttttttaaagcctgacaaacttcataaatggtgatgtgacttttcttcttacatgctgaatcactggtggaaacgttaggataagcaagaattgccagaaaataaagtagacagatctttc

SEQ ID NO: 23241 - DNA, 3788 bp, Homo sapiens
  source 1..3788: mol_type = unassigned DNA
atggatgcgctcatcatcccggtgaccatggaggtgccgtgcgacagccggggccaacgcatgtggtgggctttcctggcctcctccatggtgactttcttcgggggcctcttcatcatcttgctctggcggacgctcaagtacctgtggaccgtgtgctgccactgcgggggcaagacgaaggaggcccagaagattaacaatggctcaagccaggcggatggcactctcaaaccagtggatgaaaaagaggaggcagtggccgccgaggtcggctggatgacctccgtgaaggactgggcgggggtgatgatatccgcccagacactgactggcagagtcctggttgtcttagtctttgctctcagcatcggtgcacttgtaatatacttcatagattcatcaaacccaatagaatcctgccagaatttctacaaagatttcacattacagatcgacatggctttcaacgtgttcttccttctctacttcggcttgcggtttattgcagccaacgataaattgtggttctggctggaagtgaactctgtagtggatttcttcacggtgccccccgtgtttgtgtctgtgtacttaaacagaagttggcttggtttgagatttttaagagctctgagactgatacagttttcagaaattttgcagtttctgaatattcttaaaacaagtaattccatcaagctggtgaatctgctctccatatttatcagcacgtggctgactgcagccgggttcatccatttggtggagaattcaggggacccatgggaaaatttccaaaacaaccaggctctcacctactgggaatgtgtctatttactcatggtcacaatgtccaccgttggttatggggatgtttatgcaaaaaccacacttgggcgcctcttcatggtcttcttcatcctcgggggactggccatgtttgccagctacgtccctgaaatcatagagttaataggaaaccgcaagaaatacgggggctcctatagtgcggttagtggaagaaagcacattgtggtctgcggacacatcactctggagagtgtttccaacttcctgaaggactttctgcacaaggaccgggatgacgtcaatgtggagatcgtttttcttcacaacatctcccccaacctggagcttgaagctctgttcaaacgacattttactcaggtggaattttatcagggttccgtcctcaatccacatgatcttgcaagagtcaagatagagtcagcagatgcatgcctgatccttgccaacaagtactgcgctgacccggatgcggaggatgcctcgaatatcatgagagtaatctccataaagaactaccatccgaagataagaatcatcactcaaatgctgcagtatcacaacaaggcccatctgctaaacatcccgagctggaattggaaagaaggtgatgacgcaatctgcctcgcagagttgaagttgggcttcatagcccagagctgcctggctcaaggcctctccaccatgcttgccaacctcttctccatgaggtcattcataaagattgaggaagacacatggcagaaatactacttggaaggagtctcaaatgaaatgtacacagaatatctctccagtgccttcgtgggtctgtccttccctactgtttgtgagctgtgttttgtgaagctcaagctcctaatgatagccattgagtacaagtctgccaaccgagagagccgtatattaattaatcctggaaaccatcttaagatccaagaaggtactttaggatttttcatcgcaagtgatgccaaagaagttaaaagggcatttttttactgcaaggcctgtcatgatgacatcacagatcccaaaagaataaaaaaatgtggctgcaaacggcccaagatgtccatctacaagagaatgagacgggcatgttgttttgattgcggacgttctgagcgtgactgctcatgcatgtcaggccgtgtgcgtggtaacgtggacacccttgagagagccttcccactttcttctgtctctgttaatgattgctccaccagtttccgtgcctttgaagatgagcagccgtcaacactatcaccaaaaaaaaagcaacggaatggaggcatgcggaactcacccaacacctcgcctaagctgatgaggcatgaccccttgttaattcctggcaatgatcagattgacaacatggactccaatgtgaagaagtacgactctactgggatgtttcactggtgtgcacccaaggagatagagaaagtcatcctgactcgaagtgaagctgccatgaccgtcctgagtggccatgtcgtggtctgcatctttggcgacgtcagctcagccctgatcggcctccggaacctggtgatgccgctccgtgccagcaactttcattaccatgagctcaagcacattgtgtttgtgggctctattgagtacctcaagcgggaatgggagacgcttcataacttccccaaagtgtccatattgcctggtacgccattaagtcgggctgatttaagggctgtcaacatcaacctctgtgacatgtgcgttatcctgtcagccaatcagaataatattgatgatacttcgctgcaggacaaggaatgcatcttggcgtcactcaacatcaaatctatgcagtttgatgacagcatcggagtcttgcaggctaattcccaagggttcacacctccaggaatggatagatcctctccagataacagcccagtgcacgggatgttacgtcaaccatccatcacaactggggtcaacatccccatcatcactgaactagtgaacgatactaatgttcagtttttggaccaagacgatgatgatgaccctgatacagaactgtacctcacgcagccctttgcctgtgggacagcatttgccgtcagtgtcctggactcactcatgagcgcgacgtacttcaatgacaatatcctcaccctgatacggaccctggtgaccggaggagccacgccggagctggaggctctgattgctgaggaaaacgcccttagaggtggctacagcaccccgcagacactggccaatagggaccgctgccgcgtggcccagttagctctgctcgatgggccatttgcggacttaggggatggtggttgttatggtgatctgttctgcaaagctctgaaaacatataatatgctttgttttggaatttaccggctgagagatgctcacctcagcacccccagtcagtgcacaaagaggtatgtcatcaccaacccgccctatgagtttgagctcgtgccgacggacctgatcttctgcttaatgcagtttgaccacaatgccggccagtcccgggccagcctgtcccattcctcccactcgtcgcagtcctccagcaagaagagctcctctgttcactccatcccatccacagcaaaccgacagaaccggcccaagtccagggagtcccgggacaaacagaacagaaaagaaatggtttacagatgaaccggataatgcctatcccagaaacattcaaatcaagcccatgagtacccacatggctaaccagatcaaccaatataaatccacaagcagcttgattccaccaatcagagaagttgaagatgaatgttgactcccaggagaccagaactatttttttaaagcctgacaaacttcataaatggtgatgtgacttttcttcttacatgctgaatcactggtggaaacgttaggataagcaagaattgccagaaaataaagtagacagatctttc

SEQ ID NO: 23242 - DNA, 4157 bp, Homo sapiens
  source 1..4157: mol_type = unassigned DNA
ggcgcagaccccgggcgcgggcggcccgcggcgccccctggctctcggcgctcggggccagcgcagcccggggcgagcggggcgcgggccggggagggggagctgcccgcgcactccatccccctcccccccgggcgggcggcggcggctcgctgtatatatctcggcgcaccccgccaggtcgcgcacagcgccccgagcccaggcgcctccccgcccccctcccgcgctccgcggcggcggcggcggcggcagcagtagcagcaatatggctgttgatgggtgtttggggtggcgctggcggcgggaggagctcccccgagcccctgcgccggctgcccgttgctagctatggcaaatggtggcggcggcggcggcggcagcagcggcggcggcggcggcggcggaggcagcagtcttagaatgagtagcaatatccacgcgaaccatctcagcctagacgcgtcctcctcctcctcctcctcctcttcctcttcttcttcttcctcctcctcttcctcctcgtcctcggtccacgagcccaagatggatgcgctcatcatcccggtgaccatggaggtgccgtgcgacagccggggccaacgcatgtggtgggctttcctggcctcctccatggtgactttcttcgggggcctcttcatcatcttgctctggcggacgctcaagtacctgtggaccgtgtgctgccactgcgggggcaagacgaaggaggcccagaagattaacaatggctcaagccaggcggatggcactctcaaaccagtggatgaaaaagaggaggcagtggccgccgaggtcggctggatgacctccgtgaaggactgggcgggggtgatgatatccgcccagacactgactggcagagtcctggttgtcttagtctttgctctcagcatcggtgcacttgtaatatacttcatagattcatcaaacccaatagaatcctgccagaatttctacaaagatttcacattacagatcgacatggctttcaacgtgttcttccttctctacttcggcttgcggtttattgcagccaacgataaattgtggttctggctggaagtgaactctgtagtggatttcttcacggtgccccccgtgtttgtgtctgtgtacttaaacagaagttggcttggtttgagatttttaagagctctgagactgatacagttttcagaaattttgcagtttctgaatattcttaaaacaagtaattccatcaagctggtgaatctgctctccatatttatcagcacgtggctgactgcagccgggttcatccatttggtggagaattcaggggacccatgggaaaatttccaaaacaaccaggctctcacctactgggaatgtgtctatttactcatggtcacaatgtccaccgttggttatggggatgtttatgcaaaaaccacacttgggcgcctcttcatggtcttcttcatcctcgggggactggccatgtttgccagctacgtccctgaaatcatagagttaataggaaaccgcaagaaatacgggggctcctatagtgcggttagtggaagaaagcacattgtggtctgcggacacatcactctggagagtgtttccaacttcctgaaggactttctgcacaaggaccgggatgacgtcaatgtggagatcgtttttcttcacaacatctcccccaacctggagcttgaagctctgttcaaacgacattttactcaggtggaattttatcagggttccgtcctcaatccacatgatcttgcaagagtcaagatagagtcagcagatgcatgcctgatccttgccaacaagtactgcgctgacccggatgcggaggatgcctcgaatatcatgagagtaatctccataaagaactaccatccgaagataagaatcatcactcaaatgctgcagtatcacaacaaggcccatctgctaaacatcccgagctggaattggaaagaaggtgatgacgcaatctgcctcgcagagttgaagttgggcttcatagcccagagctgcctggctcaaggcctctccaccatgcttgccaacctcttctccatgaggtcattcataaagattgaggaagacacatggcagaaatactacttggaaggagtctcaaatgaaatgtacacagaatatctctccagtgccttcgtgggtctgtccttccctactgtttgtgagctgtgttttgtgaagctcaagctcctaatgatagccattgagtacaagtctgccaaccgagagagccgtatattaattaatcctggaaaccatcttaagatccaagaaggtactttaggatttttcatcgcaagtgatgccaaagaagttaaaagggcatttttttactgcaaggcctgtcatgatgacatcacagatcccaaaagaataaaaaaatgtggctgcaaacggcttgaagatgagcagccgtcaacactatcaccaaaaaaaaagcaacggaatggaggcatgcggaactcacccaacacctcgcctaagctgatgaggcatgaccccttgttaattcctggcaatgatcagattgacaacatggactccaatgtgaagaagtacgactctactgggatgtttcactggtgtgcacccaaggagatagagaaagtcatcctgactcgaagtgaagctgccatgaccgtcctgagtggccatgtcgtggtctgcatctttggcgacgtcagctcagccctgatcggcctccggaacctggtgatgccgctccgtgccagcaactttcattaccatgagctcaagcacattgtgtttgtgggctctattgagtacctcaagcgggaatgggagacgcttcataacttccccaaagtgtccatattgcctggtacgccattaagtcgggctgatttaagggctgtcaacatcaacctctgtgacatgtgcgttatcctgtcagccaatcagaataatattgatgatacttcgctgcaggacaaggaatgcatcttggcgtcactcaacatcaaatctatgcagtttgatgacagcatcggagtcttgcaggctaattcccaagggttcacacctccaggaatggatagatcctctccagataacagcccagtgcacgggatgttacgtcaaccatccatcacaactggggtcaacatccccatcatcactgaactagtgaacgatactaatgttcagtttttggaccaagacgatgatgatgaccctgatacagaactgtacctcacgcagccctttgcctgtgggacagcatttgccgtcagtgtcctggactcactcatgagcgcgacgtacttcaatgacaatatcctcaccctgatacggaccctggtgaccggaggagccacgccggagctggaggctctgattgctgaggaaaacgcccttagaggtggctacagcaccccgcagacactggccaatagggaccgctgccgcgtggcccagttagctctgctcgatgggccatttgcggacttaggggatggtggttgttatggtgatctgttctgcaaagctctgaaaacatataatatgctttgttttggaatttaccggctgagagatgctcacctcagcacccccagtcagtgcacaaagaggtatgtcatcaccaacccgccctatgagtttgagctcgtgccgacggacctgatcttctgcttaatgcagtttgaccacaatgccggccagtcccgggccagcctgtcccattcctcccactcgtcgcagtcctccagcaagaagagctcctctgttcactccatcccatccacagcaaaccgacagaaccggcccaagtccagggagtcccgggacaaacagaaaaaagaaatggtttacagatgaaccggataatgcctatcccagaaacattcaaatcaagcccatgagtacccacatggctaaccagatcaaccaatataaatccacaagcagcttgattccaccaatcagagaagttgaagatgaatgttgactcccaggagaccagaactatttttttaaagcctgacaaacttcataaatggtgatgtgacttttcttcttacatgctgaatcactggtggaaacgttaggataagcaagaattgccagaaaataaagtagacagatctttc

SEQ ID NO: 23243 - DNA, 4617 bp, Homo sapiens
  source 1..4617: mol_type = unassigned DNA
gcgagcggaggccgaggggctcagcggcgtggcgacaggactagggggtcccgagaacatgggctagcaggcggccacgggccggcggccggacgcggtgaacctgccgcggccgggcgcgcactggcgcggcgagccggagccgagcgcagccgggggaggagggctggcgcaggggcgcccgggcggagggggccgattatccattattaacgagttaccacctaataagcggagagcggctcgttagccgcgcgggaggcgctcggggaagggggtcaccggccgagcgcagcgcacacccgtggcgcacggcgggcggcgcggcgccgaggacacccgggaccgcgcgcggagccggggcgggcccgggggcggcgcagaccccgggcgcgggcggcccgcggcgccccctggctctcggcgctcggggccagcgcagcccggggcgagcggggcgcgggccggggagggggagctgcccgcgcactccatccccctcccccccgggcgggcggcggcggctcgctgtatatatctcggcgcaccccgccaggtcgcgcacagcgccccgagcccaggcgcctccccgcccccctcccgcgctccgcggcggcggcggcggcggcagcagtagcagcaatatggctgttgatgggtgtttggggtggcgctggcggcgggaggagctcccccgagcccctgcgccggctgcccgttgctagctatggcaaatggtggcggcggcggcggcggcagcagcggcggcggcggcggcggcggaggcagcagtcttagaatgagtagcaatatccacgcgaaccatctcagcctagacgcgtcctcctcctcctcctcctcctcttcctcttcttcttcttcctcctcctcttcctcctcgtcctcggtccacgagcccaagatggatgcgctcatcatcccggtgaccatggaggtgccgtgcgacagccggggccaacgcatgtggtgggctttcctggcctcctccatggtgactttcttcgggggcctcttcatcatcttgctctggcggacgctcaagtacctgtggaccgtgtgctgccactgcgggggcaagacgaaggaggcccagaagattaacaatggctcaagccaggcggatggcactctcaaaccagtggatgaaaaagaggaggcagtggccgccgaggtcggctggatgacctccgtgaaggactgggcgggggtgatgatatccgcccagacactgactggcagagtcctggttgtcttagtctttgctctcagcatcggtgcacttgtaatatacttcatagattcatcaaacccaatagaatcctgccagaatttctacaaagatttcacattacagatcgacatggctttcaacgtgttcttccttctctacttcggcttgcggtttattgcagccaacgataaattgtggttctggctggaagtgaactctgtagtggatttcttcacggtgccccccgtgtttgtgtctgtgtacttaaacagaagttggcttggtttgagatttttaagagctctgagactgatacagttttcagaaattttgcagtttctgaatattcttaaaacaagtaattccatcaagctggtgaatctgctctccatatttatcagcacgtggctgactgcagccgggttcatccatttggtggagaattcaggggacccatgggaaaatttccaaaacaaccaggctctcacctactgggaatgtgtctatttactcatggtcacaatgtccaccgttggttatggggatgtttatgcaaaaaccacacttgggcgcctcttcatggtcttcttcatcctcgggggactggccatgtttgccagctacgtccctgaaatcatagagttaataggaaaccgcaagaaatacgggggctcctatagtgcggttagtggaagaaagcacattgtggtctgcggacacatcactctggagagtgtttccaacttcctgaaggactttctgcacaaggaccgggatgacgtcaatgtggagatcgtttttcttcacaacatctcccccaacctggagcttgaagctctgttcaaacgacattttactcaggtggaattttatcagggttccgtcctcaatccacatgatcttgcaagagtcaagatagagtcagcagatgcatgcctgatccttgccaacaagtactgcgctgacccggatgcggaggatgcctcgaatatcatgagagtaatctccataaagaactaccatccgaagataagaatcatcactcaaatgctgcagtatcacaacaaggcccatctgctaaacatcccgagctggaattggaaagaaggtgatgacgcaatctgcctcgcagagttgaagttgggcttcatagcccagagctgcctggctcaaggcctctccaccatgcttgccaacctcttctccatgaggtcattcataaagattgaggaagacacatggcagaaatactacttggaaggagtctcaaatgaaatgtacacagaatatctctccagtgccttcgtgggtctgtccttccctactgtttgtgagctgtgttttgtgaagctcaagctcctaatgatagccattgagtacaagtctgccaaccgagagagccgtatattaattaatcctggaaaccatcttaagatccaagaaggtactttaggatttttcatcgcaagtgatgccaaagaagttaaaagggcatttttttactgcaaggcctgtcatgatgacatcacagatcccaaaagaataaaaaaatgtggctgcaaacggcttgaagatgagcagccgtcaacactatcaccaaaaaaaaagcaacggaatggaggcatgcggaactcacccaacacctcgcctaagctgatgaggcatgaccccttgttaattcctggcaatgatcagattgacaacatggactccaatgtgaagaagtacgactctactgggatgtttcactggtgtgcacccaaggagatagagaaagtcatcctgactcgaagtgaagctgccatgaccgtcctgagtggccatgtcgtggtctgcatctttggcgacgtcagctcagccctgatcggcctccggaacctggtgatgccgctccgtgccagcaactttcattaccatgagctcaagcacattgtgtttgtgggctctattgagtacctcaagcgggaatgggagacgcttcataacttccccaaagtgtccatattgcctggtacgccattaagtcgggctgatttaagggctgtcaacatcaacctctgtgacatgtgcgttatcctgtcagccaatcagaataatattgatgatacttcgctgcaggacaaggaatgcatcttggcgtcactcaacatcaaatctatgcagtttgatgacagcatcggagtcttgcaggctaattcccaagggttcacacctccaggaatggatagatcctctccagataacagcccagtgcacgggatgttacgtcaaccatccatcacaactggggtcaacatccccatcatcactgaactagctaaaccgggcaagttgcctttggtatcagtcaatcaggaaaaaaacagtgggacgcacattctaatgataactgaactggtgaacgatactaatgttcagtttttggaccaagacgatgatgatgaccctgatacagaactgtacctcacgcagccctttgcctgtgggacagcatttgccgtcagtgtcctggactcactcatgagcgcgacgtacttcaatgacaatatcctcaccctgatacggaccctggtgaccggaggagccacgccggagctggaggctctgattgctgaggaaaacgcccttagaggtggctacagcaccccgcagacactggccaatagggaccgctgccgcgtggcccagttagctctgctcgatgggccatttgcggacttaggggatggtggttgttatggtgatctgttctgcaaagctctgaaaacatataatatgctttgttttggaatttaccggctgagagatgctcacctcagcacccccagtcagtgcacaaagaggtatgtcatcaccaacccgccctatgagtttgagctcgtgccgacggacctgatcttctgcttaatgcagtttgaccacaatgccggccagtcccgggccagcctgtcccattcctcccactcgtcgcagtcctccagcaagaagagctcctctgttcactccatcccatccacagcaaaccgacagaaccggcccaagtccagggagtcccgggacaaacagaacagaaaagaaatggtttacagatgaaccggataatgcctatcccagaaacattcaaatcaagcccatgagtacccacatggctaaccagatcaaccaatataaatccacaagcagcttgattccaccaatcagagaagttgaagatgaatgttgactcccaggagaccagaactatttttttaaagcctgacaaacttcataaatggtgatgtgacttttcttcttacatgctgaatcactggtggaaacgttaggataagcaagaattgccagaaaataaagtagacagatctttc

SEQ ID NO: 23244 - DNA, 3820 bp, Homo sapiens
  source 1..3820: mol_type = unassigned DNA
cccaagatggatgcgctcatcatcccggtgaccatggaggtgccgtgcgacagccggggccaacgcatgtggtgggctttcctggcctcctccatggtgactttcttcgggggcctcttcatcatcttgctctggcggacgctcaagtacctgtggaccgtgtgctgccactgcgggggcaagacgaaggaggcccagaagattaacaatggctcaagccaggcggatggcactctcaaaccagtggatgaaaaagaggaggcagtggccgccgaggtcggctggatgacctccgtgaaggactgggcgggggtgatgatatccgcccagacactgactggcagagtcctggttgtcttagtctttgctctcagcatcggtgcacttgtaatatacttcatagattcatcaaacccaatagaatcctgccagaatttctacaaagatttcacattacagatcgacatggctttcaacgtgttcttccttctctacttcggcttgcggtttattgcagccaacgataaattgtggttctggctggaagtgaactctgtagtggatttcttcacggtgccccccgtgtttgtgtctgtgtacttaaacagaagttggcttggtttgagatttttaagagctctgagactgatacagttttcagaaattttgcagtttctgaatattcttaaaacaagtaattccatcaagctggtgaatctgctctccatatttatcagcacgtggctgactgcagccgggttcatccatttggtggagaattcaggggacccatgggaaaatttccaaaacaaccaggctctcacctactgggaatgtgtctatttactcatggtcacaatgtccaccgttggttatggggatgtttatgcaaaaaccacacttgggcgcctcttcatggtcttcttcatcctcgggggactggccatgtttgccagctacgtccctgaaatcatagagttaataggaaaccgcaagaaatacgggggctcctatagtgcggttagtggaagaaagcacattgtggtctgcggacacatcactctggagagtgtttccaacttcctgaaggactttctgcacaaggaccgggatgacgtcaatgtggagatcgtttttcttcacaacatctcccccaacctggagcttgaagctctgttcaaacgacattttactcaggtggaattttatcagggttccgtcctcaatccacatgatcttgcaagagtcaagatagagtcagcagatgcatgcctgatccttgccaacaagtactgcgctgacccggatgcggaggatgcctcgaatatcatgagagtaatctccataaagaactaccatccgaagataagaatcatcactcaaatgctgcagtatcacaacaaggcccatctgctaaacatcccgagctggaattggaaagaaggtgatgacgcaatctgcctcgcagagttgaagttgggcttcatagcccagagctgcctggctcaaggcctctccaccatgcttgccaacctcttctccatgaggtcattcataaagattgaggaagacacatggcagaaatactacttggaaggagtctcaaatgaaatgtacacagaatatctctccagtgccttcgtgggtctgtccttccctactgtttgtgagctgtgttttgtgaagctcaagctcctaatgatagccattgagtacaagtctgccaaccgagagagccgtatattaattaatcctggaaaccatcttaagatccaagaaggtactttaggatttttcatcgcaagtgatgccaaagaagttaaaagggcatttttttactgcaaggcctgtcatgatgacatcacagatcccaaaagaataaaaaaatgtggctgcaaacggcccaagatgtccatctacaagagaatgagacgggcatgttgttttgattgcggacgttctgagcgtgactgctcatgcatgtcaggccgtgtgcgtggtaacgtggacacccttgagagagccttcccactttcttctgtctctgttaatgattgctccaccagtttccgtgcctttgaagatgagcagccgtcaacactatcaccaaaaaaaaagcaacggaatggaggcatgcggaactcacccaacacctcgcctaagctgatgaggcatgaccccttgttaattcctggcaatgatcagattgacaacatggactccaatgtgaagaagtacgactctactgggatgtttcactggtgtgcacccaaggagatagagaaagtcatcctgactcgaagtgaagctgccatgaccgtcctgagtggccatgtcgtggtctgcatctttggcgacgtcagctcagccctgatcggcctccggaacctggtgatgccgctccgtgccagcaactttcattaccatgagctcaagcacattgtgtttgtgggctctattgagtacctcaagcgggaatgggagacgcttcataacttccccaaagtgtccatattgcctggtacgccattaagtcgggctgatttaagggctgtcaacatcaacctctgtgacatgtgcgttatcctgtcagccaatcagaataatattgatgatacttcgctgcaggacaaggaatgcatcttggcgtcactcaacatcaaatctatgcagtttgatgacagcatcggagtcttgcaggctaattcccaagggttcacacctccaggaatggatagatcctctccagataacagcccagtgcacgggatgttacgtcaaccatccatcacaactggggtcaacatccccatcatcactgaactagtgaacgatactaatgttcagtttttggaccaagacgatgatgatgaccctgatacagaactgtacctcacgcagccctttgcctgtgggacagcatttgccgtcagtgtcctggactcactcatgagcgcgacgtacttcaatgacaatatcctcaccctgatacggaccctggtgaccggaggagccacgccggagctggaggctctgattgctgaggaaaacgcccttagaggtggctacagcaccccgcagacactggccaatagggaccgctgccgcgtggcccagttagctctgctcgatgggccatttgcggacttaggggatggtggttgttatggtgatctgttctgcaaagctctgaaaacatataatatgctttgttttggaatttaccggctgagagatgctcacctcagcacccccagtcagtgcacaaagaggtatgtcatcaccaacccgccctatgagtttgagctcgtgccgacggacctgatcttctgcttaatgcagtttgaccacaatgccggccagtcccgggccagcctgtcccattcctcccactcgtcgcagtcctccagcaagaagagctcctctgttcactccatcccatccacagcaaaccgacagaaccggcccaagtccagggagtcccgggacaaacagaatgcaacaaggatgaatagaatgggccaagaaaagaaatggtttacagatgaaccggataatgcctatcccagaaacattcaaatcaagcccatgagtacccacatggctaaccagatcaaccaatataaatccacaagcagcttgattccaccaatcagagaagttgaagatgaatgttgactcccaggagaccagaactatttttttaaagcctgacaaacttcataaatggtgatgtgacttttcttcttacatgctgaatcactggtggaaacgttaggataagcaagaattgccagaaaataaagtagacagatctttc

SEQ ID NO: 23245 - DNA, 3660 bp, Homo sapiens
  source 1..3660: mol_type = unassigned DNA
atggcaaatggtggcggcggcggcggcggcagcagcggcggcggcggcggcggcggaggcagcagtcttagaatgagtagcaatatccacgcgaaccatctcagcctagacgcgtcctcctcctcctcctcctcctcttcctcttcttcttcttcctcctcctcttcctcctcgtcctcggtccacgagcccaagatggatgcgctcatcatcccggtgaccatggaggtgccgtgcgacagccggggccaacgcatgtggtgggctttcctggcctcctccatggtgactttcttcgggggcctcttcatcatcttgctctggcggacgctcaagtacctgtggaccgtgtgctgccactgcgggggcaagacgaaggaggcccagaagattaacaatggctcaagccaggcggatggcactctcaaaccagtggatgaaaaagaggaggcagtggccgccgaggtcggctggatgacctccgtgaaggactgggcgggggtgatgatatccgcccagacactgactggcagagtcctggttgtcttagtctttgctctcagcatcggtgcacttgtaatatacttcatagattcatcaaacccaatagaatcctgccagaatttctacaaagatttcacattacagatcgacatggctttcaacgtgttcttccttctctacttcggcttgcggtttattgcagccaacgataaattgtggttctggctggaagtgaactctgtagtggatttcttcacggtgccccccgtgtttgtgtctgtgtacttaaacagaagttggcttggtttgagatttttaagagctctgagactgatacagttttcagaaattttgcagtttctgaatattcttaaaacaagtaattccatcaagctggtgaatctgctctccatatttatcagcacgtggctgactgcagccgggttcatccatttggtggagaattcaggggacccatgggaaaatttccaaaacaaccaggctctcacctactgggaatgtgtctatttactcatggtcacaatgtccaccgttggttatggggatgtttatgcaaaaaccacacttgggcgcctcttcatggtcttcttcatcctcgggggactggccatgtttgccagctacgtccctgaaatcatagagttaataggaaaccgcaagaaatacgggggctcctatagtgcggttagtggaagaaagcacattgtggtctgcggacacatcactctggagagtgtttccaacttcctgaaggactttctgcacaaggaccgggatgacgtcaatgtggagatcgtttttcttcacaacatctcccccaacctggagcttgaagctctgttcaaacgacattttactcaggtggaattttatcagggttccgtcctcaatccacatgatcttgcaagagtcaagatagagtcagcagatgcatgcctgatccttgccaacaagtactgcgctgacccggatgcggaggatgcctcgaatatcatgagagtaatctccataaagaactaccatccgaagataagaatcatcactcaaatgctgcagtatcacaacaaggcccatctgctaaacatcccgagctggaattggaaagaaggtgatgacgcaatctgcctcgcagagttgaagttgggcttcatagcccagagctgcctggctcaaggcctctccaccatgcttgccaacctcttctccatgaggtcattcataaagattgaggaagacacatggcagaaatactacttggaaggagtctcaaatgaaatgtacacagaatatctctccagtgccttcgtgggtctgtccttccctactgtttgtgagctgtgttttgtgaagctcaagctcctaatgatagccattgagtacaagtctgccaaccgagagagccgtatattaattaatcctggaaaccatcttaagatccaagaaggtactttaggatttttcatcgcaagtgatgccaaagaagttaaaagggcatttttttactgcaaggcctgtcatgatgacatcacagatcccaaaagaataaaaaaatgtggctgcaaacggcttgaagatgagcagccgtcaacactatcaccaaaaaaaaagcaacggaatggaggcatgcggaactcacccaacacctcgcctaagctgatgaggcatgaccccttgttaattcctggcaatgatcagattgacaacatggactccaatgtgaagaagtacgactctactgggatgtttcactggtgtgcacccaaggagatagagaaagtcatcctggtcacaggctggatgccgtatctgggacctagggttttaatgacttgcctggatattggtgtagtatgcatgccaactgatattcaatcaacatctcctgccagcataaaaaagtttaaggagactcgaagtgaagctgccatgaccgtcctgagtggccatgtcgtggtctgcatctttggcgacgtcagctcagccctgatcggcctccggaacctggtgatgccgctccgtgccagcaactttcattaccatgagctcaagcacattgtgtttgtgggctctattgagtacctcaagcgggaatgggagacgcttcataacttccccaaagtgtccatattgcctggtacgccattaagtcgggctgatttaagggctgtcaacatcaacctctgtgacatgtgcgttatcctgtcagccaatcagaataatattgatgatacttcgctgcaggacaaggaatgcatcttggcgtcactcaacatcaaatctatgcagtttgatgacagcatcggagtcttgcaggctaattcccaagggttcacacctccaggaatggatagatcctctccagataacagcccagtgcacgggatgttacgtcaaccatccatcacaactggggtcaacatccccatcatcactgaactagtgaacgatactaatgttcagtttttggaccaagacgatgatgatgaccctgatacagaactgtacctcacgcagccctttgcctgtgggacagcatttgccgtcagtgtcctggactcactcatgagcgcgacgtacttcaatgacaatatcctcaccctgatacggaccctggtgaccggaggagccacgccggagctggaggctctgattgctgaggaaaacgcccttagaggtggctacagcaccccgcagacactggccaatagggaccgctgccgcgtggcccagttagctctgctcgatgggccatttgcggacttaggggatggtggttgttatggtgatctgttctgcaaagctctgaaaacatataatatgctttgttttggaatttaccggctgagagatgctcacctcagcacccccagtcagtgcacaaagaggtatgtcatcaccaacccgccctatgagtttgagctcgtgccgacggacctgatcttctgcttaatgcagtttgaccacaatgccggccagtcccgggccagcctgtcccattcctcccactcgtcgcagtcctccagcaagaagagctcctctgttcactccatcccatccacagcaaaccgacagaaccggcccaagtccagggagtcccgggacaaacagaagtacgtgcaggaagagcggctttga

SEQ ID NO: 23246 - DNA, 3723 bp, Homo sapiens
  source 1..3723: mol_type = unassigned DNA
atggcaaatggtggcggcggcggcggcggcagcagcggcggcggcggcggcggcggaggcagcagtcttagaatgagtagcaatatccacgcgaaccatctcagcctagacgcgtcctcctcctcctcctcctcctcttcctcttcttcttcttcctcctcctcttcctcctcgtcctcggtccacgagcccaagatggatgcgctcatcatcccggtgaccatggaggtgccgtgcgacagccggggccaacgcatgtggtgggctttcctggcctcctccatggtgactttcttcgggggcctcttcatcatcttgctctggcggacgctcaagtacctgtggaccgtgtgctgccactgcgggggcaagacgaaggaggcccagaagattaacaatggctcaagccaggcggatggcactctcaaaccagtggatgaaaaagaggaggcagtggccgccgaggtcggctggatgacctccgtgaaggactgggcgggggtgatgatatccgcccagacactgactggcagagtcctggttgtcttagtctttgctctcagcatcggtgcacttgtaatatacttcatagattcatcaaacccaatagaatcctgccagaatttctacaaagatttcacattacagatcgacatggctttcaacgtgttcttccttctctacttcggcttgcggtttattgcagccaacgataaattgtggttctggctggaagtgaactctgtagtggatttcttcacggtgccccccgtgtttgtgtctgtgtacttaaacagaagttggcttggtttgagatttttaagagctctgagactgatacagttttcagaaattttgcagtttctgaatattcttaaaacaagtaattccatcaagctggtgaatctgctctccatatttatcagcacgtggctgactgcagccgggttcatccatttggtggagaattcaggggacccatgggaaaatttccaaaacaaccaggctctcacctactgggaatgtgtctatttactcatggtcacaatgtccaccgttggttatggggatgtttatgcaaaaaccacacttgggcgcctcttcatggtcttcttcatcctcgggggactggccatgtttgccagctacgtccctgaaatcatagagttaataggaaaccgcaagaaatacgggggctcctatagtgcggttagtggaagaaagcacattgtggtctgcggacacatcactctggagagtgtttccaacttcctgaaggactttctgcacaaggaccgggatgacgtcaatgtggagatcgtttttcttcacaacatctcccccaacctggagcttgaagctctgttcaaacgacattttactcaggtggaattttatcagggttccgtcctcaatccacatgatcttgcaagagtcaagatagagtcagcagatgcatgcctgatccttgccaacaagtactgcgctgacccggatgcggaggatgcctcgaatatcatgagagtaatctccataaagaactaccatccgaagataagaatcatcactcaaatgctgcagtatcacaacaaggcccatctgctaaacatcccgagctggaattggaaagaaggtgatgacgcaatctgcctcgcagagttgaagttgggcttcatagcccagagctgcctggctcaaggcctctccaccatgcttgccaacctcttctccatgaggtcattcataaagattgaggaagacacatggcagaaatactacttggaaggagtctcaaatgaaatgtacacagaatatctctccagtgccttcgtgggtctgtccttccctactgtttgtgagctgtgttttgtgaagctcaagctcctaatgatagccattgagtacaagtctgccaaccgagagagccgtggcaggctcagtatattaattaatcctggaaaccatcttaagatccaagaaggtactttaggatttttcatcgcaagtgatgccaaagaagttaaaagggcatttttttactgcaaggcctgtcatgatgacatcacagatcccaaaagaataaaaaaatgtggctgcaaacggcccaagatgtccatctacaagagaatgagacgggcatgttgttttgattgcggacgttctgagcgtgactgctcatgcatgtcaggccgtgtgcgtggtaacgtggacacccttgagagagccttcccactttcttctgtctctgttaatgattgctccaccagtttccgtgcctttgaagatgagcagccgtcaacactatcaccaaaaaaaaagcaacggaatggaggcatgcggaactcacccaacacctcgcctaagctgatgaggcatgaccccttgttaattcctggcaatgatcagattgacaacatggactccaatgtgaagaagtacgactctactgggatgtttcactggtgtgcacccaaggagatagagaaagtcatcctgactcgaagtgaagctgccatgaccgtcctgagtggccatgtcgtggtctgcatctttggcgacgtcagctcagccctgatcggcctccggaacctggtgatgccgctccgtgccagcaactttcattaccatgagctcaagcacattgtgtttgtgggctctattgagtacctcaagcgggaatgggagacgcttcataacttccccaaagtgtccatattgcctggtacgccattaagtcgggctgatttaagggctgtcaacatcaacctctgtgacatgtgcgttatcctgtcagccaatcagaataatattgatgatacttcgctgcaggacaaggaatgcatcttggcgtcactcaacatcaaatctatgcagtttgatgacagcatcggagtcttgcaggctaattcccaagggttcacacctccaggaatggatagatcctctccagataacagcccagtgcacgggatgttacgtcaaccatccatcacaactggggtcaacatccccatcatcactgaactagtgaacgatactaatgttcagtttttggaccaagacgatgatgatgaccctgatacagaactgtacctcacgcagccctttgcctgtgggacagcatttgccgtcagtgtcctggactcactcatgagcgcgacgtacttcaatgacaatatcctcaccctgatacggaccctggtgaccggaggagccacgccggagctggaggctctgattgctgaggaaaacgcccttagaggtggctacagcaccccgcagacactggccaatagggaccgctgccgcgtggcccagttagctctgctcgatgggccatttgcggacttaggggatggtggttgttatggtgatctgttctgcaaagctctgaaaacatataatatgctttgttttggaatttaccggctgagagatgctcacctcagcacccccagtcagtgcacaaagaggtatgtcatcaccaacccgccctatgagtttgagctcgtgccgacggacctgatcttctgcttaatgcagtttgaccacaatgccggccagtcccgggccagcctgtcccattcctcccactcgtcgcagtcctccagcaagaagagctcctctgttcactccatcccatccacagcaaaccgacagaaccggcccaagtccagggagtcccgggacaaacagaagtacgtgcaggaagagcggctttga

SEQ ID NO: 23247 - DNA, 3761 bp, Homo sapiens
  source 1..3761: mol_type = unassigned DNA
agctgaagaggggagagagacaccctccccacccccatatgaggatggtctgtgatgatatgcatgcaggggaagggacttatccaaggtccctgatagatagggactggaattttggcagtgtcttttctagagtagaacaaatttatcagttgaatttgctgtagttctctgaaggtttctttggccacattagaatttttgagccctggcatccaagtaggccaacttcaaaatggctgtgtgctccactcagagattctgctgtgaagactggcaggagattttttagcctattctgaactccaactgttccagttcctcttgctttccagaggtgtgagcacctggaagcccctgctctggtctacaccccaggctcaagattcatcctgctcactcagccactcatgctgtcaccagtgataaaactgagatgcattccccagaaccaagcaaacaagaagaaggtcctccttcagtgggctgtcatcgatcattccccgttccatggccacaggactgactgctgatgaaatctaaaagaccagcttgcagaaggcatggaaatcctggggttaggggcccctctgctatggaggttgtcttagtctttgctctcagcatcggtgcacttgtaatatacttcatagattcatcaaactcctggagacttcatggcaaaccaacatattgaatgcaggaaattccagggtggccaagaatattctccagaaatcccaatagaatcctgccagaatttctacaaagatttcacattacagatcgacatggctttcaacgtgttcttccttctctacttcggcttgcggtttattgcagccaacgataaattgtggttctggctggaagtgaactctgtagtggatttcttcacggtgccccccgtgtttgtgtctgtgtacttaaacagaagttggcttggtttgagatttttaagagctctgagactgatacagttttcagaaattttgcagtttctgaatattcttaaaacaagtaattccatcaagctggtgaatctgctctccatatttatcagcacgtggctgactgcagccgggttcatccatttggtggagaattcaggggacccatgggaaaatttccaaaacaaccaggctctcacctactgggaatgtgtctatttactcatggtcacaatgtccaccgttggttatggggatgtttatgcaaaaaccacacttgggcgcctcttcatggtcttcttcatcctcgggggactggccatgtttgccagctacgtccctgaaatcatagagttaataggaaaccgcaagaaatacgggggctcctatagtgcggttagtggaagaaagcacattgtggtctgcggacacatcactctggagagtgtttccaacttcctgaaggactttctgcacaaggaccgggatgacgtcaatgtggagatcgtttttcttcacaacatctcccccaacctggagcttgaagctctgttcaaacgacattttactcaggtggaattttatcagggttccgtcctcaatccacatgatcttgcaagagtcaagatagagtcagcagatgcatgcctgatccttgccaacaagtactgcgctgacccggatgcggaggatgcctcgaatatcatgagagtaatctccataaagaactaccatccgaagataagaatcatcactcaaatgctgcagtatcacaacaaggcccatctgctaaacatcccgagctggaattggaaagaaggtgatgacgcaatctgcctcgcagagttgaagttgggcttcatagcccagagctgcctggctcaaggcctctccaccatgcttgccaacctcttctccatgaggtcattcataaagattgaggaagacacatggcagaaatactacttggaaggagtctcaaatgaaatgtacacagaatatctctccagtgccttcgtgggtctgtccttccctactgtttgtgagctgtgttttgtgaagctcaagctcctaatgatagccattgagtacaagtctgccaaccgagagagccgtatattaattaatcctggaaaccatcttaagatccaagaaggtactttaggatttttcatcgcaagtgatgccaaagaagttaaaagggcatttttttactgcaaggcctgtcatgatgacatcacagatcccaaaagaataaaaaaatgtggctgcaaacggctcaaggttgcagctagatcacgctattccaaagatccatttgagttcaagaaggagactcccaattctcggcttgtgaccgagccagttgaagatgagcagccgtcaacactatcaccaaaaaaaaagcaacggaatggaggcatgcggaactcacccaacacctcgcctaagctgatgaggcatgaccccttgttaattcctggcaatgatcagattgacaacatggactccaatgtgaagaagtacgactctactgggatgtttcactggtgtgcacccaaggagatagagaaagtcatcctgactcgaagtgaagctgccatgaccgtcctgagtggccatgtcgtggtctgcatctttggcgacgtcagctcagccctgatcggcctccggaacctggtgatgccgctccgtgccagcaactttcattaccatgagctcaagcacattgtgtttgtgggctctattgagtacctcaagcgggaatgggagacgcttcataacttccccaaagtgtccatattgcctggtacgccattaagtcgggctgatttaagggctgtcaacatcaacctctgtgacatgtgcgttatcctgtcagccaatcagaataatattgatgatacttcgctgcaggacaaggaatgcatcttggcgtcactcaacatcaaatctatgcagtttgatgacagcatcggagtcttgcaggctaattcccaagggttcacacctccaggaatggatagatcctctccagataacagcccagtgcacgggatgttacgtcaaccatccatcacaactggggtcaacatccccatcatcactgaactagtgaacgatactaatgttcagtttttggaccaagacgatgatgatgaccctgatacagaactgtacctcacgcagccctttgcctgtgggacagcatttgccgtcagtgtcctggactcactcatgagcgcgacgtacttcaatgacaatatcctcaccctgatacggaccctggtgaccggaggagccacgccggagctggaggctctgattgctgaggaaaacgcccttagaggtggctacagcaccccgcagacactggccaatagggaccgctgccgcgtggcccagttagctctgctcgatgggccatttgcggacttaggggatggtggttgttatggtgatctgttctgcaaagctctgaaaacatataatatgctttgttttggaatttaccggctgagagatgctcacctcagcacccccagtcagtgcacaaagaggtatgtcatcaccaacccgccctatgagtttgagctcgtgccgacggacctgatcttctgcttaatgcagtttgaccacaatgccggccagtcccgggccagcctgtcccattcctcccactcgtcgcagtcctccagcaagaagagctcctctgttcactccatcccatccacagcaaaccgacagaaccggcccaagtccagggagtcccgggacaaacagaagtacgtgcaggaagagcggctttga

SEQ ID NO: 23248 - DNA, 826 bp, Homo sapiens
  source 1..826: mol_type = unassigned DNA
cgaagataagaatcatcactcaaatgctgcagtatcacaacaaggcccatctgctaaacatcccgagctggaattggaaagaaggtgatgacgcaatctgcctcgcagagttgaagttgggcttcatagcccagagctgcctggctcaaggcctctccaccatgcttgccaacctcttctccatgaggtcattcataaagattgaggaagacacatggcagaaatactacttggaaggagtctcaaatgaaatgtacacagaatatctctccagtgccttcgtgggtctgtccttccctactgtttgtgagctgtgttttgtgaagctcaagctcctaatgatagccattgagtacaagtctgccaaccgagagagccgtatattaattaatcctggaaaccatcttaagatccaagaaggtactttaggatttttcatcgcaagtgatgccaaagaagttaaaagacctcctcaactctgtctccctttggctgcccagaaaaggtgctttcagagtgacaagcttgatatttttatttgactgagaaacgacatacttctgccccctcaaatatatatttgaccagactgtgggaattttggtgttgtatttaacttccccaccaagggcccagggctcattgcccacatgtccccacgagtagcatcaaaggctgttctcaaaaatgaaagacgaatgagcagacacagtgtgtcacatcagcaacttttttcccagtttctttgtaaatggaagtttatgaaaaggagcactaactcaaatcacagaatcctgtgtttgaaataaatggtcttgcaacaaac

SEQ ID NO: 23249 - DNA, 3090 bp, Homo sapiens
  source 1..3090: mol_type = unassigned DNA
gaattcaggggacccatgggaaaatttccaaaacaaccaggctctcacctactgggaatgtgtctatttactcatggtcacaatgtccaccgttggttatggggatgtttatgcaaaaaccacacttgggcgcctcttcatggtcttcttcatcctcgggggactggccatgtttgccagctacgtccctgaaatcatagagttaataggaaaccgcaagaaatacgggggctcctatagtgcggttagtggaagaaagcacattgtggtctgcggacacatcactctggagagtgtttccaacttcctgaaggactttctgcacaaggaccgggatgacgtcaatgtggagatcgtttttcttcacaacatctcccccaacctggagcttgaagctctgttcaaacgacattttactcaggtggaattttatcagggttccgtcctcaatccacatgatcttgcaagagtcaagatagagtcagcagatgcatgcctgatccttgccaacaagtactgcgctgacccggatgcggaggatgcctcgaatatcatgagagtaatctccataaagaactaccatccgaagataagaatcatcactcaaatgctgcagtatcacaacaaggcccatctgctaaacatcccgagctggaattggaaagaaggtgatgacgcaatctgcctcgcagagttgaagttgggcttcatagcccagagctgcctggctcaaggcctctccaccatgcttgccaacctcttctccatgaggtcattcataaagattgaggaagacacatggcagaaatactacttggaaggagtctcaaatgaaatgtacacagaatatctctccagtgccttcgtgggtctgtccttccctactgtttgtgagctgtgttttgtgaagctcaagctcctaatgatagccattgagtacaagtctgccaaccgagagagccgtatattaattaatcctggaaaccatcttaagatccaagaaggtactttaggatttttcatcgcaagtgatgccaaagaagttaaaagggcatttttttactgcaaggcctgtcatgatgacatcacagatcccaaaagaataaaaaaatgtggctgcaaacggctcaaggttgcagctagatcacgctattccaaagatccatttgagttcaagaaggagactcccaattctcggcttgtgaccgagccagttgaagatgagcagccgtcaacactatcaccaaaaaaaaagcaacggaatggaggcatgcggaactcacccaacacctcgcctaagctgatgaggcatgaccccttgttaattcctggcaatgatcagattgacaacatggactccaatgtgaagaagtacgactctactgggatgtttcactggtgtgcacccaaggagatagagaaagtcatcctgactcgaagtgaagctgccatgaccgtcctgagtggccatgtcgtggtctgcatctttggcgacgtcagctcagccctgatcggcctccggaacctggtgatgccgctccgtgccagcaactttcattaccatgagctcaagcacattgtgtttgtgggctctattgagtacctcaagcgggaatgggagacgcttcataacttccccaaagtgtccatattgcctggtacgccattaagtcgggctgatttaagggctgtcaacatcaacctctgtgacatgtgcgttatcctgtcagccaatcagaataatattgatgatacttcgctgcaggacaaggaatgcatcttggcgtcactcaacatcaaatctatgcagtttgatgacagcatcggagtcttgcaggctaattcccaagggttcacacctccaggaatggatagatcctctccagataacagcccagtgcacgggatgttacgtcaaccatccatcacaactggggtcaacatccccatcatcactgaactagtgaacgatactaatgttcagtttttggaccaagacgatgatgatgaccctgatacagaactgtacctcacgcagccctttgcctgtgggacagcatttgccgtcagtgtcctggactcactcatgagcgcgacgtacttcaatgacaatatcctcaccctgatacggaccctggtgaccggaggagccacgccggagctggaggctctgattgctgaggaaaacgcccttagaggtggctacagcaccccgcagacactggccaatagggaccgctgccgcgtggcccagttagctctgctcgatgggccatttgcggacttaggggatggtggttgttatggtgatctgttctgcaaagctctgaaaacatataatatgctttgttttggaatttaccggctgagagatgctcacctcagcacccccagtcagtgcacaaagaggtatgtcatcaccaacccgccctatgagtttgagctcgtgccgacggacctgatcttctgcttaatgcagtttgaccacaatgccggccagtcccgggccagcctgtcccattcctcccactcgtcgcagtcctccagcaagaagagctcctctgttcactccatcccatccacagcaaaccgacagaaccggcccaagtccagggagtcccgggacaaacagaagtacgtgcaggaagagcggctttgatatgtcttccttcacttcccccattgccaccccccaatcccagtccccccatcggtctgttcacatctctgtgttcatcttggcaagacctactcaatcaagtgatgatgccagttgataaacttccctggaaaacatttacagctattccatttggcaaacttgcttctctgtcaatatttcatcctcctttaaaccaggagggttattaatggcaaaagcattggtcttctttatgcttgatcagtatgactcaaattaaaagtgttctgctgtgtatatcaactcagtagcccacacccagttatctgggagctgatggttcagtcactgtattacccaaatctttcctgccagctgcctttcagacatttgttaaatcccaaccagagaccgggcagatagagagaagtaaatccgaagtgcgtttt

SEQ ID NO: 23250 - DNA, 994 bp, Homo sapiens
  source 1..994: mol_type = unassigned DNA
agtaatctccataaagaactaccatccgaagataagaatcatcactcaaatgctgcagtatcacaacaaggcccatctgctaaacatcccgagctggaattggaaagaaggtgatgacgcaatctgcctcgcagagttgaagttgggcttcatagcccagagctgcctggctcaaggcctctccaccatgcttgccaacctcttctccatgaggtcattcataaagattgaggaagacacatggcagaaatactacttggaaggagtctcaaatgaaatgtacacagaatatctctccagtgccttcgtgggtctgtccttccctactgtttgtgagctgtgttttgtgaagctcaagctcctaatgatagccattgagtacaagtctgccaaccgagagagccgtatattaattaatcctggaaaccatcttaagatccaagaaggtactttaggatttttcatcgcaagtgatgccaaagaagttaaaagggcatttttttactgcaaggcctgtcatgatgacatcacagatcccaaaagaataaaaaaatgtggctgcaaacggctggccggttctcaggatactcatcctgacagcttctaccaccaggcagtgaatgcttcctcttacctccatggtggagggcagatgtggccagttagctcctcatcttccatcctcctccactatctcaggcgacagatgccagggccagcccgccttccacttgagctttcttgtcaaggctctgccttgagcccaaatcctgacctttactgtatgaaataaagtactgatgaacaagcagaggtttgaattagagcaggcttggagcaaatgtcaagtccgtctctgcctctttcctccacctgcaccaggagcctcgattagacccagtgtggagtttgcagcgccttaggctttatgggtctggggagacataacttattaacaaagagttattaaatttttatcaattttacaacacaa

SEQ ID NO: 23251 - DNA, 3902 bp, Homo sapiens
  source 1..3902: mol_type = unassigned DNA
agcaatatccacgcgaaccatctcagcctagacgcgtcctcctcctcctcctcctcctcttcctcttcttcttcttcctcctcctcttcctcctcgtcctcggtccacgagcccaagatggatgcgctcatcatcccggtgaccatggaggtgccgtgcgacagccggggccaacgcatgtggtgggctttcctggcctcctccatggtgactttcttcgggggcctcttcatcatcttgctctggcggacgctcaagtacctgtggaccgtgtgctgccactgcgggggcaagacgaaggaggcccagaagattaacaatggctcaagccaggcggatggcactctcaaaccagtggatgaaaaagaggaggcagtggccgccgaggtcggctggatgacctccgtgaaggactgggcgggggtgatgatatccgcccagacactgactggcagagtcctggttgtcttagtctttgctctcagcatcggtgcacttgtaatatacttcatagattcatcaaacccaatagaatcctgccagaatttctacaaagatttcacattacagatcgacatggctttcaacgtgttcttccttctctacttcggcttgcggtttattgcagccaacgataaattgtggttctggctggaagtgaactctgtagtggatttcttcacggtgccccccgtgtttgtgtctgtgtacttaaacagaagttggcttggtttgagatttttaagagctctgagactgatacagttttcagaaattttgcagtttctgaatattcttaaaacaagtaattccatcaagctggtgaatctgctctccatatttatcagcacgtggctgactgcagccgggttcatccatttggtggagaattcaggggacccatgggaaaatttccaaaacaaccaggctctcacctactgggaatgtgtctatttactcatggtcacaatgtccaccgttggttatggggatgtttatgcaaaaaccacacttgggcgcctcttcatggtcttcttcatcctcgggggactggccatgtttgccagctacgtccctgaaatcatagagttaataggaaaccgcaagaaatacgggggctcctatagtgcggttagtggaagaaagcacattgtggtctgcggacacatcactctggagagtgtttccaacttcctgaaggactttctgcacaaggaccgggatgacgtcaatgtggagatcgtttttcttcacaacatctcccccaacctggagcttgaagctctgttcaaacgacattttactcaggtggaattttatcagggttccgtcctcaatccacatgatcttgcaagagtcaagatagagtcagcagatgcatgcctgatccttgccaacaagtactgcgctgacccggatgcggaggatgcctcgaatatcatgagagtaatctccataaagaactaccatccgaagataagaatcatcactcaaatgctgcagtatcacaacaaggcccatctgctaaacatcccgagctggaattggaaagaaggtgatgacgcaatctgcctcgcagagttgaagttgggcttcatagcccagagctgcctggctcaaggcctctccaccatgcttgccaacctcttctccatgaggtcattcataaagattgaggaagacacatggcagaaatactacttggaaggagtctcaaatgaaatgtacacagaatatctctccagtgccttcgtgggtctgtccttccctactgtttgtgagctgtgttttgtgaagctcaagctcctaatgatagccattgagtacaagtctgccaaccgagagagccgtatattaattaatcctggaaaccatcttaagatccaagaaggtactttaggatttttcatcgcaagtgatgccaaagaagttaaaagggcatttttttactgcaaggcctgtcatgatgacatcacagatcccaaaagaataaaaaaatgtggctgcaaacggcccaagatgtccatctacaagagaatgagacgggcatgttgttttgattgcggacgttctgagcgtgactgctcatgcatgtcaggccgtgtgcgtggtaacgtggacacccttgagagagccttcccactttcttctgtctctgttaatgattgctccaccagtttccgtgcctttgaagatgagcagccgtcaacactatcaccaaaaaaaaagcaacggaatggaggcatgcggaactcacccaacacctcgcctaagctgatgaggcatgaccccttgttaattcctggcaatgatcagattgacaacatggactccaatgtgaagaagtacgactctactgggatgtttcactggtgtgcacccaaggagatagagaaagtcatcctgactcgaagtgaagctgccatgaccgtcctgagtggccatgtcgtggtctgcatctttggcgacgtcagctcagccctgatcggcctccggaacctggtgatgccgctccgtgccagcaactttcattaccatgagctcaagcacattgtgtttgtgggctctattgagtacctcaagcgggaatgggagacgcttcataacttccccaaagtgtccatattgcctggtacgccattaagtcgggctgatttaagggctgtcaacatcaacctctgtgacatgtgcgttatcctgtcagccaatcagaataatattgatgatacttcgctgcaggacaaggaatgcatcttggcgtcactcaacatcaaatctatgcagtttgatgacagcatcggagtcttgcaggctaattcccaagggttcacacctccaggaatggatagatcctctccagataacagcccagtgcacgggatgttacgtcaaccatccatcacaactggggtcaacatccccatcatcactgaactagtgaacgatactaatgttcagtttttggaccaagacgatgatgatgaccctgatacagaactgtacctcacgcagccctttgcctgtgggacagcatttgccgtcagtgtcctggactcactcatgagcgcgacgtacttcaatgacaatatcctcaccctgatacggaccctggtgaccggaggagccacgccggagctggaggctctgattgctgaggaaaacgcccttagaggtggctacagcaccccgcagacactggccaatagggaccgctgccgcgtggcccagttagctctgctcgatgggccatttgcggacttaggggatggtggttgttatggtgatctgttctgcaaagctctgaaaacatataatatgctttgttttggaatttaccggctgagagatgctcacctcagcacccccagtcagtgcacaaagaggtatgtcatcaccaacccgccctatgagtttgagctcgtgccgacggacctgatcttctgcttaatgcagtttgaccacaatgccggccagtcccgggccagcctgtcccattcctcccactcgtcgcagtcctccagcaagaagagctcctctgttcactccatcccatccacagcaaaccgacagaaccggcccaagtccagggagtcccgggacaaacagaaaaaagaaatggtttacagatgaaccggataatgcctatcccagaaacattcaaatcaagcccatgagtacccacatggctaaccagatcaaccaatataaatccacaagcagcttgattccaccaatcagagaagttgaagatgaatgttgactcccaggagaccagaactatttttttaaagcctgacaaacttcataaatggtgatgtgacttttcttcttacatgctgaatcactggtggaaacgttaggataagcaagaattgccagaaaataaagtagacagatctttc

SEQ ID NO: 23252 - DNA, 1559 bp, Homo sapiens
  source 1..1559: mol_type = unassigned DNA
agaatcatttcctatttctggcatctttgccagcccacagagacagagagaagaagaaatatttccaaatataccaggctgatctttcgtagtttctcagtcttgctgtctgttgttgtttgaaatctgtttcccacgagactctgggaagatggaggtgcagggcttgggtaacagctgccttcctcagggctgggtacctgctctccgagtctgtgtctccaggctgtgtgctcagacttgaccatgtttgggcatggaggcttgccccagatggggaccaaaagctgcttccctggagacgggcggggaggccaaacttcctgctgaagctctgtggcctcttttggggtgggggcgggggtccaggcagaaagaaactgtctgctgctcaagacccacaggacgccgggaagactaaatgatcactgcccccagtgaatatggtgaagaagctggtgatggcccagaagcggggagagacacgagccctttgcctgggtgtaaccatggtggtgtgtgccgtcatcacctactacatcctggtcacgactgtgctgcccctctaccagaaaagcgtgtggacccaggaatccaagtgccacctgattgagaccaacatcagggaccaggaggagctgaagggcaagaaggtgccccagtacccatgcctgtgggtcaacgtgtcagctgccggcaggtgggctgtgctgtaccacacggaggacactcgggaccagaaccagcagtgctcctacatcccaggcagcgtggacaattaccagacggcccgggccgacgtggagaaggtcagagccaaattccaagagcagcaggtcttctactgcttctccgcacctcgggggaacgaaaccagcgtcctattccagcgcctctacgggccccaggccctcctcttctccctcttctggcccaccttcctgctgaccggtggcctcctcattatcgccatggtgaagagcaaccagtacctgtccatcctggcggcccagaagtagagccatccatccatgccataccacttgtcagggcacaggggactggctgggcccccagggctgctccccacttgcagcacaatgccttctccacctgccctcccactcttccagtccaatccacgctgtcttctgttgcaggactaacctttgagaaatccttttgtgaagtcattgcctgctcaagaatgtacagtggctccccaatgccttggaggccataaggccagccagttctagctctctattacctgtccccactcaactgactcatacctgtttccggctgcatcactatgtgccccacagagaacgatgatcgtcacctctgtgcctgagttctccctgttgtctcaaagcggtacccatcctcccccagaagctgtccccagcgagcctcccttctttgtttgaattctctaataagagcaacagcagctcccatttctagaacacatttacagtattactattttctaggatataaagtgccatatatatttttaattccaatattaataaatgtatgccaaacaacaa

SEQ ID NO: 23253 - DNA, 1733 bp, Homo sapiens
  source 1..1733: mol_type = unassigned DNA
cagagagaagaagaaatatttccaaatataccaggctgatctttcgtagtttctcagtcttgctgtctgttgttgtttgaaatctgtttcccacgagactctgggaagatggaggtgcagggcttgggtaacagctgccttcctcagggctgggtacctgctctccgagtctgtgtctccaggctgtgtgctcagacttgaccatgtttgggcatggaggcttgccccagatggggaccaaaagctgcttccctggagacgggcggggaggccaaacttcctgctgaagctctgtggcctcttttggggtgggggcgggggtccaggcagaaagaaactgtctgctgctcaagacccacaggacgccgggaagactaaatgatcactgcccccagtgaatatggtgaagaagctggtgatggcccagaagcggggagagacacgagccctttgcctgggtgtaaccatggtggtgtgtgccgtcatcacctactacatcctggtcacgactgtgctgcccctctaccagaaaagcgtgtggacccaggaatccaagtgccacctgattgagaccaacatcagggaccaggaggagctgaagggcaagaaggtgccccagtacccatgcctgtgggtcaacgtgtcagctgccggcaggtgggctgtgctgtaccacacggaggacactcgggaccagaaccagcaggtactgaactggagggatggggacacatccctttatccctgtcaggtgtgtgagcctgttcctaactgtccctgtccccgaggctgagaaagatcaacccacttgaccaggtctcacagctggaatgagactgagccagccctagctcttctgtgttggagtcacacagacctgggtttgaatctgccgctaactggctgtgtaaacataggcaggccacttagcctctcacctcctcagtttccacccttgtaaagtggaatgctaatgctgcaccttgaagagctgttatcaagtcagagacgctgtatataaagtgccacgcttgatgctgagtggatagtgggcactcaaacaaaagcagtgattagtgttagtactttcattctacaacctcagtcaaatgagggaccaggcccagggccagatcctcaaagtggaatcccggtgactccccaggaaaccagggactcagggctggagtaacctccataaacaaacatttagatggtttttccatccttgcatcccaacatcccaccctccccctccaaaacacaaaactcaccaccatatcctttcctaaagcgatcagttggcccatattctgtctctcttccttccttctttctttccttcttttttccctttcttccctccttctttcttttcttttttttcccctccctccttccctccctctctccctcccttccttccttccttccttccttccttgtttccttctttcctcctctcatttatttattcaacagccattgagcacctcctgtgtcaagcctgtaggactcaagaggagagagctcatgcatgaacagtgcctagcagggaagaattggcaccggggagaagaacagaggaagttacaggggttagaggagggggatgttttccagctgacaatgatgggggtatcagaaaggctcttggtgagattgcaccattgcactccagcctggcaacaagagtgaaactccatctcaaaaaaaaaaaaaaaaaaaagaaa

SEQ ID NO: 23254 - DNA, 4731 bp, Homo sapiens
  source 1..4731: mol_type = unassigned DNA
gctcgccccagctcagacactcctagccttggggcagctgccgggcgagtcagcggagtagcggccagcgggcgatggagacagagagacacccgacgagaggaggcggggtgggggaggcggggagagtgcgggggcggaggctggcagggggcgctggaagctggagcggtccgtgcgctccccgcgcccgagggtgcaggaggctctgaagcggctgctgcaccgcggggcccaggcggcggctggggggctggggggcgctgccgccgccgccgccgggggcgtcgctggcctcggcccctttgttctcgcgcgctccccctcgccgcccactcccctgctgtcgcgcggcggcggcggtggcggcggcggctcctcccgcccgaggcagtcgggctcggcgccgggggcgggagggggcggggggagcacgccagccgccgagagtggggggcgatggcgaagctccgggtggcttacgagtacacggaagccgaggacaagagcatccggctcggcttgtttctcatcatctccggcgtcgtgtcgctcttcatcttcggcttctgctggctgagtcccgcgctgcaggatctgcaagccacggaggccaattgcacggtgctgtcggtgcagcagatcggcgaggtgttcgagtgcaccttcacctgtggcgccgactgcaggggcacctcgcagtacccctgcgtccaggtctacgtgaacaactctgagtccaactctagggcgctgctgcacagcgacgagcaccagctcctgaccaaccccaagtgctcctatatccctccctgtaagagagaaaatcagaagaatttggaaagtgtcatgaattggcaacagtactggaaagatgagattggttcccagccatttacttgctattttaatcaacatcaaagaccagatgatgtgcttctgcatcgcactcatgatgagattgtcctcctgcattgcttcctctggcccctggtgacatttgtggtgggcgttctcattgtggtcctgaccatctgtgccaagagcttggcggtcaaggcggaagccatgaagaagcgcaagttctcttaaaggggaaggaggcttgtagaaagcaaagtacagaagctgtactcatcggcacgcgtccacctgcggaacctgtgtttcctggcgcaggagatggacagggccacgacagggctctgagaggctcatccctcagtggcaacagaaacaggcacaactggaagacttggaacctcaaagcttgtattccatctgctgtagcaatggctaaagggtcaagatcttagctgtatggagtaactatttcagaaaaccctataagaagttcattttctttcaaaagtaacagtatattatttgtacagtgtagtatacaaaccattatgatttatgctacttaaaaatattaaaatagagtggtctgtgttattttctatttccttttttatgcttagaacaccagggtttaaaaaaaaaaaaaaggtgaggacatctgggtctcatttgcttctgctaggttaaacttttacttgacaacaaggattcctgctgaagtctgaaccttactgtgtaaccctcagtttccactattaaagagtatcttttgacgtctgcttggaaaatgaatagtatactggtaactcagtctccagtcacctctgtgtctcttaagcaagagattctaaaagattgggaaaacatatcctccaacacctgcctttgcctaaccattatttttcaccagattacttcttaagagagggaggtgattctgaagaaggcttctatctcaaaaagcactgggcttccttattcatctgttcttgttgtttttgacggagttaaaaaagtttgtgtgcaatacaatatacatgatgtgaaggacactcttcagcttagtgaaacgctgttttcatttttttttttttttgtaggtcagaaaaaaacaacaaaatcagttcaagcatttttttttctttgtccttgccttgatgttatgagtattaaaaccaggaggattgctgccattgtgcagtttgcttagacaaacctggagatgcaacccagctcacatcattgctactgatgagctttctgtgcctttatcaaaagttgattgagaagaccatatttctttgtatctttttataaactcaaattccaagtatcaaatcgcaggtctcagtgaacatcaaacctatttactacatagaatcaaacctttgtttaggtgagatgtacatcgttagtggaggaaaaactgacaacctaatttcatttgttttcttctgatactcttcagacatgcctctattagaataaaggtaaactggaatttaaagacaagttcccctcagttatttccatggagctgtaatatgtatatatggagtgatggtttcctgacctttagtccacataccaatgttttcttttttcttttttttttttttttttgagatggtgtctcactctgttgccaggctggagtgcagtggcacgatctcggctcactacagtctccacctcctgggttcaagtcattcctctgcctcagcctcccgagtagctgggactacaggcacgcaccaccacgcctggctaatttttttgtatttttagtagagacggggtttcaccgtgttagccaggatggtctcaatctcctgaccttgtgatctgcccacttcacctcccaaagtgctgggattacaggccaatgttttcttaatcttagaatgtgaataactgaaaatcatagtctgtggaaaggtgttgaattgagtataatcttcttctgtttatttttgtgttttgttttttaacagatgggtatcttgctatgttgcccaggatggagtgcagtagctattcacaggtatgatcatagcacactgcagcctcaagctcctgggctcaagcgatccccctccctcagcctcccaagtatctggggttactggtgtgcaccaccgtgcttggctccaataattttttttctaattcaaaagttacagtttcactgtgaaaaaggccttgaacacactatttatgacatcttttgaggcagctccagtgccttgacttcaatcccagtttccggttgcagcatccttgttgtcttagcaacacagtgaactattctgaagcatagagtaacacgaaactgggagtccgagaaataatcatctctgcatcacattatgggagacgaagtctgctttatccattttatctttattcagttgtctatgattaattgattacagagtagtagattagaatagtgcatggatatacatttgtgttgaaaaaaggggaagttgatatatatcaatcttagttttcatttatcagtttgatattcatgcatttacactaaacgcttccatttatcccgaaaaagtatatgcaactgtattctgtaggttgatttttggaaaaggggagaagcacactgaattcataaggtcacatgtagtcttaaggtcttacttgcttacagccaattaaatttgaagcaccttatttatacttgttaaaggtaaaacccaaaagaacaagcagaggacattttaaggtcataaaaggtaaataagcttaccttcttaatgttttcattctctttttgtataaatcagaaaatgatctaaactgctgtaacaaagagaccccaaaatatgatggctcatgtaagataatttatttttttctcacatagcaatccagaagtggcttcatttcacaaggtattcaagggatataggagtcatctaccttgttagttctcttaatacccaagggtattgttctttccatggtcaaagctggctcaagacttcctagcctgtgaaaaaagaagaaggtggagcaagccatttcctttttaggaaattacagccatcacttctgcccaccgtccattcatgaatacttactatatagctatacctagcttcaagaaagcctgggacgtgtctctaactagatggacatgtgccctactaaaactccagggaaagggttctattactaaagctaaaaagaggggaatgaatactagagttaaagacaaaaatgatagcagccaatggcccatgccgtgataatctgctgagcaggcatgatggagatcccttgcccagcagaaagtgttccttggtgaaatcatgaatctgctatctaggagaaactcccttgtccattgtcttctgtggccactagtttgacctctaggaaagtcttgctcgtcagcttctgtggccccgtctgaaacttttgagggacatcgcagcttttgcagcccctgcttgctggtgcagacttttagacctagattgccttagagactgaaaaatatacgcttttataggccggggttttagttcatttgactgtaataaagacgtcaatgccgtttttaatgtttgactgctgacatctttcaagactcacctttcccttctcccttatgctgcacatctgggcaagctgatggaagcatgggtgcctcctcctttggccccagcaggaagttcaaatcacgcaagccctggcatgcatgcaggaagcttcaccccagcctcacactctaagacggataaaagccaaaccaattaagccgtttctcgaccctcctgggagcctgccctatctccctggaaagtctcagtatgtgagtaataaacctttttataccca

SEQ ID NO: 23255 - DNA, 2576 bp, Homo sapiens
  source 1..2576: mol_type = unassigned DNA
acttgttaaaaatcttgttcttgcattcattaccttatgaagcctgcagaacacgccacgatgttcctgattgtcctggggtgcttgattctggctgtcctgaccacattcaaggagtatgagactgtctcgggagactggcttctgttactggagacatttgctattttcatctttggagccgagtttgctttgaggatctgggctgctggatgttgctgccgatacaaaggctggcggggccgactgaagtttgccaggaagcccctgtgcatgttggacatctttgtgctgattgcctctgtgccagtggttgctgtgggaaaccaaggcaatgttctggccacctccctgcgaagcctgcgcttcctgcagatcctgcgcatgctgcggatggaccggagaggtggcacctggaagcttctgggctcagccatctgtgcccacagcaaagaactcatcacggcctggtacatcggtttcctgacactcatcctttcttcatttcttgtctacctggttgagaaagacgtcccagaggtggatgcacaaggagaggagatgaaagaggagtttgagacctatgcagatgccctgtggtggggcctgatcacactggccaccattggctatggagacaagacacccaaaacgtgggaaggccgtctgattgccgccaccttttccttaattggcgtctccttttttgcccttccagcgggcatcctggggtccgggctggccctcaaggtgcaggagcaacaccgtcagaagcactttgagaaaaggaggaagccagctgctgagctcattcaggctgcctggaggtattatgctaccaaccccaacaggattgacctggtggcgacatggagattttatgaatcagtcgtctcttttcctttcttcaggaaagaacagctggaggcagcatccagccaaaagctgggtctcttggatcgggttcgcctttctaatcctcgtggtagcaatactaaaggaaagctatttacccctctgaatgtagatgccatagaagaaagtccttctaaagaaccaaagcctgttggcttaaacaataaagagcgtttccgcacggccttccgcatgaaagcctacgctttctggcagagttctgaagatgccgggacaggtgaccccatggcggaagacaggggctatgggaatgacttccccatcgaagacatgatccccaccctgaaggccgccatccgagccgtcagaattctacaattccgtctctataaaaaaaaattcaaggagactttgaggccttacgatgtgaaggatgtgattgagcagtattctgccgggcatctcgacatgctttccaggataaagtaccttcagacgagaatagatatgattttcacccctggacctccctccacgccaaaacacaagaagtctcagaaagggtcagcattcaccttcccatcccagcaatctcccaggaatgaaccatatgtagccagaccatccacatcagaaatcgaagaccaaagcatgatggggaagtttgtaaaagttgaaagacaggttcaggacatggggaagaagctggacttcctcgtggatatgcacatgcaacacatggaacggttgcaggtgcaggtcacggagtattacccaaccaagggcacctcctcgccagctgaagcagagaagaaggaggacaacaggtattccgatttgaaaaccatcatctgcaactattctgagacaggccccccggaaccaccctacagcttccaccaggtgaccattgacaaagtcagcccctatgggttttttgcacatgaccctgtgaacctgccccgagggggacccagttctggaaaggttcaggcaactcctccttcctcagcaacaacgtatgtggagaggcccacggtcctgcctatcttgactcttctcgactcccgagtgagctgccactcccaggctgacctgcagggcccctactcggaccgaatctccccccggcagagacgtagcatcacgcgagacagtgacacacctctgtccctgatgtcggtcaaccacgaggagctggagaggtctccaagtggcttcagcatctcccaggacagagatgattatgtgttcggccccaatggggggtcgagctggatgagggagaagcggtacctcgccgagggtgagacggacacagacacggaccccttcacgcccagcggctccatgcctctgtcgtccacaggggatgggatttctgattcagtatggaccccttccaataagcccatttaaaagaggtcactggctgacccctccttgtaatgtagacagactttgtatagttcacttactcttacacccgacgcttaccagcggggacaccaatggctgcatcaaatgcatgcgtgtgcgtggtggccccacccaggcaggggcttcccacagcctcttcctccccatgtcaccacaacaaagtgcttccttttcagcatggtttgcatgactttacactatataaatggttccgctaatctcttctaggatacacatttatctgctgttcttacttttaa

SEQ ID NO: 23256 - DNA, 5219 bp, Homo sapiens
  source 1..5219: mol_type = unassigned DNA
cacggggcgaatgcggcgcgggttcctgcctctctgggtgggtgaggggcgcgcggatccggagagggggctccgggagcggcgggaccacgcagccacctgtgagccttcggcagctgcgggcggcggcggcgtacccggcccgagacgggaggagacgctcggcggcccccgcccgccggcccgccgggcgcacacactcgcacccgcgcacgcaccgccagcaggcagcggccaccgccgcgatgctcgcccgcgggttggggaagtttcccgccggcctcggccgcgggcacccgtgctcccaggtgtagcgcccccgcgcggcgcgggcggccggcgcctccagcatgaccggccagagcctgtgggacgtgtcggaggctaacgtcgaggacggggagatccgcatcaatgtgggcggcttcaagaggaggctgcgctcgcacacgctgctgcgcttccccgagacgcgcctgggccgcttgctgctctgccactcgcgcgaggccattctggagctctgcgatgactacgacgacgtccagcgggagttctacttcgaccgcaaccctgagctcttcccctacgtgctgcatttctatcacaccggcaagcttcacgtcatggctgagctatgtgtcttctccttcagccaggagatcgagtactggggcatcaacgagttcttcattgactcctgctgcagctacagctaccatggccgcaaagtagagcccgagcaggagaagtgggacgagcagagtgaccaggagagcaccacgtcttccttcgatgagatccttgccttctacaacgacgcctccaagttcgatgggcagcccctcggcaacttccgcaggcagctgtggctggcgctggacaaccccggctactcagtgctgagcagggtcttcagcatcctgtccatcctggtggtgatggggtccatcatcaccatgtgcctcaatagcctgcccgatttccaaatccctgacagccagggcaaccctggcgaggaccctaggttcgaaatcgtggagcactttggcattgcctggttcacatttgagctggtggccaggtttgctgtggcccctgacttcctcaagttcttcaagaatgccctaaaccttattgacctcatgtccatcgtccccttttacatcactctggtggtgaacctggtggtggagagcacacctactttagccaacttgggcagggtggcccaggtcctgaggctgatgcggatcttccgcatcttaaagctggccaggcactccactggcctccgctccctgggggccactttgaaatacagctacaaagaagtagggctgctcttgctctacctctccgtggggatttccatcttctccgtggtggcctacaccattgaaaaggaggagaacgagggcctggccaccatccctgcctgctggtggtgggctaccgtcagtatgaccacagtggggtacggggatgtggtcccagggaccacggcaggaaagctgactgcctctgcctgcatcttggcaggcatcctcgtggtggtcctgcccatcaccttgatcttcaataagttctcccacttttaccggcgccaaaagcaacttgagagtgccatgcgcagctgtgactttggagatggaatgaaggaggtcccttcggtcaatttaagggactattatgcccataaagttaaatcccttatggcaagcctgacgaacatgagcaggagctcaccaagtgaactcagtttaaatgattccctacgttagccgggaggacttgtcaccctccaccccacattgctgagctgcctcttgtgcctctggcacagcccaggcaccttatggttatggtgtaaggagtatgcccagcccctgaggggagagatgcatgggatatgcacccaggtttcttttacagtttttagaatcgtttttagagggtggtgtgtctgacaccatgcctttgcacctttccatgaaatgacactcactggtctttgcatcgtgggcataaaatgttcacctttttgccagatgagtacacccagaatgctaatttttctgtccatcgtgtacgctattctagtgcttgtggcccagtactgtctatgagttgtcgtgctcctgtttctgaggttgtcgtgtgagttctgtacaaaaagcccccacaagtcgtccagtagaaatgcatctatgaggtcagcaaggatatgatgagattttgctcacagtcatgtgaaaacaaaatctcagctctttatccattgctttcacttagttttagtaccaaaacaaagagaatgcaaagttaagcagacttgaccaatgcaagtctctaagttgtttttataaatgatctgtagttccgtggcttgcatgggtgcaccaatcatctttagaacgatgtacactgatgttcatctcataaatgtcactctttagagaatgttacttagttaaacatgcagtgaagatcgaatttttttcccaagaacagatgtgttagggagaggggcttcagctaaatagtccaaaccctagggtgcttaaagccaagttagtgcaggctgagccccttggttcacagtcaagcctccttgtttcctagggtgactgtagagaaatgtatttccggatgaggtttctgatctaggccatttgaccaaactttgctgtgtctaagatattagcatgtttttgaaatatttattttttaagatgtttaggagtaaggtcgtgttgtcttcctcaactaaaaagaagtttactgttgtatcgtctccctgaggtgaacgttgttgggttgctagcaagggcagtagcttaaatacttttgttgcctactctgaaagctcatcaaatgagagcccttttatttccaagcagaatttagtcagataattttgcttctaggatatagtatgttgtatatgatgctgtgattgccctggagttcctgccatgacatggaaacctggtggtatggaagcatgtactcaaaatatagacgtgcacgatggtggtgtggcttacccaggatggaaacactgcagttcttacttgcattcccactgcctttcatggggggtgactgggtagaggccaggagaaaggaaagagttgtaaaataaaaaactgctagttcataaaatgtcataaaaaattgtaaacttgaaaagcttaatgctattcaaaagaccttcaagcttccaaacttgtattgaagggagacgactgtttcctcctccaaaatgctcctgctcctcttgttcggttaaccagcacataacattgtgatggggaacctgggttcctctataagataattcttctccatcatctttaaggtaatctgatggttttccaggtggctttcattattgttccatctttgaaaaggcaatagaacccaggggtctgagcatggagctatccagggttttcatccaaaggttgggcctcttcttaagaggtccttttgtgtttcagttgattgaagatgatacttacctcattggaggtgtggcaaggatcttatcagaaggctttgtgttcttgtagttgtcatggctactacagtgtgggtgatttattgaatgaattcactagccacttgtgtcctggagcccccagttcaaatctttccattggactggaggcttgtgggaggctgggaggtggctgtctcctagtgtctacatccgtgtctctgaagcatcaggaaaagtgagatgacttagaggcaactgggcactgaatcagaggagcagagttatttttcagaatttgcacatggaacacttagatttggctggtgcttccagccctggaaggcataacatttacggactcatccccagctgcactgaaggcaggtggtggtacagacttatgaggacggatcagtttgccaaggctgatggtattgggtcactgagcctggtatccatggccgctgaccaggaagcttatgcaaagtggaagcaaggaacaaggcagaataactcagtcactttcatgaagatttttctaaacaagaaggcttaccaccaaaaaagaggtaccctagtggttaccctttgcagatgtgaaagctggaaaacttgacttttctttttggtaatgacttgcatttatctggtgcctttcgttggaggaatcccaacgtgctttagagactatctttttaacatctcttgtacatacatatatacttatataaaatattatcttgcccaactggacctttactcacttctgagcatgagaatgtcccaatagcattgagtttttcaagtggtggtttcagataagtgggagaaagaacaacccggctggcttaaaccctggagctaattcccacaaggaatgtagactgaatggtgacccagggagaaataatcttcctctcccctaaagtctcactaaggtttgaagtttacaggtgctctccactgggtctttgatcgaccttgctagataacatctaaccagcagtttcttttagtccctgaagctaaccagggagagtcaggttaattttctgtaaaaatatgaggtgacatctttggcaaccaggctgtcagactgacctgtaaacctcctttagggggacagagtagaaactggagatgacttgtttccagctgtgagcttgagagaagtgtcactcccagcatttgaaggttattgttttcaatgccagtgggccaaatatatgggccaggctttgatatctgtgatgtgcattttggaagtgctgggttgggaagtgacacgtctgttgcacaaatgcatattggttataggtttgtgttttctgccaaacccccacatttctcgggtttgtgagtgaggaagggcatgttgtaatgccaagctgatttgtagctcgtaaggtagtaattggtatttaacatttgcatttgttatttctacttatcttagcactcaaataattgaactacctgctaattcttgccgcatttcaaagaaaataagttgttatgcactttgggatagtggtgatctgtacaggctgtgtgttagctacttgaaggcgtaactggtatttcttgtgtgttttaacagcatgacttcttacagagctgtaatttttaaaattgaggatgccatatttgagatgtcagttttaacactcattaacacactactgtgcaagcattgacacaggctgcactg

SEQ ID NO: 23257 - DNA, 4340 bp, Homo sapiens
  source 1..4340: mol_type = unassigned DNA
tcccccccaccccaccaaagctacgcgccccccgtgtcggcccggccctgcccgtgcgtatctcagctccggtcccgcctgtctgcggcgagcgggcgggggcgtctcccgggcctgcccatggacaaggtgtagcgcccccgcgcggcgcgggcggccggcgcctccagcatgaccggccagagcctgtgggacgtgtcggaggctaacgtcgaggacggggagatccgcatcaatgtgggcggcttcaagaggaggctgcgctcgcacacgctgctgcgcttccccgagacgcgcctgggccgcttgctgctctgccactcgcgcgaggccattctggagctctgcgatgactacgacgacgtccagcgggagttctacttcgaccgcaaccctgagctcttcccctacgtgctgcatttctatcacaccggcaagcttcacgtcatggctgagctatgtgtcttctccttcagccaggagatcgagtactggggcatcaacgagttcttcattgactcctgctgcagctacagctaccatggccgcaaagtagagcccgagcaggagaagtgggacgagcagagtgaccaggagagcaccacgtcttccttcgatgagatccttgccttctacaacgacgcctccaagttcgatgggcagcccctcggcaacttccgcaggcagctgtggctggcgctggacaaccccggctactcagtgctgagcagggtcttcagcatcctgtccatcctggtggtgatggggtccatcatcaccatgtgcctcaatagcctgcccgatttccaaatccctgacagccagggcaaccctggcgaggaccctaggttcgaaatcgtggagcactttggcattgcctggttcacatttgagctggtggccaggtttgctgtggcccctgacttcctcaagttcttcaagaatgccctaaaccttattgacctcatgtccatcgtccccttttacatcactctggtggtgaacctggtggtggagagcacacctactttagccaacttgggcagggtggcccaggtcctgaggctgatgcggatcttccgcatcttaaagctggccaggcactccactggcctccgctccctgggggccactttgaaatacagctacaaagaagtagggctgctcttgctctacctctccgtggggatttccatcttctccgtggtggcctacaccattgaaaaggaggagaacgagggcctggccaccatccctgcctgctggtggtgggctaccgtcagtatgaccacagtggggtacggggatgtggtcccagggaccacggcaggaaagctgactgcctctgcctgcatcttggcaggcatcctcgtggtggtcctgcccatcaccttgatcttcaataagttctcccacttttaccggcgccaaaagcaacttgagagtgccatgcgcagctgtgactttggagatggaatgaaggaggtcccttcggtcaatttaagggactattatgcccataaagttaaatcccttatggcaagcctgacgaacatgagcaggagctcaccaagtgaactcagtttaaatgattccctacgttagccgggaggacttgtcaccctccaccccacattgctgagctgcctcttgtgcctctggcacagcccaggcaccttatggttatggtgtaaggagtatgcccagcccctgaggggagagatgcatgggatatgcacccaggtttcttttacagtttttagaatcgtttttagagggtggtgtgtctgacaccatgcctttgcacctttccatgaaatgacactcactggtctttgcatcgtgggcataaaatgttcacctttttgccagatgagtacacccagaatgctaatttttctgtccatcgtgtacgctattctagtgcttgtggcccagtactgtctatgagttgtcgtgctcctgtttctgaggttgtcgtgtgagttctgtacaaaaagcccccacaagtcgtccagtagaaatgcatctatgaggtcagcaaggatatgatgagattttgctcacagtcatgtgaaaacaaaatctcagctctttatccattgctttcacttagttttagtaccaaaacaaagagaatgcaaagttaagcagacttgaccaatgcaagtctctaagttgtttttataaatgatctgtagttccgtggcttgcatgggtgcaccaatcatctttagaacgatgtacactgatgttcatctcataaatgtcactctttagagaatgttacttagttaaacatgcagtgaagatcgaatttttttcccaagaacagatgtgttagggagaggggcttcagctaaatagtccaaaccctagggtgcttaaagccaagttagtgcaggctgagccccttggttcacagtcaagcctccttgtttcctagggtgactgtagagaaatgtatttccggatgaggtttctgatctaggccatttgaccaaactttgctgtgtctaagatattagcatgtttttgaaatatttattttttaagatgtttaggagtaaggtcgtgttgtcttcctcaactaaaaagaagtttactgttgtatcgtctccctgaggtgaacgttgttgggttgctagcaagggcagtagcttaaatacttttgttgcctactctgaaagctcatcaaatgagagcccttttatttccaagcagaatttagtcagataattttgcttctaggatatagtatgttgtatatgatgctgtgattgccctggagttcctgccatgacatggaaacctggtggtatggaagcatgtactcaaaatatagacgtgcacgatggtggtgtggcttacccaggatggaaacactgcagttcttacttgcattcccactgcctttcatggggggtgactgggtagaggccaggagaaaggaaagagttgtaaaataaaaaactgctagttcataaaatgtcataaaaaattgtaaacttgaaaagcttaatgctattcaaaagaccttcaagcttccaaacttgtattgaagggagacgactgtttcctcctccaaaatgctcctgctcctcttgttcggttaaccagcacataacattgtgatggggaacctgggttcctctataagataattcttctccatcatctttaaggtaatctgatggttttccaggtggctttcattattgttccatctttgaaaaggcaatagaacccaggggtctgagcatggagctatccagggttttcatccaaaggttgggcctcttcttaagaggtccttttgtgtttcagttgattgaagatgatacttacctcattggaggtgtggcaaggatcttatcagaaggctttgtgttcttgtagttgtcatggctactacagtgtgggtgatttattgaatgaattcactagccacttgtgtcctggagcccccagttcaaatctttccattggactggaggcttgtgggaggctgggaggtggctgtctcctagtgtctacatccgtgtctctgaagcatcaggaaaagtgagatgacttagaggcaactgggcactgaatcagaggagcagagttatttttcagaatttgcacatggaacacttagatttggctggtgcttccagccctggaaggcataacatttacggactcatccccagctgcactgaaggcaggtggtggtacagacttatgaggacggatcagtttgccaaggctgatggtattgggtcactgagcctggtatccatggccgctgaccaggaagcttatgcaaagtggaagcaaggaacaaggcagaataactcagtcactttcatgaagatttttctaaacaagaaggcttaccaccaaaaaagaggtaccctagtggttaccctttgcagatgtgaaagctggaaaacttgacttttctttttggtaatgacttgcatttatctggtgcctttcgttggaggaatcccaacgtgctttagagactatctttttaacatctcttgtacatacatatatacttatataaaatattatcttgcccaactggacctttactcacttctgagcatgagaatgtcccaatagcattgagtttttcaagtggtggtttcagataagtgggagaaagaacaacccggctggcttaaaccctggagctaattcccacaaggaatgtagactgaatggtgacccagggagaaataatcttcctctcccctaaagtctcactaaggtttgaagtttacaggtgctctccactgggtctttgatcgaccttgctagataacatctaaccagcagtttct

SEQ ID NO: 23258 - DNA, 2333 bp, Homo sapiens
  source 1..2333: mol_type = unassigned DNA
cgcgggccaccccgctctcctcgccgccgcggcggcaggcgcggggccgcgccgcgaggcctgatccctgcagcgcgggcaggcggcgtcgcagagcggagctagctggatgcgtccggactcctgcaggtgagagtgattttccagtgattgctttggcctgtacaaccagagaacaggattcttcccttctttttggccaccaaatgcctatgtgcaccacacattccagtgtgctgagaagggcagagcttcttggatgatgatggacgtcccaccgggcaggatgaaggcagagcgtgtggcatctccacctcaagggtgcagcctgatcttcctcttctcccttgccagccagcactctgccttctgtatccaccatggtgtttggtgagtttttccatcgccctggacaagacgaggaacttgtcaacctgaatgtggggggctttaagcagtctgttgaccaaagcaccctcctgcggtttcctcacaccagactggggaagctgcttacttgccattctgaagaggccattctggagctgtgtgatgattacagtgtggccgataaggagtactactttgatcggaatccctccttgttcagatatgttttgaatttttattacacggggaagctgcatgtcatggaggagctgtgcgtattctcattctgccaggagatcgagtactggggcatcaacgagctcttcattgattcttgctgcagcaatcgctaccaggaacgcaaggaggaaaaccacgagaaggactgggaccagaaaagccatgatgtgagtaccgactcctcgtttgaagagtcgtctctgtttgagaaagagctggagaagtttgacacactgcgatttggtcagctccggaagaaaatctggattagaatggagaatccagcgtactgcctgtccgctaagcttatcgctatctcctccttgagcgtggtgctggcctccatcgtggccatgtgcgttcacagcatgtcggagttccagaatgaggatggagaagtggatgatccggtgctggaaggagtggagatcgcgtgcattgcctggttcaccggggagcttgccgtccggctggctgccgctccttgtcaaaagaaattctggaaaaaccctctgaacatcattgactttgtctctattattcccttctatgccacgttggctgtagacaccaaggaggaagagagtgaggatattgagaacatgggcaaggtggtccagatcctacggcttatgaggattttccgaattctaaagcttgcccggcactcggtaggacttcggtctctaggtgccacactgagacacagctaccatgaagttgggcttctgcttctcttcctctctgtgggcatttccattttctctgtgcttatctactccgtggagaaagatgaccacacatccagcctcaccagcatccccatctgctggtggtgggccaccatcagcatgacaactgtgggctatggagacacccacccggtcaccttggcgggaaagctcatcgccagcacatgcatcatctgtggcatcttggtggtggcccttcccatcaccatcatcttcaacaagttttccaagtactaccagaagcaaaaggacattgatgtggaccagtgcagtgaggatgcaccagagaagtgtcatgagctaccttactttaacattagggatatatatgcacagcggatgcacaccttcattaccagtctctcttctgtaggcattgtggtgagcgatcctgactccacagatgcttcaagcattgaagacaatgaggacatttgtaacaccacctccttggagaattgcacagcaaaatgagcgggggtgtttgtgcctgtttctcttatcctttcccgacattaggttaacacagctttataaacctcagtgggttcgttaaaatcatttaattctcagggtgtacctttcagccatagttggacattcattgctgaattctgaaatgatagaattgtctttatttttctctgtgaggtcaattaaatgccttgttctgaaatttattttttacaagagagagttgtgatatagtttggaatataagataaatggtattgggtggggtttgtggctacagcttatgcatcattctgtgtttgtcatttactcacattgagctaactttaaattactgacaagtagaatcaaaggtgcagctgactgagacgacatgcatgtaagatccacaaaatgagacaatgcatgtaaatccatgctcatgttctaaacatggaaactaggagcctaataaacttcctaattcagtatggagaa

SEQ ID NO: 23259 - DNA, 2397 bp, Homo sapiens
  source 1..2397: mol_type = unassigned DNA
agtgcagcgaggccagcgatgccttctggaccacacgctgtcctcgccgaggtcctggtttgttcctcaacgtcggctgaaggcatcgtcccctgacttcctcttccattcgtccttccgaaaggggacccgactggttcctcttctacatatgaggcgcatctgcttggtgcaaatgtccaagcacctcttctgactcggtgagagtgattttccagtgattgctttggcctgtacaaccagagaacaggattcttcccttctttttggccaccaaatgcctatgtgcaccacacattccagtgtgctgagaagggcagagcttcttggatgatgatggacgtcccaccgggcaggatgaaggcagagcgtgtggcatctccacctcaagggtgcagcctgatcttcctcttctcccttgccagccagcactctgccttctgtatccaccatggtgtttggtgagtttttccatcgccctggacaagacgaggaacttgtcaacctgaatgtggggggctttaagcagtctgttgaccaaagcaccctcctgcggtttcctcacaccagactggggaagctgcttacttgccattctgaagaggccattctggagctgtgtgatgattacagtgtggccgataaggagtactactttgatcggaatccctccttgttcagatatgttttgaatttttattacacggggaagctgcatgtcatggaggagctgtgcgtattctcattctgccaggagatcgagtactggggcatcaacgagctcttcattgattcttgctgcagcaatcgctaccaggaacgcaaggaggaaaaccacgagaaggactgggaccagaaaagccatgatgtgagtaccgactcctcgtttgaagagtcgtctctgtttgagaaagagctggagaagtttgacacactgcgatttggtcagctccggaagaaaatctggattagaatggagaatccagcgtactgcctgtccgctaagcttatcgctatctcctccttgagcgtggtgctggcctccatcgtggccatgtgcgttcacagcatgtcggagttccagaatgaggatggagaagtggatgatccggtgctggaaggagtggagatcgcgtgcattgcctggttcaccggggagcttgccgtccggctggctgccgctccttgtcaaaagaaattctggaaaaaccctctgaacatcattgactttgtctctattattcccttctatgccacgttggctgtagacaccaaggaggaagagagtgaggatattgagaacatgggcaaggtggtccagatcctacggcttatgaggattttccgaattctaaagcttgcccggcactcggtaggacttcggtctctaggtgccacactgagacacagctaccatgaagttgggcttctgcttctcttcctctctgtgggcatttccattttctctgtgcttatctactccgtggagaaagatgaccacacatccagcctcaccagcatccccatctgctggtggtgggccaccatcagcatgacaactgtgggctatggagacacccacccggtcaccttggcgggaaagctcatcgccagcacatgcatcatctgtggcatcttggtggtggcccttcccatcaccatcatcttcaacaagttttccaagtactaccagaagcaaaaggacattgatgtggaccagtgcagtgaggatgcaccagagaagtgtcatgagctaccttactttaacattagggatatatatgcacagcggatgcacaccttcattaccagtctctcttctgtaggcattgtggtgagcgatcctgactccacagatgcttcaagcattgaagacaatgaggacatttgtaacaccacctccttggagaattgcacagcaaaatgagcgggggtgtttgtgcctgtttctcttatcctttcccgacattaggttaacacagctttataaacctcagtgggttcgttaaaatcatttaattctcagggtgtacctttcagccatagttggacattcattgctgaattctgaaatgatagaattgtctttatttttctctgtgaggtcaattaaatgccttgttctgaaatttattttttacaagagagagttgtgatatagtttggaatataagataaatggtattgggtggggtttgtggctacagcttatgcatcattctgtgtttgtcatttactcacattgagctaactttaaattactgacaagtagaatcaaaggtgcagctgactgagacgacatgcatgtaagatccacaaaatgagacaatgcatgtaaatccatgctcatgttctaaacatggaaactaggagcctaataaacttcctaattcagta

SEQ ID NO: 23260 - DNA, 553 bp, Homo sapiens
  source 1..553: mol_type = unassigned DNA
agggaagagcgaacccagggcccttgctctcgtgcagcgctgcgccctgggtggggacggcgtgaggcttgcagcgcaggtgagagtgattttccagtgattgctttggcctgtacaaccagagaacaggattcttcccttctttttggccaccaaatgcctatgtgcaccacacattccagtgtgctgagaagggcagagcttcttggatgatgatggacgtcccaccgggcaggatgaaggcagagcgtgtggcatctccacctcaagggtgcagcctgatcttcctcttctcccttgccagccagcactctgccttctgtatccaccatggtgtttggtgagtttttccatcgccctggacaagacgaggaacttgtcaacctgaatgtggggggctttaagcagtctgttgaccaaagcaccctcctgcggtttcctcacaccagactggggaagctgcttacttgccattctgaagaggccattctggagctgtgtgatgattacagtgtggccgataaggagtactactttgatcggaatccctcct

SEQ ID NO: 23261 - DNA, 3320 bp, Homo sapiens
  source 1..3320: mol_type = unassigned DNA
caaccaccaaacagacaagcccttcggcctgtcctggagggcgttgaatggcatggcctggagctcaaccaggagaaccgtgctcaggaggaagagaccagaaggataactcaaaaagttctgagaagttcctaagaccacctgaagagaaggagcctgctgccaatggtgtggacaccgcagtgtgcttgaggagacttcagaaacgagaactggaaaaatccctctgctttctctggccagtttcacacaatcatcaggtgagccgaggatccattggaggaaggcattatctgtatccagaggaaatagccaaggatattcagaggtgtgcctgggaagtttgagctgcagcagtggaaccttaatgcccaggatgatcctgtctaacaccacagcggtgacgccctttctgaccaagctgtggcaggagacagttcagcagggtggcaacatgtcgggcctggcccgcaggtccccccgcagcagtgacggcaagctggaggccctctacgtcctcatggtactgggattcttcggcttcttcaccctgggcatcatgctgagctacatccgctccaagaagctggagcactcgaacgacccattcaacgtctacatcgagtccgatgcctggcaagagaaggacaaggcctatgtccaggcccgggtcctggagagctacaggtcgtgctatgtcgttgaaaaccatctggccatagaacaacccaacacacaccttcctgagacgaagccttccccatgaaccccaccactggctaaaactggacacatcctgcctggcaacctgattttctaatcacattcctctcatactctttattgtgatggataccactggatttctttttggctgttgtaaggggtgaggggtggattaatgacactgtttcactgtttctctaaaatcacgttcttttgtgatagactgtcagtggttcccccatatctgtccctgccttgctaaatttagcagaatccctgaggacatggcctctgagaatagcagctgcatttcccagactcccttgcagctagcaaggttgtgtgactaagccctggccagtaggcatggaagtgaagactgtaatgtccaagtaatccttggaaagaaaagaacgtgcccttaactaactttgtcctgcttcccagtggctggatgtggaggaggtggagagcagttatgagactgggaaagaacggggcactcaaagagccacacacatctgggcctgggcgacgtggatcctccttaccacccaccaggccagatttacaggagagagaaatccactccactcttccttaagccactgttattctgatctctgttaaggtcgcagaatcaatgcccttactgatacacctaccttataggactgaacctaaaggcatgacatttccatacttgtcacaagcacacactgattctgcccttgtcacttctgtgctcactcttgtggctctatcctcctcctgcccttccgccttccactcctcccttgcacccatcctgcacacatctccctgaaaacacacaggcacatacactcatatacatagacacacatacacacctcaatctagaaagaacttgctttgtacagggctgagatggaggagaaaaaaatgcccccttcagaatgcataccaaggggaaggtgctcggtcactgtgggagcagggaaaggtgcccccactccccgagagccaggggaaggagtggctctgggcagagagggacacatagcactggggtggcaggtccttttgaggtgatgggccggttttgtgagatgaattgtatcccccaaaaagacaggtaccttcaatgtgacctaattgggaaatagagtctttgcagatgatctagttgagatgaggtcattggggtgggccctcacccaatatgactggagtccttatcggaagagggaaattcagacacagatgcatagggaggacaccatgccgtgacagaggcagagggtgcagtgacacagccacaaaccaaggaaggccgaggatggatgcgcatccccatcccaagaagtcgggaagaagccaggaaggctcctctcccacaggtttcagaggaagcacagccctgcttgaattcaaacttttggcctccagaactgtgagtcagtacctgttgttgaagccacccagcttaggatactctggcagcctactgccatacagtattgggatactatagtgagcccatgcagcacctctcacccacccagagatggagctgctctgccttccagcggggcacccggagggctgccccagcagatagagagggcctccgttctgccacctgccttgaaagggtctccagctgccatatgtagcattggagtcctctgcaatgcgacatcctgaaagctcagctgcctgggcattcctgaagagtatggaatatttaaatgaaacatatttttttaaaacctgcgcataagataaaagcagcccgtgtgcatcttgggccatcctcaaatggacagacttggtcttgtgaggttccagtccttgtttcacataataaacactggcatggctcagcccctgagttaccacagtccttgagatgagtggttctttgggttacaaagtcctctgaaagtctagtgagagctgtgatctttgccccacccgaataatgcatatggacaccacaccttgcctgccgtgtccaggattcatgaccagtagcagcccagctatgcctgccacgtctcatggcccctgtgtaagccagacccttcttaggcagttgcatattcccagactgaggcagggcaggtttgcagagagagacccagagtgcacgtgacccgcagtgtgatccctggcacgcactgactttgatattccaggcacacggactggctatttatcaccacttctttttccccactaagattcctgtgccttttaaggcagagggagatccctatggcgttagtcttcccaggccttaaagggcccttgtcttcactcacaaacctcttatctcttcttctccttcctctacattttaaagggggagagggaaaagtaaccgggagacaaattgagccacatattttcagacacttgttaccatattttaaaatctggcttcacatacacagagtctttgctatgcaccatgtactgttctaagcttcttaaaaatagaatctcaattattattttgcaggcaatactctatgcattcattagctaggacaacaatgcatttgcagtagtgagatttcgctaaaaaattaaagccatttactatg

SEQ ID NO: 23262 - DNA, 666 bp, Homo sapiens
  source 1..666: mol_type = unassigned DNA
gagaaccgtgctcaggaggaagagaccagaaggataactcaaaaagttctgagaagttcctaagaccacctgaagagaaggagcctgctgccaatggtgtggacaccgcagtgtgcttgaggagacttcagaaacgagaactgtttcacacaatcatcaggtgagccgaggatccattggaggaaggcattatctgtatccagaggaaatagccaaggatattcagaggtgtgcctgggaagtttgagctgcagcagtggaaccttaatgcccaggatgatcctgtctaacaccacagcggtgacgccctttctgaccaagctgtggcaggagacagttcagcagggtggcaacatgtcgggcctggcccgcaggtccccccgcagcagtgacggcaagctggaggccctctacgtcctcatggtactgggattcttcggcttcttcaccctgggcatcatgctgagctacatccgctccaagaagctggagcactcgaacgacccattcaacgtctacatcgagtccgatgcctggcaagagaaggacaaggcctatgtccaggcccgggtcctggagagctacaggtcgtgctatgtcgttgaaaaccatctggccatagaacaacccaacacacaccttcctgagacgaagccttccccatga

SEQ ID NO: 23263 - DNA, 1204 bp, Homo sapiens
  source 1..1204: mol_type = unassigned DNA
gaaatcacaaattacaaaacgtcagagtactttctggaaataagccttcctctccagggaacaacgcatttgacacttgactgggatacactaccggatcctccgagggtgatggttctcaagaaggcagaagcaatggtgaccaatagacctccttaaaggctgagccgctgggcaccttcctactcctctcgaccgtgctaggatgactgcagcagagtccccgagtcctttgatgcaagggtctagcaaccaccaaacagacaagcccttcggcctgtcctggagggcgttgaatggcatggcctggagctcaaccaggagaaccgtgctcaggaggaagagaccagaaggataactcaaaaagttctgagaagttcctaagaccacctgaagagaaggagcctgctgccaatggtgtggacaccgcagtgtgcttgaggagacttcagaaacgagaactggaaaaatccctctgctttctctggccagtttcacacaatcatcaggtgagccgaggatccattggaggaaggcattatctgtatccagaggaaatagccaaggatattcagaggtgtgcctgggaagtttgagctgcagcagtggaaccttaatgcccaggatgatcctgtctaacaccacagcggtgacgccctttctgaccaagctgtggcaggagacagttcagcagggtggcaacatgtcgggcctggcccgcaggtccccccgcagcagtgacggcaagctggaggccctctacgtcctcatggtactgggattcttcggcttcttcaccctgggcatcatgctgagctacatccgctccaagaagctggagcactcgaacgacccattcaacgtctacatcgagtccgatgcctggcaagagaaggacaaggcctatgtccaggcccgggtcctggagagctacaggtcgtgctatgtcgttgaaaaccatctggccatagaacaacccaacacacaccttcctgagacgaagccttccccatgaaccccaccactggctaaaactggacacatcctgcctggcaacctgattttctaatcacattcctctcatactctttattgtgatggataccactggatttctttttggctgttgtaaggggtgaggggtggattaatgacactgtttcactgtttctctaaaatcacgttcttttgtgatagactgtca

SEQ ID NO: 23264 - DNA, 3154 bp, Homo sapiens
  source 1..3154: mol_type = unassigned DNA
gggctgtctgtggcctcagcgctcggcaggcgcgcactcagctccacacccggctctctcggcatctcagacccggtttcacacaatcatcaggtgagccgaggatccattggaggaaggcattatctgtatccagaggaaatagccaaggatattcagaggtgtgcctgggaagtttgagctgcagcagtggaaccttaatgcccaggatgatcctgtctaacaccacagcggtgacgccctttctgaccaagctgtggcaggagacagttcagcagggtggcaacatgtcgggcctggcccgcaggtccccccgcagcagtgacggcaagctggaggccctctacgtcctcatggtactgggattcttcggcttcttcaccctgggcatcatgctgagctacatccgctccaagaagctggagcactcgaacgacccattcaacgtctacatcgagtccgatgcctggcaagagaaggacaaggcctatgtccaggcccgggtcctggagagctacaggtcgtgctatgtcgttgaaaaccatctggccatagaacaacccaacacacaccttcctgagacgaagccttccccatgaaccccaccactggctaaaactggacacatcctgcctggcaacctgattttctaatcacattcctctcatactctttattgtgatggataccactggatttctttttggctgttgtaaggggtgaggggtggattaatgacactgtttcactgtttctctaaaatcacgttcttttgtgatagactgtcagtggttcccccatatctgtccctgccttgctaaatttagcagaatccctgaggacatggcctctgagaatagcagctgcatttcccagactcccttgcagctagcaaggttgtgtgactaagccctggccagtaggcatggaagtgaagactgtaatgtccaagtaatccttggaaagaaaagaacgtgcccttaactaactttgtcctgcttcccagtggctggatgtggaggaggtggagagcagttatgagactgggaaagaacggggcactcaaagagccacacacatctgggcctgggcgacgtggatcctccttaccacccaccaggccagatttacaggagagagaaatccactccactcttccttaagccactgttattctgatctctgttaaggtcgcagaatcaatgcccttactgatacacctaccttataggactgaacctaaaggcatgacatttccatacttgtcacaagcacacactgattctgcccttgtcacttctgtgctcactcttgtggctctatcctcctcctgcccttccgccttccactcctcccttgcacccatcctgcacacatctccctgaaaacacacaggcacatacactcatatacatagacacacatacacacctcaatctagaaagaacttgctttgtacagggctgagatggaggagaaaaaaatgcccccttcagaatgcataccaaggggaaggtgctcggtcactgtgggagcagggaaaggtgcccccactccccgagagccaggggaaggagtggctctgggcagagagggacacatagcactggggtggcaggtccttttgaggtgatgggccggttttgtgagatgaattgtatcccccaaaaagacaggtaccttcaatgtgacctaattgggaaatagagtctttgcagatgatctagttgagatgaggtcattggggtgggccctcacccaatatgactggagtccttatcggaagagggaaattcagacacagatgcatagggaggacaccatgccgtgacagaggcagagggtgcagtgacacagccacaaaccaaggaaggccgaggatggatgcgcatccccatcccaagaagtcgggaagaagccaggaaggctcctctcccacaggtttcagaggaagcacagccctgcttgaattcaaacttttggcctccagaactgtgagtcagtacctgttgttgaagccacccagcttaggatactctggcagcctactgccatacagtattgggatactatagtgagcccatgcagcacctctcacccacccagagatggagctgctctgccttccagcggggcacccggagggctgccccagcagatagagagggcctccgttctgccacctgccttgaaagggtctccagctgccatatgtagcattggagtcctctgcaatgcgacatcctgaaagctcagctgcctgggcattcctgaagagtatggaatatttaaatgaaacatatttttttaaaacctgcgcataagataaaagcagcccgtgtgcatcttgggccatcctcaaatggacagacttggtcttgtgaggttccagtccttgtttcacataataaacactggcatggctcagcccctgagttaccacagtccttgagatgagtggttctttgggttacaaagtcctctgaaagtctagtgagagctgtgatctttgccccacccgaataatgcatatggacaccacaccttgcctgccgtgtccaggattcatgaccagtagcagcccagctatgcctgccacgtctcatggcccctgtgtaagccagacccttcttaggcagttgcatattcccagactgaggcagggcaggtttgcagagagagacccagagtgcacgtgacccgcagtgtgatccctggcacgcactgactttgatattccaggcacacggactggctatttatcaccacttctttttccccactaagattcctgtgccttttaaggcagagggagatccctatggcgttagtcttcccaggccttaaagggcccttgtcttcactcacaaacctcttatctcttcttctccttcctctacattttaaagggggagagggaaaagtaaccgggagacaaattgagccacatattttcagacacttgttaccatattttaaaatctggcttcacatacacagagtctttgctatgcaccatgtactgttctaagcttcttaaaaatagaatctcaattattattttgcaggcaatactctatgcattcattagctaggacaacaatgcatttgcagtagtgagatttcgctaaaaaattaaagccatttactatga

SEQ ID NO: 23265 - DNA, 796 bp, Homo sapiens
  source 1..796: mol_type = unassigned DNA
atttgcaggtgtctcgctcagcgcagctgcccagagccctgtgtcctgagtgatttccagtagattagcagctctgggtctaagcttttaagaaaaaaaaaaaattgcactacccttcagtaggggcagcattcacatctcacacccaggcagaagcagaaacggccaggaatccaccccactttctgggcctgacaaggccacagtttgagaacgttcagcacaggccaagcatcagatggattttgaacatctctggctcctaccatttctgcctccaccatccctttactcactgtgcaagctacaaaagctgaggggacaggaacaaggatgatttctgatggcatatttagaggtgtgcctgggaagtttgagctgcagcagtggaaccttaatgcccaggatgatcctgtctaacaccacagcggtgacgccctttctgaccaagctgtggcaggagacagttcagcagggtggcaacatgtcgggcctggcccgcaggtccccccgcagcagtgacggcaagctggaggccctctacgtcctcatggtactgggattcttcggcttcttcaccctgggcatcatgctgagctacatccgctccaagaagctggagcactcgaacgacccattcaacgtctacatcgagtccgatgcctggcaagagaaggacaaggcctatgtccaggcccgggtcctggagagctacaggtcgtgctatgtcgttgaaaaccatctggccatagaacaacccaacacacaccttcctgagacgaagccttccccatga

SEQ ID NO: 23266 - DNA, 3181 bp, Homo sapiens
  source 1..3181: mol_type = unassigned DNA
gggctgtctgtggcctcagcgctcggcaggcgcgcactcagctccacacccggctctctcggcatctcagacccgggaaaaatccctctgctttctctggccagtttcacacaatcatcaggtgagccgaggatccattggaggaaggcattatctgtatccagaggaaatagccaaggatattcagaggtgtgcctgggaagtttgagctgcagcagtggaaccttaatgcccaggatgatcctgtctaacaccacagcggtgacgccctttctgaccaagctgtggcaggagacagttcagcagggtggcaacatgtcgggcctggcccgcaggtccccccgcagcagtgacggcaagctggaggccctctacgtcctcatggtactgggattcttcggcttcttcaccctgggcatcatgctgagctacatccgctccaagaagctggagcactcgaacgacccattcaacgtctacatcgagtccgatgcctggcaagagaaggacaaggcctatgtccaggcccgggtcctggagagctacaggtcgtgctatgtcgttgaaaaccatctggccatagaacaacccaacacacaccttcctgagacgaagccttccccatgaaccccaccactggctaaaactggacacatcctgcctggcaacctgattttctaatcacattcctctcatactctttattgtgatggataccactggatttctttttggctgttgtaaggggtgaggggtggattaatgacactgtttcactgtttctctaaaatcacgttcttttgtgatagactgtcagtggttcccccatatctgtccctgccttgctaaatttagcagaatccctgaggacatggcctctgagaatagcagctgcatttcccagactcccttgcagctagcaaggttgtgtgactaagccctggccagtaggcatggaagtgaagactgtaatgtccaagtaatccttggaaagaaaagaacgtgcccttaactaactttgtcctgcttcccagtggctggatgtggaggaggtggagagcagttatgagactgggaaagaacggggcactcaaagagccacacacatctgggcctgggcgacgtggatcctccttaccacccaccaggccagatttacaggagagagaaatccactccactcttccttaagccactgttattctgatctctgttaaggtcgcagaatcaatgcccttactgatacacctaccttataggactgaacctaaaggcatgacatttccatacttgtcacaagcacacactgattctgcccttgtcacttctgtgctcactcttgtggctctatcctcctcctgcccttccgccttccactcctcccttgcacccatcctgcacacatctccctgaaaacacacaggcacatacactcatatacatagacacacatacacacctcaatctagaaagaacttgctttgtacagggctgagatggaggagaaaaaaatgcccccttcagaatgcataccaaggggaaggtgctcggtcactgtgggagcagggaaaggtgcccccactccccgagagccaggggaaggagtggctctgggcagagagggacacatagcactggggtggcaggtccttttgaggtgatgggccggttttgtgagatgaattgtatcccccaaaaagacaggtaccttcaatgtgacctaattgggaaatagagtctttgcagatgatctagttgagatgaggtcattggggtgggccctcacccaatatgactggagtccttatcggaagagggaaattcagacacagatgcatagggaggacaccatgccgtgacagaggcagagggtgcagtgacacagccacaaaccaaggaaggccgaggatggatgcgcatccccatcccaagaagtcgggaagaagccaggaaggctcctctcccacaggtttcagaggaagcacagccctgcttgaattcaaacttttggcctccagaactgtgagtcagtacctgttgttgaagccacccagcttaggatactctggcagcctactgccatacagtattgggatactatagtgagcccatgcagcacctctcacccacccagagatggagctgctctgccttccagcggggcacccggagggctgccccagcagatagagagggcctccgttctgccacctgccttgaaagggtctccagctgccatatgtagcattggagtcctctgcaatgcgacatcctgaaagctcagctgcctgggcattcctgaagagtatggaatatttaaatgaaacatatttttttaaaacctgcgcataagataaaagcagcccgtgtgcatcttgggccatcctcaaatggacagacttggtcttgtgaggttccagtccttgtttcacataataaacactggcatggctcagcccctgagttaccacagtccttgagatgagtggttctttgggttacaaagtcctctgaaagtctagtgagagctgtgatctttgccccacccgaataatgcatatggacaccacaccttgcctgccgtgtccaggattcatgaccagtagcagcccagctatgcctgccacgtctcatggcccctgtgtaagccagacccttcttaggcagttgcatattcccagactgaggcagggcaggtttgcagagagagacccagagtgcacgtgacccgcagtgtgatccctggcacgcactgactttgatattccaggcacacggactggctatttatcaccacttctttttccccactaagattcctgtgccttttaaggcagagggagatccctatggcgttagtcttcccaggccttaaagggcccttgtcttcactcacaaacctcttatctcttcttctccttcctctacattttaaagggggagagggaaaagtaaccgggagacaaattgagccacatattttcagacacttgttaccatattttaaaatctggcttcacatacacagagtctttgctatgcaccatgtactgttctaagcttcttaaaaatagaatctcaattattattttgcaggcaatactctatgcattcattagctaggacaacaatgcatttgcagtagtgagatttcgctaaaaaattaaagccatttactatg

SEQ ID NO: 23267 - DNA, 803 bp, Homo sapiens
  source 1..803: mol_type = unassigned DNA
gtaaggtgaaggtgcccagcaggctgaggcttgtgtgcaacccagaagagagctcgctaacgccagcaagaaggttcagaacagcctggctttggaaaggaatttcatcctgcccacacactgcatagcaggagggaagcatgtctactttatccaatttcacacagacgctggaagacgtcttccgaaggatttttattacttatatggacaattggcgccagaacacaacagctgagcaagaggccctccaagccaaagttgatgctgagaacttctactatgtcatcctgtacctcatggtgatgattggaatgttctctttcatcatcgtggccatcctggtgagcactgtgaaatccaagagacgggaacactccaatgacccctaccaccagtacattgtagaggactggcaggaaaagtacaagagccaaatcttgaatctagaagaatcgaaggccaccatccatgagaacattggtgcggctgggttcaaaatgtccccctgataagggagaaaggcaccaagctaacatctgacgtccagacatgaagagatgccagtgccacgaggcaaatccaaattgtctttgcttagaagaaagtgagttccttgctctctgttgagaattttcatggagattatgtggttggccaataaagatagatgacatttcaatctcagtgatttatgcttgcttgttggagcaatattttgtgctgaagacctcttttactttccgggcaagtgaatgtcattttaatcaatatcaatgatgaaaataaagccaaatttgaag

SEQ ID NO: 23268 - DNA, 3143 bp, Homo sapiens
  source 1..3143: mol_type = unassigned DNA
ggtgtgctggggcccgggcggggcagggggaggggacgcccgggggagggaaaagggagccgagcgcgggtgggagcccagagccagagagcgcgctgggcggtgctgggcacccgcggagtggaacggggctggtggaatgcacagggtcgcagcgcttgggccaccctcggtcagagggcgccgtgtccagcgagcaaacgggcgccccggagccttgctgagaggcagctctgggctttcccagctccgaagtcaatactgagatcccagatgtgtccagagacatcctgaagaggctcgggggtggaggagccttagtgtgtccacaaagggactcctgaaactgactgagagccagtggatttgccagcagtctgagcttctaccgagtcttcccccacctcaatccctgttgctatggagactaccaatggaacggagacctggtatgagagcctgcatgccgtgctgaaggctctaaatgccactcttcacagcaatttgctctgccggccagggccagggctggggccagacaaccagactgaagagaggcgggccagcctacctggccgtgatgacaactcctacatgtacattctctttgtcatgtttctatttgctgtaactgtgggcagcctcatcctgggatacacccgctcccgcaaagtggacaagcgtagtgacccctatcatgtgtatatcaagaaccgtgtgtctatgatctaacacgagagggctgggacggtggaagaccaagacacctggggattgcgtctggggcctccagaactctgctgtggactgcatcaggtctcagtgtccctatctgtaagatcaacaagaaacacggttaagggaggtcgtcactggggtgggagaagaggggctggtagaccgaagccttgtgcataaggattttttcccaggaaaagatagactttataaacagtgggagcccatgaacaaacatataaaagtagcaacagataatgaccaataactggttcagtggctggagtattaggggcctggggattggagaacggagaagaagttgtagcagagggaaatgagacaggaagatgctctggggacacattttttatgtgttatcttcagccatgagaagcagtgatgactatcccatatcacagatatgatttaccaccaccaccctgcccccgctcccgtgaagaaagcagggcaagtgctgtgctgcccatttgggcctgcatagtgccatgattggaacccaggaactctggtctccttgcctagtgcttttcaaaactctgtgctacacaggagtggatccaggcctgaaggtcatacaattctggggactctctttaagaaaaagaattctaaaatatcttacttttgcaaacattatgaaaatatactgccacattaatatgttgctagggcccctgctaggaccttaagaaggagctcatgtgagtcaggaccctgaatgttaggcctcgttagctctatggttcatatgcttcttgaaccaagtcacagggcacttcccagccacattgccaggcaacaggactaaactacctccaaagcaagcagtcttttcagttttgactgagtgatgtgagaaacttcttttcttttcttttctttttttttttttgagacagtctccctatgtcacccaggctgtggtgcagcaacccaatcttggctcactgcaacccccacctcccgggttcaagcaattatcctgcctcagccacctgagtagctgggattacaggttcctgtcaccacacccagttaatttatatatatatatatatatatatatttaagtagagacagggtttcacatgttgcccaggctggtctcgaactcctgtcctcaagttatctgcccattttggtctcccaaagtgctgggattacaagtgtaagccaccacgactatctgagagaagttttctgatgtcatgttgaatctgcttctaaaagactgatactgccaaggtgggcggatcacctgaggtcaggagttcgagaccagcctggccaacatggtgaaaccccatctactaaaaaaatacaaaaattagccagacctggtggcgggtgcccgtattcccagctacttgggaggctgaggcaggagaattgtttgaacccgggaggtggaggttgcagtaagccaagatcacgccactgcactccagcctgggtgacagagcaaggctctgtctcaaaaaaaaacaaaaacaaaaacaaaaaagactgatatcgcacctaaattattattatattaaaagaagcagagtatgagagacaggtacatggtccagtaggaagagaagcagccctgattctaccacttaaggtgatgtatgatcttaggctggacacttctctccctcatccgttttcctcttcaacataatgaaatagacttgaaagtctctaaggctctatcagttctgacattctaggcttcatatacattaagttgagccatatgtaatcactgtgtttgtaggttagaaacagctgagtatcgtagtttcatatatggttccagctaatacatgcaatgtggctggtgaacacttctgaattcagaaactatcccagatctcagctagaaccatccactgttctgtttgtccagtttcaacttaagggatctccatgcggtccctggaagtacccattgaaacatgcgtatttgtgtatagcagaactctgaaataatattctgacagcagttatctctgaggaattgggttataggtgattttccctttccgcatgataaatttatgtaatatttgactgacttgaccgtaagtatgttacttgtataataaaaggaaaaaaggtacttctattttgaaaaaataaaaataaaagcctttgggttcttgaatggaggatcatggaacacatttgctgccatatgcagttatgttgatgctctgcaaacctgtgctgagccctgttgctcaagcccttcctcatctcttcttgagggagaaggtggagacttccttaaggagatgtgacatatgggaagacaacagattcagaaatttacgtggataggactttagacaccacccagcccaaacttccaaataaaatatggaacgcaa

SEQ ID NO: 23269 - DNA, 935 bp, Homo sapiens
  source 1..935: mol_type = unassigned DNA
tcacccagtgaagacactgtaagtctggaggtaggggacagcaatcagaggccctttggtcactgcacagttcctttaactgcaaccctaggctggcctgacccagctgctgcaggaaggggaggggccatgggagggggtcagagcccacagcaggactgttgcataatccttggggcctggccttgggcaatccaccctggttctgaagtttgtgctttgtgtctggttccttccttttctgccttctctcctgctttctagctctgggctttcccagctccgaagtcaatactgagatcccagatgtgtccagagacatcctgaagaggctcgggggtggaggagccttagtgtgtccacaaagggactcctgaaactgactgagagccagtggatttgccagcagtctgagcttctaccgagtcttcccccacctcaatccctgttgctatggagactaccaatggaacggagacctggtatgagagcctgcatgccgtgctgaaggctctaaatgccactcttcacagcaatttgctctgccggccagggccagggctggggccagacaaccagactgaagagaggcgggccagcctacctggccgtgatgacaactcctacatgtacattctctttgtcatgtttctatttgctgtaactgtgggcagcctcatcctgggatacacccgctcccgcaaagtggacaagcgtagtgacccctatcatgtgtatatcaagaaccgtgtgtctatgatctaacacgagagggctgggacggtggaagaccaagacacctggggattgcgtctggggcctccagaactctgctgtggactgcatcaggtctcagtgtccctatctgtaagatcaacaagaaacacggttaagggaggtcgtcactggggtgggagaagaggggctggtagacc

SEQ ID NO: 23270 - DNA, 550 bp, Homo sapiens
  source 1..550: mol_type = unassigned DNA
agagccagagagcgcgctgggcggtgctgggcacccgcggagtggaacggggctggtggaatgcacagggtcgcagcgcttgggccaccctcggtcagagggcgccgtgtccagcgagcaaacgggcgccccggagccttgctgagaggcagacactgaagacgctcattctgaaagagtagctgaaacggagtgacgggaaagaaagacccaaggatgcggacagaagctgaggcccagaaaagggaagtcttatgtccaaagtcacacaaggagcagctgagctgggacaactcccctggtttccatttccttcaccgtaaactctgggctttcccagctccgaagtcaatactgagatcccagatgtgtccagagacatcctgaagaggctcgggggtggaggagccttagtgtgtccacaaagggactcctgaaactgactgagagccagtggatttgccagcagtctgagcttctaccgagtcttcccccacctcaatccctgttgctatggagactaccaatggaacggagacctggtatgaga

SEQ ID NO: 23271 - DNA, 555 bp, Homo sapiens
  source 1..555: mol_type = unassigned DNA
cagagccagagagcgcgctgggcggtgctgggcacccgcggagtggaacggggctggtggaatgcacagggtcgcagcgcttgggccaccctcggtcagagggcgccgtgtccagcgagcaaacgggcgccccggagccttgctgagaggcagacactgaagacgctcattctgaaagagtagctgaaacggagtgacgggaaagaaagacccaaggctctgggctttcccagctccgaagtcaatactgagatcccagatgtgtccagagacatcctgaagaggctcgggggtggaggagccttagtgtgtccacaaagggactcctgaaactgactgagagccagtggatttgccagcagtctgagcttctaccgagtcttcccccacctcaatccctgttgctatggagactaccaatggaacggagacctggtatgagagcctgcatgccgtgctgaaggctctaaatgccactcttcacagcaatttgctctgccggccagggccagggctggggccagacaaccagactgaagagaggcgggccagcct

SEQ ID NO: 23272 - DNA, 607 bp, Homo sapiens
  source 1..607: mol_type = unassigned DNA
agagccagagagcgcgctgggcggtgctgggcacccgcggagtggaacggggctggtggaatgcacagggtcgcagcgcttgggccaccctcggtcagagggcgccgtgtccagcgagcaaacgggcgccccggagccttgctgagaggcagatgcggacagaagctgaggcccagaaaagggaagtcttatgtccaaagtcacacaaggagcagctgagctgggacaactcccctggtttccatttccttcaccgtaaactctgggctttcccagctccgaagtcaatactgagatcccagatgtgtccagagacatcctgaagaggctcgggggtggaggagccttagtgtgtccacaaagggactcctgaaactgactgagagccagtggatttgccagcagtctgagcttctaccgagtcttcccccacctcaatccctgttgctatggagactaccaatggaacggagacctggtatgagagcctgcatgccgtgctgaaggctctaaatgccactcttcacagcaatttgctctgccggccagggccagggctggggccagacaaccagactgaagagaggcgggccagcctacctggccg

SEQ ID NO: 23273 - DNA, 585 bp, Homo sapiens
  source 1..585: mol_type = unassigned DNA
ccaggaagcaggcgctgcaggggacggaagggtcggagcccacagccgggggaggccaaggagctgggcggaggcactccaggccagcccggggagaactctgggctttcccagctccgaagtcaatactgagatcccagatgtgtccagagacatcctgaagaggctcgggggtggaggagccttagtgtgtccacaaagggactcctgaaactgactgagagccagtggatttgccagcagtctgagcttctaccgagtcttcccccacctcaatccctgttgctatggagactaccaatggaacggagacctggtatgagagcctgcatgccgtgctgaaggctctaaatgccactcttcacagcaatttgctctgccggccagggccagggctggggccagacaaccagactgaagagaggcgggccagcctacctggccgtgatgacaactcctacatgtacattctctttgtcatgtttctatttgctgtaactgtgggcagcctcatcctgggatacacccgctcccgcaaagtggacaagcgtagtgacccctatcatgtgtatatcaagaaccgtg

SEQ ID NO: 23274 - DNA, 3291 bp, Homo sapiens
  source 1..3291: mol_type = unassigned DNA
attatgggattcagctgcctctgaaaacctgtagcccaataatggttattccccaggagccgcgcgaagcatgagctaattttcagtgagcgcggactttggggtaacggttccagcacagcacatccctttctcctcttttcactcatcgtcaccgctacctgaaaaccctggccgggtgctggggcttgaggagcagttcccacttcccagtctttttcacttttcacagctgcaaagttcagggagttgaactgcagtgctttcagttcactgctcactctgccacgatcaatctctgttgtaaattttcctcccagagcacgtgacgatgcacttcttgactatatatcccaactgcagcagcggagttgtcagagcgcagagccggacagagcagaagaaccctcttggactggacgatttgggaattcaaaacttgggacaaactgtcagccttgcccctgctgtggaggcagcctcaatgctgaaaatggagcctctgaacagcacgcaccccggcaccgccgcctccagcagccccctggagtcccgtgcggccggcggcggcagcggcaatggcaacgagtacttctacattctggttgtcatgtccttctacggcattttcttgatcggaatcatgctgggctacatgaaatccaagaggcgggagaagaagtccagcctcctgctgctgtacaaagacgaggagcggctctggggggaggccatgaagccgctgcctgtggtgtcgggcctgaggtcggtgcaggtgcccctgatgctgaacatgctgcaggagagcgtggcgcccgcgctgtcctgcaccctctgttccatggaaggggacagcgtgagctccgagtcctcctccccggacgtgcacctcaccattcaggaggagggggcagacgatgagctggaggagacctcggagacgcccctcaacgagagcagcgaagggtcctcggagaacatccatcagaattcctagcacccccgggacccctgccggtggctccatcagccagcaaccttagagagaggaaagacagttttcaagtgtctggtttcactttcacagtgcggctgccactttgaagagacccttggtaaacccctgattcggggtggggtgggggactaggctcagccggaaccagcacctccaaggagtccgggaggtgcctgtggtttgcacccaccactgaaaaagccgcggagatgcgcagcgcgtacactgactttggggcctgggtgttggggttctgatcagaatttggcgggatgatatgtttgccattttctcactggatgccctgggtagctcctgcagggtctgcctgttcccagggctgccgaatgcttaggacacgctgagagactagttgtgatttgctattttgcctagagctttgtccttctagatctgattggctgtaagtatctctactgtgtacctgtggcattccttcacagtgggttacaagcttcttttggattagagggggatttttgatgggagaaagctggagatctgaacccagcccatttgcacactataagaaaaaaaagtaacttttaaacctgttaacattggccggggttataagagatgatcttctattttgaccttttgtctaacttatgaccttgaactctgacctgtgaccatgcagcatcacatgatggcatgacgttctttggatcagaagagcttccccagaatctaacctgcactcccgatggtggttcaggagactcttcctgatctttctagaaggggtaaagtggggttgaacaaggccaagccgttagctctgctgctgctcagtttcccagcctagttttctgagctgggagaggacataatgtggtatttcgtcacgtagctgagacctagaagggcatactcaggcggagattgcacaaagctgggctccaagttctgtgcttcctgatcccgagccctgacactcatttgctgtgtggtcccgggcatgtcatcaagaagctcgctgtctgcatgaggctcccgacgatctccatccccagggggttgggaggatgtctttagattttaggactctgtgataaatattccacagcctggtgtgaggaagcttggaccaaatgcttcccctttggccggttagtctgaacaaggatctgctgatttaaaggagcagttggagattcagaacacatataactggggaattcagggcaagctaccaacccagccctgctgtagttttcccaggactgaaggaaagaggcagacaccacattctcctctgcaaagttctctggagaatgtgtgatgttaacactcccagctaagggaaagcaaagtctaaaggaaaacacacaggaatgcttccaatgtctccaagtattcctgtggtcaacagtttcgcagatccgttaggcccttaaagacaaggaggaagtaaaaggtcaaatttaaatctatttaaaaaaacttttaaaaaaattatttatttattattattttttatttttaagacagaatctcgctctgttgcccaggctggagtgcagtggtgcaatcttggctcactgcaacctccacctcctgggtttcagcgattctcctgcctcagcctcctgagtagctgggattacaggcgcctgccaccacgcccagctaattttttgatttttagtagagatggggtttcgccattttggccaggctggtctcaaactcctggccttaaatgatcctcccacctcggcctcccaaagtgctgggattacaggcatgagccactgcacccggccactttttttttttttaaagaaaaatgctctgcatggattggagacacagcaataactactgttgccatggaagggttaacagtgtaggagctggtttatcagtccgctttgacatacagctaaaggaaatttatgtttgggggaaaaaggccctctgttcactttaaaattcagtgtggacttatgccaaagggggctgtttaagttgaaagaagccaagttaagtttggcctcttgcctggaatcacttgaattctgaaatttcactgcgacggacatgtgccttgtcacattttccattgcttaatcctgaagtttggtgcaagtctctctgcacctattaaaaagtgatgtatatacttccttcttattctgttgagttgtatagaattgtcttttgtatttaacactttgtaattttcacaatattttttaatttaaataaataaacacattttttccctcctgggaagtcatgaa

SEQ ID NO: 23275 - DNA, 3127 bp, Homo sapiens
  source 1..3127: mol_type = unassigned DNA
gcggcggggctggcagcagtggctgcccgcactgcgcccgggcgctcgccttcgctgcagctcccggtgccgccgctcgggccggccccccggcaggccctcctcgttatggccgcggcctcctccccgcccagggccgagaggaagcgctggggttggggccgcctgccaggcgcccggcggggcagcgcgggcctggccaagaagtgccccttctcgctggagctggcggagggcggcccggcgggcggcgcgctctacgcgcccatcgcgcccggcgccccaggtcccgcgccccctgcgtccccggccgcgcccgccgcgcccccagttgcctccgaccttggcccgcggccgccggtgagcctagacccgcgcgtctccatctacagcacgcgccgcccggtgttggcgcgcacccacgtccagggccgcgtctacaacttcctcgagcgtcccaccggctggaaatgcttcgtttaccacttcgccgtcttcctcatcgtcctggtctgcctcatcttcagcgtgctgtccaccatcgagcagtatgccgccctggccacggggactctcttctggatggagatcgtgctggtggtgttcttcgggacggagtacgtggtccgcctctggtccgccggctgccgcagcaagtacgtgggcctctgggggcggctgcgctttgcccggaagcccatttccatcatcgacctcatcgtggtcgtggcctccatggtggtcctctgcgtgggctccaaggggcaggtgtttgccacgtcggccatcaggggcatccgcttcctgcagatcctgaggatgctacacgtcgaccgccagggaggcacctggaggctcctgggctccgtggtcttcatccaccgccaggagctgataaccaccctgtacatcggcttcctgggcctcatcttctcctcgtactttgtgtacctggctgagaaggacgcggtgaacgagtcaggccgcgtggagttcggcagctacgcagatgcgctgtggtggggggtggtcacagtcaccaccatcggctatggggacaaggtgccccagacgtgggtcgggaagaccatcgcctcctgcttctctgtctttgccatctccttctttgcgctcccagcggggattcttggctcggggtttgccctgaaggtgcagcagaagcagaggcagaagcacttcaaccggcagatcccggcggcagcctcactcattcagaccgcatggaggtgctatgctgccgagaaccccgactcctccacctggaagatctacatccggaaggccccccggagccacactctgctgtcacccagccccaaacccaagaagtctgtggtggtaaagaaaaaaaagttcaagctggacaaagacaatggggtgactcctggagagaagatgctcacagtcccccatatcacgtgcgaccccccagaagagcggcggctggaccacttctctgtcgacggctatgacagttctgtaaggaagagcccaacactgctggaagtgagcatgccccatttcatgagaaccaacagcttcgccgaggacctggacctggaaggggagactctgctgacacccatcacccacatctcacagctgcgggaacaccatcgggccaccattaaggtcattcgacgcatgcagtactttgtggccaagaagaaattccagcaagcgcggaagccttacgatgtgcgggacgtcattgagcagtactcgcagggccacctcaacctcatggtgcgcatcaaggagctgcagaggaggctggaccagtccattgggaagccctcactgttcatctccgtctcagaaaagagcaaggatcgcggcagcaacacgatcggcgcccgcctgaaccgagtagaagacaaggtgacgcagctggaccagaggctggcactcatcaccgacatgcttcaccagctgctctccttgcacggtggcagcacccccggcagcggcggcccccccagagagggcggggcccacatcacccagccctgcggcagtggcggctccgtcgaccctgagctcttcctgcccagcaacaccctgcccacctacgagcagctgaccgtgcccaggaggggccccgatgaggggtcctgaggaggggatggggctgggggatgggcctgagtgagaggggaggccaagagtggccccacctggccctctctgaaggaggccacctcctaaaaggcccagagagaagagccccactctcagaggccccaataccccatggaccatgctgtctggcacagcctgcacttgggggctcagcaaggccacctcttcctggccggtgtgggggccccgtctcaggtctgagttgttaccccaagcgccctggcccccacatggtgatgttgacatcactggcatggtggttgggacccagtggcagggcacagggcctggcccatgtatggccaggaagtagcacaggctgagtgcaggcccaccctgcttggcccagggggcttcctgaggggagacagagcaacccctggaccccagcctcaaatccaggaccctgccaggcacaggcagggcaggaccagcccacgctgactacagggccgccggcaataaaagcccaggagcccatttggagggcctgggcctggctccctcactctcaggaaatgctgacccatgggcaggagactgtggagactgctcctgagcccccagcttccagcaggagggacagtctcaccatttccccagggcacgtggttgagtggggggaacgcccacttccctgggttagactgccagctcttcctagctggagaggagccctgcctctccgcccctgagcccactgtgcgtggggctcccgcctccaacccctcgcccagtcccagcagccagccaaacacacagaaggggactgccacctccccttgccagctgctgagccgcagagaagtgacggttcctacacaggacaggggttccttctgggcattacatcgcatagaaatcaataatttgtggtgatttggatctgtgttttaatgagtttcacagtgtgattttgattattaattgtgcaagcttttcctaataaacgtggagaatcaca

SEQ ID NO: 23276 - DNA, 2159 bp, Homo sapiens
  source 1..2159: mol_type = unassigned DNA
ctcttcccttcctcccctgcagcttccatggcctggggctgtgagaggcccgggaaggcactgtctttgcgcctgcacatgtgtgtgtctggagtgtaggatggcactggtgccgggcctggatttactcagcccagatcacggctgcttttgtttacgtggcccctgctctcacccacaactccaggtttctggctctcgggaatttgaggcctgtggctgctgtggaccctgggaaagagcctgtgcttcctgagccagtgcggggcctggcatggacttcctcatcgtcctggtctgcctcatcttcagcgtgctgtccaccatcgagcagtatgccgccctggccacggggactctcttctggatggagatcgtgctggtggtgttcttcgggacggagtacgtggtccgcctctggtccgccggctgccgcagcaagtacgtgggcctctgggggcggctgcgctttgcccggaagcccatttccatcatcgacctcatcgtggtcgtggcctccatggtggtcctctgcgtgggctccaaggggcaggtgtttgccacgtcggccatcaggggcatccgcttcctgcagatcctgaggatgctacacgtcgaccgccagggaggcacctggaggctcctgggctccgtggtcttcatccaccgccaggagctgataaccaccctgtacatcggcttcctgggcctcatcttctcctcgtactttgtgtacctggctgagaaggacgcggtgaacgagtcaggccgcgtggagttcggcagctacgcagatgcgctgtggtggggggtggtcacagtcaccaccatcggctatggggacaaggtgccccagacgtgggtcgggaagaccatcgcctcctgcttctctgtctttgccatctccttctttgcgctcccagcggggattcttggctcggggtttgccctgaaggtgcagcagaagcagaggcagaagcacttcaaccggcagatcccggcggcagcctcactcattcagaccgcatggaggtgctatgctgccgagaaccccgactcctccacctggaagatctacatccggaaggccccccggagccacactctgctgtcacccagccccaaacccaagaagtctgtggtggtaaagaaaaaaaagttcaagctggacaaagacaatggggtgactcctggagagaagatgctcacagtcccccatatcacgtgcgaccccccagaagagcggcggctggaccacttctctgtcgacggctatgacagttctgtaaggaagagcccaacactgctggaagtgagcatgccccatttcatgagaaccaacagcttcgccgaggacctggacctggaaggggagactctgctgacacccatcacccacatctcacagctgcgggaacaccatcgggccaccattaaggtcattcgacgcatgcagtactttgtggccaagaagaaattccagcaagcgcggaagccttacgatgtgcgggacgtcattgagcagtactcgcagggccacctcaacctcatggtgcgcatcaaggagctgcagaggaggctggaccagtccattgggaagccctcactgttcatctccgtctcagaaaagagcaaggatcgcggcagcaacacgatcggcgcccgcctgaaccgagtagaagacaaggtgacgcagctggaccagaggctggcactcatcaccgacatgcttcaccagctgctctccttgcacggtggcagcacccccggcagcggcggcccccccagagagggcggggcccacatcacccagccctgcggcagtggcggctccgtcgaccctgagctcttcctgcccagcaacaccctgcccacctacgagcagctgaccgtgcccaggaggggccccgatgaggggtcctgaggaggggatggggctgggggatgggcctgagtgagaggggaggccaagagtggccccacctggccctctctgaaggaggccacctcctaaaaggcccagagagaagagccccactctcagaggccccaataccccatggaccatgctgtctggcacagcctgcacttgggggctcagcaaggccacctcttcctggccggtgtgggggccccgtctcaggtctgagttgttaccc

SEQ ID NO: 23277 - DNA, 1423 bp, Homo sapiens
  source 1..1423: mol_type = unassigned DNA
cggagcgaggtggccgcagcgtctccgcgcgcggcccaagcccggcaggagtgcggaaccgccgcctcggccatgcggctcccggccggggggcctgggctggggcccgcgccgccccccgcgctccgcccccgctgagcctgagcccgacccggggcgcctcccgccaggcaccatggtgcagaagtcgcgcaacggcggcgtataccccggcccgagcggggagaagaagctgaaggtgggcttcgtggggctggaccccggcgcgcccgactccacccgggacggggcgctgctgatcgccggctccgaggcccccaagcgcggcagcatcctcagcaaacctcgcgcgggcggcgcgggcgccgggaagccccccaagcgcaacgccttctaccgcaagctgcagaatttcctctacaacgtgctggagcggccgcgcggctgggcgttcatctaccacgcctacgtgttcctcctggttttctcctgcctcgtgctgtctgtgttttccaccatcaaggagtatgagaagagctcggagggggccctctacatcctggaaatcgtgactatcgtggtgtttggcgtggagtacttcgtgcggatctgggccgcaggctgctgctgccggtaccgtggctggagggggcggctcaagtttgcccggaaaccgttctgtgtgattgacatcatggtgctcatcgcctccattgcggtgctggccgccggctcccagggcaacgtctttgccacatctgcgctccggagcctgcgcttcctgcagattctgcggatgatccgcatggaccggcggggaggcacctggaagctgctgggctctgtggtctatgcccacagcaaggagctggtcactgcctggtacatcggcttcctttgtctcatcctggcctcgttcctggtgtacttggcagagaagggggagaacgaccactttgacacctacgcggatgcactctggtggggcctgatcacgctgaccaccattggctacggggacaagtacccccagacctggaacggcaggctccttgcggcaaccttcaccctcatcggtgtctccttcttcgcgctgcctgcaggcatcttggggtctgggtttgccctgaaggttcaggagcagcacaggcagaagcactttgagaagaggcggaacccggcagcaggcctgatccagtcggcctggagattctacgccaccaacctctcgcgcacagacctgcactccacgtggcagtactacgagcgaacggtcaccgtgcccatgtacaggtaccgccgccgggcacctgccaccaagcaactgtttcattttttattttccatttgttcttaaaccccactttttgttgttcattattttgattgattttttttctttaaaatgtatttttcacaaagg

SEQ ID NO: 23278 - DNA, 2979 bp, Homo sapiens
  source 1..2979: mol_type = unassigned DNA
cggagcgaggtggccgcagcgtctccgcgcgcggcccaagcccggcaggagtgcggaaccgccgcctcggccatgcggctcccggccggggggcctgggctggggcccgcgccgccccccgcgctccgcccccgctgagcctgagcccgacccggggcgcctcccgccaggcaccatggtgcagaagtcgcgcaacggcggcgtataccccggcccgagcggggagaagaagctgaaggtgggcttcgtggggctggaccccggcgcgcccgactccacccgggacggggcgctgctgatcgccggctccgaggcccccaagcgcggcagcatcctcagcaaacctcgcgcgggcggcgcgggcgccgggaagccccccaagcgcaacgccttctaccgcaagctgcagaatttcctctacaacgtgctggagcggccgcgcggctgggcgttcatctaccacgcctacgtgttcctcctggttttctcctgcctcgtgctgtctgtgttttccaccatcaaggagtatgagaagagctcggagggggccctctacatcctggaaatcgtgactatcgtggtgtttggcgtggagtacttcgtgcggatctgggccgcaggctgctgctgccggtaccgtggctggagggggcggctcaagtttgcccggaaaccgttctgtgtgattgacatcatggtgctcatcgcctccattgcggtgctggccgccggctcccagggcaacgtctttgccacatctgcgctccggagcctgcgcttcctgcagattctgcggatgatccgcatggaccggcggggaggcacctggaagctgctgggctctgtggtctatgcccacagcaaggagctggtcactgcctggtacatcggcttcctttgtctcatcctggcctcgttcctggtgtacttggcagagaagggggagaacgaccactttgacacctacgcggatgcactctggtggggcctgatcacgctgaccaccattggctacggggacaagtacccccagacctggaacggcaggctccttgcggcaaccttcaccctcatcggtgtctccttcttcgcgctgcctgcaggcatcttggggtctgggtttgccctgaaggttcaggagcagcacaggcagaagcactttgagaagaggcggaacccggcagcaggcctgatccagtcggcctggagattctacgccaccaacctctcgcgcacagacctgcactccacgtggcagtactacgagcgaacggtcaccgtgcccatgtacagacttatccccccgctgaaccagctggagctgctgaggaacctcaagagtaaatctggactcgctttcaggaaggaccccccgccggagccgtctccaagcccccgaggcgtggctgccaaggggaaggggtccccgcaggcccagactgtgaggcggtcacccagcgccgaccagagcctcgaggacagccccagcaaggtgcccaagagctggagcttcggggaccgcagccgggcacgccaggctttccgcatcaagggtgccgcgtcacggcagaactcagaagaagcaagcctccccggagaggacattgtggatgacaagagctgcccctgcgagtttgtgaccgaggacctgaccccgggcctcaaagtcagcatcagagccgtgtgtgtcatgcggttcctggtgtccaagcggaagttcaaggagagcctgcggccctacgacgtgatggacgtcatcgagcagtactcagccggccacctggacatgctgtcccgaattaagagcctgcagtccaggatagatatgattgtgggtcccccgcccccttcaactccccggcacaagaagtaccccaccaaaggacccacggcccctccgagagagtcaccccagtactcacctagagtggaccagatcgtggggcggggcccagcgatcacggacaaggaccgcaccaagggcccggccgaggcggagctgcccgaggaccccagcatgatgggacggctcgggaaggtggagaagcaggtcttgtccatggagaagaagctggacttcctggtgaatatctacatgcagcggatgggcatccccccgacagagaccgaggcctactttggggccaaagagccggagccggcgccgccgtaccacagcccggaagacagccgggagcatgtcgacaggcacggctgcattgtcaagatcgtgcgctccagcagctccacgggccagaagaacttctcggcgcccccggccgcgccccctgtccagtgtccgccctccacctcctggcagccacagagccacccgcgccagggccacggcacctcccccgtgggggaccacggctccctggtgcgcatcccgccgccgcctgcccacgagcggtcgctgtccgcctacggcgggggcaaccgcgccagcatggagttcctgcggcaggaggacaccccgggctgcaggccccccgaggggaacctgcgggacagcgacacgtccatctccatcccgtccgtggaccacgaggagctggagcgttccttcagcggcttcagcatctcccagtccaaggagaacctggatgctctcaacagctgctacgcggccgtggcgccttgtgccaaagtcaggccctacattgcggagggagagtcagacaccgactccgacctctgtaccccgtgcgggcccccgccacgctcggccaccggcgagggtccctttggtgacgtgggctgggccgggcccaggaagtgaggcggcgctgggccagtggacccgcccgcggccctcctcagcacggtgcctccgaggttttgaggcgggaaccctctggggcccttttcttacagtaactgagtgtggcgggaagggtgggccctggaggggcccatgtgggctgaaggatgggggctcctggcagtgaccttttacaaaagttattttccaacagg

SEQ ID NO: 23279 - DNA, 3275 bp, Homo sapiens
  source 1..3275: mol_type = unassigned DNA
cgcggagcgaggtggccgcagcgtctccgcgcgcggcccaagcccggcaggagtgcggaaccgccgcctcggccatgcggctcccggccggggggcctgggctggggcccgcgccgccccccgcgctccgcccccgctgagcctgagcccgacccggggcgcctcccgccaggcaccatggtgcagaagtcgcgcaacggcggcgtataccccggcccgagcggggagaagaagctgaaggtgggcttcgtggggctggaccccggcgcgcccgactccacccgggacggggcgctgctgatcgccggctccgaggcccccaagcgcggcagcatcctcagcaaacctcgcgcgggcggcgcgggcgccgggaagccccccaagcgcaacgccttctaccgcaagctgcagaatttcctctacaacgtgctggagcggccgcgcggctgggcgttcatctaccacgcctacgtgttcctcctggttttctcctgcctcgtgctgtctgtgttttccaccatcaaggagtatgagaagagctcggagggggccctctacatcctggaaatcgtgactatcgtggtgtttggcgtggagtacttcgtgcggatctgggccgcaggctgctgctgccggtaccgtggctggagggggcggctcaagtttgcccggaaaccgttctgtgtgattgacatcatggtgctcatcgcctccattgcggtgctggccgccggctcccagggcaacgtctttgccacatctgcgctccggagcctgcgcttcctgcagattctgcggatgatccgcatggaccggcggggaggcacctggaagctgctgggctctgtggtctatgcccacagcaaggagctggtcactgcctggtacatcggcttcctttgtctcatcctggcctcgttcctggtgtacttggcagagaagggggagaacgaccactttgacacctacgcggatgcactctggtggggcctgatcacgctgaccaccattggctacggggacaagtacccccagacctggaacggcaggctccttgcggcaaccttcaccctcatcggtgtctccttcttcgcgctgcctgcaggcatcttggggtctgggtttgccctgaaggttcaggagcagcacaggcagaagcactttgagaagaggcggaacccggcagcaggcctgatccagtcggcctggagattctacgccaccaacctctcgcgcacagacctgcactccacgtggcagtactacgagcgaacggtcaccgtgcccatgtacagacttatccccccgctgaaccagctggagctgctgaggaacctcaagagtaaatctggactcgctttcaggaaggaccccccgccggagccgtctccaagccagaaggtcagtttgaaagatcgtgtcttctccagcccccgaggcgtggctgccaaggggaaggggtccccgcaggcccagactgtgaggcggtcacccagcgccgaccagagcctcgaggacagccccagcaaggtgcccaagagctggagcttcggggaccgcagccgggcacgccaggctttccgcatcaagggtgccgcgtcacggcagaactcagaagaagcaagcctccccggagaggacattgtggatgacaagagctgcccctgcgagtttgtgaccgaggacctgaccccgggcctcaaagtcagcatcagagccgtgtgtgtcatgcggttcctggtgtccaagcggaagttcaaggagagcctgcggccctacgacgtgatggacgtcatcgagcagtactcagccggccacctggacatgctgtcccgaattaagagcctgcaaacggggatagatatgattgtgggtcccccgcccccttcaactccccggcacaagaagtaccccaccaaaggacccacggcccctccgagagagtcaccccagtactcacctagagtggaccagatcgtggggcggggcccagcgatcacggacaaggaccgcaccaagggcccggccgaggcggagctgcccgaggaccccagcatgatgggacggctcgggaaggtggagaagcaggtcttgtccatggagaagaagctggacttcctggtgaatatctacatgcagcggatgggcatccccccgacagagaccgaggcctactttggggccaaagagccggagccggcgccgccgtaccacagcccggaagacagccgggagcatgtcgacaggcacggctgcattgtcaagatcgtgcgctccagcagctccacgggccagaagaacttctcggcgcccccggccgcgccccctgtccagtgtccgccctccacctcctggcagccacagagccacccgcgccagggccacggcacctcccccgtgggggaccacggctccctggtgcgcatcccgccgccgcctgcccacgagcggtcgctgtccgcctacggcgggggcaaccgcgccagcatggagttcctgcggcaggaggacaccccgggctgcaggccccccgaggggaacctgcgggacagcgacacgtccatctccatcccgtccgtggaccacgaggagctggagcgttccttcagcggcttcagcatctcccagtccaaggagaacctggatgctctcaacagctgctacgcggccgtggcgccttgtgccaaagtcaggccctacattgcggagggagagtcagacaccgactccgacctctgtaccccgtgcgggcccccgccacgctcggccaccggcgagggtccctttggtgacgtgggctgggccgggcccaggaagtgaggcggcgctgggccagtggacccgcccgcggccctcctcagcacggtgcctccgaggttttgaggcgggaaccctctggggcccttttcttacagtaactgagtgtggcgggaagggtgggccctggaggggcccatgtgggctgaaggatgggggctcctggcagtgaccttttacaaaagttattttccaacaggggctggagggctgggcagggccctgtggctccaggagcagcgtgcaggagcaaggctgccctgtccactctgctcagggccgcggccgacatcagcccggtgtgaggaggggcgggagtgatgacggggtgttgccagcgtggcaacaggcggggggttgtctcagccgagcccaggggaggcacaaagggcaggcctgttccctgaggacctgcgcaaagggcgggcctgtttggtgaggacctgcggccttgggtc

SEQ ID NO: 23280 - DNA, 3195 bp, Homo sapiens
  source 1..3195: mol_type = unassigned DNA
cggagcgaggtggccgcagcgtctccgcgcgcggcccaagcccggcaggagtgcggaaccgccgcctcggccatgcggctcccggccggggggcctgggctggggcccgcgccgccccccgcgctccgcccccgctgagcctgagcccgacccggggcgcctcccgccaggcaccatggtgcagaagtcgcgcaacggcggcgtataccccggcccgagcggggagaagaagctgaaggtgggcttcgtggggctggaccccggcgcgcccgactccacccgggacggggcgctgctgatcgccggctccgaggcccccaagcgcggcagcatcctcagcaaacctcgcgcgggcggcgcgggcgccgggaagccccccaagcgcaacgccttctaccgcaagctgcagaatttcctctacaacgtgctggagcggccgcgcggctgggcgttcatctaccacgcctacgtgttcctcctggttttctcctgcctcgtgctgtctgtgttttccaccatcaaggagtatgagaagagctcggagggggccctctacatcctggaaatcgtgactatcgtggtgtttggcgtggagtacttcgtgcggatctgggccgcaggctgctgctgccggtaccgtggctggagggggcggctcaagtttgcccggaaaccgttctgtgtgattgacatcatggtgctcatcgcctccattgcggtgctggccgccggctcccagggcaacgtctttgccacatctgcgctccggagcctgcgcttcctgcagattctgcggatgatccgcatggaccggcggggaggcacctggaagctgctgggctctgtggtctatgcccacagcaaggagctggtcactgcctggtacatcggcttcctttgtctcatcctggcctcgttcctggtgtacttggcagagaagggggagaacgaccactttgacacctacgcggatgcactctggtggggcctgatcacgctgaccaccattggctacggggacaagtacccccagacctggaacggcaggctccttgcggcaaccttcaccctcatcggtgtctccttcttcgcgctgcctgcaggcatcttggggtctgggtttgccctgaaggttcaggagcagcacaggcagaagcactttgagaagaggcggaacccggcagcaggcctgatccagtcggcctggagattctacgccaccaacctctcgcgcacagacctgcactccacgtggcagtactacgagcgaacggtcaccgtgcccatgtacagttcgcaaactcaaacctacggggcctccagacttatccccccgctgaaccagctggagctgctgaggaacctcaagagtaaatctggactcgctttcaggaaggaccccccgccggagccgtctccaagccagaaggtcagtttgaaagatcgtgtcttctccagcccccgaggcgtggctgccaaggggaaggggtccccgcaggcccagactgtgaggcggtcacccagcgccgaccagagcctcgaggacagccccagcaaggtgcccaagagctggagcttcggggaccgcagccgggcacgccaggctttccgcatcaagggtgccgcgtcacggcagaactcagaagaagcaagcctccccggagaggacattgtggatgacaagagctgcccctgcgagtttgtgaccgaggacctgaccccgggcctcaaagtcagcatcagagccgtgtgtgtcatgcggttcctggtgtccaagcggaagttcaaggagagcctgcggccctacgacgtgatggacgtcatcgagcagtactcagccggccacctggacatgctgtcccgaattaagagcctgcagtccagagtggaccagatcgtggggcggggcccagcgatcacggacaaggaccgcaccaagggcccggccgaggcggagctgcccgaggaccccagcatgatgggacggctcgggaaggtggagaagcaggtcttgtccatggagaagaagctggacttcctggtgaatatctacatgcagcggatgggcatccccccgacagagaccgaggcctactttggggccaaagagccggagccggcgccgccgtaccacagcccggaagacagccgggagcatgtcgacaggcacggctgcattgtcaagatcgtgcgctccagcagctccacgggccagaagaacttctcggcgcccccggccgcgccccctgtccagtgtccgccctccacctcctggcagccacagagccacccgcgccagggccacggcacctcccccgtgggggaccacggctccctggtgcgcatcccgccgccgcctgcccacgagcggtcgctgtccgcctacggcgggggcaaccgcgccagcatggagttcctgcggcaggaggacaccccgggctgcaggccccccgaggggaacctgcgggacagcgacacgtccatctccatcccgtccgtggaccacgaggagctggagcgttccttcagcggcttcagcatctcccagtccaaggagaacctggatgctctcaacagctgctacgcggccgtggcgccttgtgccaaagtcaggccctacattgcggagggagagtcagacaccgactccgacctctgtaccccgtgcgggcccccgccacgctcggccaccggcgagggtccctttggtgacgtgggctgggccgggcccaggaagtgaggcggcgctgggccagtggacccgcccgcggccctcctcagcacggtgcctccgaggttttgaggcgggaaccctctggggcccttttcttacagtaactgagtgtggcgggaagggtgggccctggaggggcccatgtgggctgaaggatgggggctcctggcagtgaccttttacaaaagttattttccaacaggggctggagggctgggcagggccctgtggctccaggagcagcgtgcaggagcaaggctgccctgtccactctgctcagggccgcggccgacatcagcccggtgtgaggaggggcgggagtgatgacggggtgttgccagcgtggcaacaggcggggggttgtctcagccgagcccaggggaggcacaaagggcaggcctgttccctgaggacctgcgcaaagggcgggcctgtttggtgaggacctgcggccttgggtc

SEQ ID NO: 23281 - DNA, 3249 bp, Homo sapiens
  source 1..3249: mol_type = unassigned DNA
cggagcgaggtggccgcagcgtctccgcgcgcggcccaagcccggcaggagtgcggaaccgccgcctcggccatgcggctcccggccggggggcctgggctggggcccgcgccgccccccgcgctccgcccccgctgagcctgagcccgacccggggcgcctcccgccaggcaccatggtgcagaagtcgcgcaacggcggcgtataccccggcccgagcggggagaagaagctgaaggtgggcttcgtggggctggaccccggcgcgcccgactccacccgggacggggcgctgctgatcgccggctccgaggcccccaagcgcggcagcatcctcagcaaacctcgcgcgggcggcgcgggcgccgggaagccccccaagcgcaacgccttctaccgcaagctgcagaatttcctctacaacgtgctggagcggccgcgcggctgggcgttcatctaccacgcctacgtgttcctcctggttttctcctgcctcgtgctgtctgtgttttccaccatcaaggagtatgagaagagctcggagggggccctctacatcctggaaatcgtgactatcgtggtgtttggcgtggagtacttcgtgcggatctgggccgcaggctgctgctgccggtaccgtggctggagggggcggctcaagtttgcccggaaaccgttctgtgtgattgacatcatggtgctcatcgcctccattgcggtgctggccgccggctcccagggcaacgtctttgccacatctgcgctccggagcctgcgcttcctgcagattctgcggatgatccgcatggaccggcggggaggcacctggaagctgctgggctctgtggtctatgcccacagcaaggagctggtcactgcctggtacatcggcttcctttgtctcatcctggcctcgttcctggtgtacttggcagagaagggggagaacgaccactttgacacctacgcggatgcactctggtggggcctgatcacgctgaccaccattggctacggggacaagtacccccagacctggaacggcaggctccttgcggcaaccttcaccctcatcggtgtctccttcttcgcgctgcctgcaggcatcttggggtctgggtttgccctgaaggttcaggagcagcacaggcagaagcactttgagaagaggcggaacccggcagcaggcctgatccagtcggcctggagattctacgccaccaacctctcgcgcacagacctgcactccacgtggcagtactacgagcgaacggtcaccgtgcccatgtacagttcgcaaactcaaacctacggggcctccagacttatccccccgctgaaccagctggagctgctgaggaacctcaagagtaaatctggactcgctttcaggaaggaccccccgccggagccgtctccaagtaaaggcagcccgtgcagagggcccctgtgtggatgctgccccggacgctctagccagaaggtcagtttgaaagatcgtgtcttctccagcccccgaggcgtggctgccaaggggaaggggtccccgcaggcccagactgtgaggcggtcacccagcgccgaccagagcctcgaggacagccccagcaaggtgcccaagagctggagcttcggggaccgcagccgggcacgccaggctttccgcatcaagggtgccgcgtcacggcagaactcagaagaagcaagcctccccggagaggacattgtggatgacaagagctgcccctgcgagtttgtgaccgaggacctgaccccgggcctcaaagtcagcatcagagccgtgtgtgtcatgcggttcctggtgtccaagcggaagttcaaggagagcctgcggccctacgacgtgatggacgtcatcgagcagtactcagccggccacctggacatgctgtcccgaattaagagcctgcagtccagagtggaccagatcgtggggcggggcccagcgatcacggacaaggaccgcaccaagggcccggccgaggcggagctgcccgaggaccccagcatgatgggacggctcgggaaggtggagaagcaggtcttgtccatggagaagaagctggacttcctggtgaatatctacatgcagcggatgggcatccccccgacagagaccgaggcctactttggggccaaagagccggagccggcgccgccgtaccacagcccggaagacagccgggagcatgtcgacaggcacggctgcattgtcaagatcgtgcgctccagcagctccacgggccagaagaacttctcggcgcccccggccgcgccccctgtccagtgtccgccctccacctcctggcagccacagagccacccgcgccagggccacggcacctcccccgtgggggaccacggctccctggtgcgcatcccgccgccgcctgcccacgagcggtcgctgtccgcctacggcgggggcaaccgcgccagcatggagttcctgcggcaggaggacaccccgggctgcaggccccccgaggggaacctgcgggacagcgacacgtccatctccatcccgtccgtggaccacgaggagctggagcgttccttcagcggcttcagcatctcccagtccaaggagaacctggatgctctcaacagctgctacgcggccgtggcgccttgtgccaaagtcaggccctacattgcggagggagagtcagacaccgactccgacctctgtaccccgtgcgggcccccgccacgctcggccaccggcgagggtccctttggtgacgtgggctgggccgggcccaggaagtgaggcggcgctgggccagtggacccgcccgcggccctcctcagcacggtgcctccgaggttttgaggcgggaaccctctggggcccttttcttacagtaactgagtgtggcgggaagggtgggccctggaggggcccatgtgggctgaaggatgggggctcctggcagtgaccttttacaaaagttattttccaacaggggctggagggctgggcagggccctgtggctccaggagcagcgtgcaggagcaaggctgccctgtccactctgctcagggccgcggccgacatcagcccggtgtgaggaggggcgggagtgatgacggggtgttgccagcgtggcaacaggcggggggttgtctcagccgagcccaggggaggcacaaagggcaggcctgttccctgaggacctgcgcaaagggcgggcctgtttggtgaggacctgcggccttgggtc

SEQ ID NO: 23282 - DNA, 3251 bp, Homo sapiens
  source 1..3251: mol_type = unassigned DNA
cgcggagcgaggtggccgcagcgtctccgcgcgcggcccaagcccggcaggagtgcggaaccgccgcctcggccatgcggctcccggccggggggcctgggctggggcccgcgccgccccccgcgctccgcccccgctgagcctgagcccgacccggggcgcctcccgccaggcaccatggtgcagaagtcgcgcaacggcggcgtataccccggcccgagcggggagaagaagctgaaggtgggcttcgtggggctggaccccggcgcgcccgactccacccgggacggggcgctgctgatcgccggctccgaggcccccaagcgcggcagcatcctcagcaaacctcgcgcgggcggcgcgggcgccgggaagccccccaagcgcaacgccttctaccgcaagctgcagaatttcctctacaacgtgctggagcggccgcgcggctgggcgttcatctaccacgcctacgtgttcctcctggttttctcctgcctcgtgctgtctgtgttttccaccatcaaggagtatgagaagagctcggagggggccctctacatcctggaaatcgtgactatcgtggtgtttggcgtggagtacttcgtgcggatctgggccgcaggctgctgctgccggtaccgtggctggagggggcggctcaagtttgcccggaaaccgttctgtgtgattgacatcatggtgctcatcgcctccattgcggtgctggccgccggctcccagggcaacgtctttgccacatctgcgctccggagcctgcgcttcctgcagattctgcggatgatccgcatggaccggcggggaggcacctggaagctgctgggctctgtggtctatgcccacagcaaggagctggtcactgcctggtacatcggcttcctttgtctcatcctggcctcgttcctggtgtacttggcagagaagggggagaacgaccactttgacacctacgcggatgcactctggtggggcctgatcacgctgaccaccattggctacggggacaagtacccccagacctggaacggcaggctccttgcggcaaccttcaccctcatcggtgtctccttcttcgcgctgcctgcaggcatcttggggtctgggtttgccctgaaggttcaggagcagcacaggcagaagcactttgagaagaggcggaacccggcagcaggcctgatccagtcggcctggagattctacgccaccaacctctcgcgcacagacctgcactccacgtggcagtactacgagcgaacggtcaccgtgcccatgtacagttcgcaaactcaaacctacggggcctccagacttatccccccgctgaaccagctggagctgctgaggaacctcaagagtaaatctggactcgctttcaggaaggaccccccgccggagccgtctccaagtaaaggcagcccgtgcagagggcccctgtgtggatgctgccccggacgctctagccagaaggtcagtttgaaagatcgtgtcttctccagcccccgaggcgtggctgccaaggggaaggggtccccgcaggcccagactgtgaggcggtcacccagcgccgaccagagcctcgaggacagccccagcaaggtgcccaagagctggagcttcggggaccgcagccgggcacgccaggctttccgcatcaagggtgccgcgtcacggcagaactcagaagaagcaagcctccccggagaggacattgtggatgacaagagctgcccctgcgagtttgtgaccgaggacctgaccccgggcctcaaagtcagcatcagagccgtgtgtgtcatgcggttcctggtgtccaagcggaagttcaaggagagcctgcggccctacgacgtgatggacgtcatcgagcagtactcagccggccacctggacatgctgtcccgaattaagagcctgcaaagccaagtggaccagatcgtggggcggggcccagcgatcacggacaaggaccgcaccaagggcccggccgaggcggagctgcccgaggaccccagcatgatgggacggctcgggaaggtggagaagcaggtcttgtccatggagaagaagctggacttcctggtgaatatctacatgcagcggatgggcatccccccgacagagaccgaggcctactttggggccaaagagccggagccggcgccgccgtaccacagcccggaagacagccgggagcatgtcgacaggcacggctgcattgtcaagatcgtgcgctccagcagctccacgggccagaagaacttctcggcgcccccggccgcgccccctgtccagtgtccgccctccacctcctggcagccacagagccacccgcgccagggccacggcacctcccccgtgggggaccacggctccctggtgcgcatcccgccgccgcctgcccacgagcggtcgctgtccgcctacggcgggggcaaccgcgccagcatggagttcctgcggcaggaggacaccccgggctgcaggccccccgaggggaacctgcgggacagcgacacgtccatctccatcccgtccgtggaccacgaggagctggagcgttccttcagcggcttcagcatctcccagtccaaggagaacctggatgctctcaacagctgctacgcggccgtggcgccttgtgccaaagtcaggccctacattgcggagggagagtcagacaccgactccgacctctgtaccccgtgcgggcccccgccacgctcggccaccggcgagggtccctttggtgacgtgggctgggccgggcccaggaagtgaggcggcgctgggccagtggacccgcccgcggccctcctcagcacggtgcctccgaggttttgaggcgggaaccctctggggcccttttcttacagtaactgagtgtggcgggaagggtgggccctggaggggcccatgtgggctgaaggatgggggctcctggcagtgaccttttacaaaagttattttccaacaggggctggagggctgggcagggccctgtggctccaggagcagcgtgcaggagcaaggctgccctgtccactctgctcagggccgcggccgacatcagcccggtgtgaggaggggcgggagtgatgacggggtgttgccagcgtggcaacaggcggggggttgtctcagccgagcccaggggaggcacaaagggcaggcctgttccctgaggacctgcgcaaagggcgggcctgtttggtgaggacctgcggccttgggtc

SEQ ID NO: 23283 - DNA, 2908 bp, Homo sapiens
  source 1..2908: mol_type = unassigned DNA
cggagcgaggtggccgcagcgtctccgcgcgcggcccaagcccggcaggagtgcggaaccgccgcctcggccatgcggctcccggccggggggcctgggctggggcccgcgccgccccccgcgctccgcccccgctgagcctgagcccgacccggggcgcctcccgccaggcaccatggtgcagaagtcgcgcaacggcggcgtataccccggcccgagcggggagaagaagctgaaggtgggcttcgtggggctggaccccggcgcgcccgactccacccgggacggggcgctgctgatcgccggctccgaggcccccaagcgcggcagcatcctcagcaaacctcgcgcgggcggcgcgggcgccgggaagccccccaagcgcaacgccttctaccgcaagctgcagaatttcctctacaacgtgctggagcggccgcgcggctgggcgttcatctaccacgcctacgtgttcctcctggttttctcctgcctcgtgctgtctgtgttttccaccatcaaggagtatgagaagagctcggagggggccctctacatcctggaaatcgtgactatcgtggtgtttggcgtggagtacttcgtgcggatctgggccgcaggctgctgctgccggtaccgtggctggagggggcggctcaagtttgcccggaaaccgttctgtgtgattgacatcatggtgctcatcgcctccattgcggtgctggccgccggctcccagggcaacgtctttgccacatctgcgctccggagcctgcgcttcctgcagattctgcggatgatccgcatggaccggcggggaggcacctggaagctgctgggctctgtggtctatgcccacagcaaggagctggtcactgcctggtacatcggcttcctttgtctcatcctggcctcgttcctggtgtacttggcagagaagggggagaacgaccactttgacacctacgcggatgcactctggtggggcctgatcacgctgaccaccattggctacggggacaagtacccccagacctggaacggcaggctccttgcggcaaccttcaccctcatcggtgtctccttcttcgcgctgcctgcaggcatcttggggtctgggtttgccctgaaggttcaggagcagcacaggcagaagcactttgagaagaggcggaacccggcagcaggcctgatccagtcggcctggagattctacgccaccaacctctcgcgcacagacctgcactccacgtggcagtactacgagcgaacggtcaccgtgcccatgtacagacttatccccccgctgaaccagctggagctgctgaggaacctcaagagtaaatctggactcgctttcaggaaggaccccccgccggagccgtctccaagccagaaggtcagtttgaaagatcgtgtcttctccagcccccgaggcgtggctgccaaggggaaggggtccccgcaggcccagactgtgaggcggtcacccagcgccgaccagagcctcgaggacagccccagcaaggtgcccaagagctggagcttcggggaccgcagccgggcacgccaggctttccgcatcaagggtgccgcgtcacggcagaactcagaagaagcaagcctccccggagaggacattgtggatgacaagagctgcccctgcgagtttgtgaccgaggacctgaccccgggcctcaaagtcagcatcagagccgtgtgtgtcatgcggttcctggtgtccaagcggaagttcaaggagagcctgcggccctacgacgtgatggacgtcatcgagcagtactcagccggccacctggacatgctgtcccgaattaagagcctgcagtccagagtggaccagatcgtggggcggggcccagcgatcacggacaaggaccgcaccaagggcccggccgaggcggagctgcccgaggaccccagcatgatgggacggctcgggaaggtggagaagcaggtcttgtccatggagaagaagctggacttcctggtgaatatctacatgcagcggatgggcatccccccgacagagaccgaggcctactttggggccaaagagccggagccggcgccgccgtaccacagcccggaagacagccgggagcatgtcgacaggcacggctgcattgtcaagatcgtgcgctccagcagctccacgggccagaagaacttctcggcgcccccggccgcgccccctgtccagtgtccgccctccacctcctggcagccacagagccacccgcgccagggccacggcacctcccccgtgggggaccacggctccctggtgcgcatcccgccgccgcctgcccacgagcggtcgctgtccgcctacggcgggggcaaccgcgccagcatggagttcctgcggcaggaggacaccccgggctgcaggccccccgaggggaacctgcgggacagcgacacgtccatctccatcccgtccgtggaccacgaggagctggagcgttccttcagcggcttcagcatctcccagtccaaggagaacctggatgctctcaacagctgctacgcggccgtggcgccttgtgccaaagtcaggccctacattgcggagggagagtcagacaccgactccgacctctgtaccccgtgcgggcccccgccacgctcggccaccggcgagggtccctttggtgacgtgggctgggccgggcccaggaagtgaggcggcgctgggccagtggacccgcccgcggccctcctcagcacggtgcctccgaggttttgaggcgggaaccctctggggcccttttcttacagtaactgagtgtggcgggaagggtgggccctggaggggcccatgtgggctgaaggatgggggctcctggcagtgaccttttacaaaagttattttccaacaggg

SEQ ID NO: 23284 - DNA, 1545 bp, Homo sapiens
  source 1..1545: mol_type = unassigned DNA
cggagcgaggtggccgcagcgtctccgcgcgcggcccaagcccggcaggagtgcggaaccgccgcctcggccatgcggctcccggccggggggcctgggctggggcccgcgccgccccccgcgctccgcccccgctgagcctgagcccgacccggggcgcctcccgccaggcaccatggtgcagaagtcgcgcaacggcggcgtataccccggcccgagcggggagaagaagctgaaggtgggcttcgtggggctggaccccggcgcgcccgactccacccgggacggggcgctgctgatcgccggctccgaggcccccaagcgcggcagcatcctcagcaaacctcgcgcgggcggcgcgggcgccgggaagccccccaagcgcaacgccttctaccgcaagctgcagaatttcctctacaacgtgctggagcggccgcgcggctgggcgttcatctaccacgcctacgtgttcctcctggttttctcctgcctcgtgctgtctgtgttttccaccatcaaggagtatgagaagagctcggagggggccctctacatcctggaaatcgtgactatcgtggtgtttggcgtggagtacttcgtgcggatctgggccgcaggctgctgctgccggtaccgtggctggagggggcggctcaagtttgcccggaaaccgttctgtgtgattgacatcatggtgctcatcgcctccattgcggtgctggccgccggctcccagggcaacgtctttgccacatctgcgctccggagcctgcgcttcctgcagattctgcggatgatccgcatggaccggcggggaggcacctggaagctgctgggctctgtggtctatgcccacagcaaggagctggtcactgcctggtacatcggcttcctttgtctcatcctggcctcgttcctggtgtacttggcagagaagggggagaacgaccactttgacacctacgcggatgcactctggtggggcctgatcacgctgaccaccattggctacggggacaagtacccccagacctggaacggcaggctccttgcggcaaccttcaccctcatcggtgtctccttcttcgcgctgcctgcaggcatcttggggtctgggtttgccctgaaggttcaggagcagcacaggcagaagcactttgagaagaggcggaacccggcagcaggcctgatccagtcggcctggagattctacgccaccaacctctcgcgcacagacctgcactccacgtggcagtactacgagcgaacggtcaccgtgcccatgtacagacttatccccccgctgaaccagctggagctgctgaggaacctcaagagtaaatctggactcgctttcaggaaggaccccccgccggagccgtctccaaggtcagtgccccctgctgctaccctggtgtctgccgtgtgcacggccgtctggtctctctcccacacgtgtgcgcaacctgtcatggagatgtgagggccttgtgtgtgcttccgtgtgtgactgtgtgactgcgggtccagacccccgcctgg

SEQ ID NO: 23285 - DNA, 2325 bp, Homo sapiens
  source 1..2325: mol_type = unassigned DNA
cggagcgaggtggccgcagcgtctccgcgcgcggcccaagcccggcaggagtgcggaaccgccgcctcggccatgcggctcccggccggggggcctgggctggggcccgcgccgccccccgcgctccgcccccgctgagcctgagcccgacccggggcgcctcccgccaggcaccatggtgcagaagtcgcgcaacggcggcgtataccccggcccgagcggggagaagaagctgaaggtgggcttcgtggggctggaccccggcgcgcccgactccacccgggacggggcgctgctgatcgccggctccgaggcccccaagcgcggcagcatcctcagcaaacctcgcgcgggcggcgcgggcgccgggaagccccccaagcgcaacgccttctaccgcaagctgcagaatttcctctacaacgtgctggagcggccgcgcggctgggcgttcatctaccacgcctacgtgttcctcctggttttctcctgcctcgtgctgtctgtgttttccaccatcaaggagtatgagaagagctcggagggggccctctacatcctggaaatcgtgactatcgtggtgtttggcgtggagtacttcgtgcggatctgggccgcaggctgctgctgccggtaccgtggctggagggggcggctcaagtttgcccggaaaccgttctgtgtgattgacatcatggtgctcatcgcctccattgcggtgctggccgccggctcccagggcaacgtctttgccacatctgcgctccggagcctgcgcttcctgcagattctgcggatgatccgcatggaccggcggggaggcacctggaagctgctgggctctgtggtctatgcccacagcaaggagctggtcactgcctggtacatcggcttcctttgtctcatcctggcctcgttcctggtgtacttggcagagaagggggagaacgaccactttgacacctacgcggatgcactctggtggggcctgatcacgctgaccaccattggctacggggacaagtacccccagacctggaacggcaggctccttgcggcaaccttcaccctcatcggtgtctccttcttcgcgctgcctgcaggcatcttggggtctgggtttgccctgaaggttcaggagcagcacaggcagaagcactttgagaagaggcggaacccggcagcaggcctgatccagtcggcctggagattctacgccaccaacctctcgcgcacagacctgcactccacgtggcagtactacgagcgaacggtcaccgtgcccatgtacagacttatccccccgctgaaccagctggagctgctgaggaacctcaagagtaaatctggactcgctttcaggaaggaccccccgccggagccgtctccaagccagaaggtcagtttgaaagatcgtgtcttctccagcccccgaggcgtggctgccaaggggaaggggtccccgcaggcccagactgtgaggcggtcacccagcgccgaccagagcctcgaggacagccccagcaaggtgcccaagagctggagcttcggggaccgcagccgggcacgccaggctttccgcatcaagggtgccgcgtcacggcagaactcagaagaagcaagcctccccggagaggacattgtggatgacaagagctgcccctgcgagtttgtgaccgaggacctgaccccgggcctcaaagtcagcatcagagccgtgtgtgtcatgcggttcctggtgtccaagcggaagttcaaggagagcctgcggccctacgacgtgatggacgtcatcgagcagtactcagccggccacctggacatgctgtcccgaattaagagcctgcagtccaggcaagagccccgcctgcctgtccagcaggggacaagaacggggtgggcttctgggacaaagcccactgtggcccatggtgggagtgcagggggtgtgtgggcggggcctcctccccacccacgtcggcctctgtcagcttctgttgtgtcttcacaaagtctgttttaatatttctgctgtctctcccatctctcccccatccacaccgcggtgggcaagtgcgtgcacctgtgtgtgtgggtccctgaaaatgtgtgtgtgcatgtgtgtgtgtgtaagtcacgcatgcacacatgtatgcttctgcacaggtgtatgtgtgtggttgtatgcacgtgtggctctgctctgccatgtatgcacgtgtgtggggtgcatacatgtgtgtacacatgtgtgcatgtgtgttggggatggaataattctgttcagacatgaagctgcagggttcccgtgggccccaccaggca

SEQ ID NO: 23286 - DNA, 3015 bp, Homo sapiens
  source 1..3015: mol_type = unassigned DNA
cggagcgaggtggccgcagcgtctccgcgcgcggcccaagcccggcaggagtgcggaaccgccgcctcggccatgcggctcccggccggggggcctgggctggggcccgcgccgccccccgcgctccgcccccgctgagcctgagcccgacccggggcgcctcccgccaggcaccatggtgcagaagtcgcgcaacggcggcgtataccccggcccgagcggggagaagaagctgaaggtgggcttcgtggggctggaccccggcgcgcccgactccacccgggacggggcgctgctgatcgccggctccgaggcccccaagcgcggcagcatcctcagcaaacctcgcgcgggcggcgcgggcgccgggaagccccccaagcgcaacgccttctaccgcaagctgcagaatttcctctacaacgtgctggagcggccgcgcggctgggcgttcatctaccacgcctacgtgttcctcctggttttctcctgcctcgtgctgtctgtgttttccaccatcaaggagtatgagaagagctcggagggggccctctacatcctggaaatcgtgactatcgtggtgtttggcgtggagtacttcgtgcggatctgggccgcaggctgctgctgccggtaccgtggctggagggggcggctcaagtttgcccggaaaccgttctgtgtgattgacatcatggtgctcatcgcctccattgcggtgctggccgccggctcccagggcaacgtctttgccacatctgcgctccggagcctgcgcttcctgcagattctgcggatgatccgcatggaccggcggggaggcacctggaagctgctgggctctgtggtctatgcccacagcaaggagctggtcactgcctggtacatcggcttcctttgtctcatcctggcctcgttcctggtgtacttggcagagaagggggagaacgaccactttgacacctacgcggatgcactctggtggggcctgatcacgctgaccaccattggctacggggacaagtacccccagacctggaacggcaggctccttgcggcaaccttcaccctcatcggtgtctccttcttcgcgctgcctgcaggcatcttggggtctgggtttgccctgaaggttcaggagcagcacaggcagaagcactttgagaagaggcggaacccggcagcaggcctgatccagtcggcctggagattctacgccaccaacctctcgcgcacagacctgcactccacgtggcagtactacgagcgaacggtcaccgtgcccatgtacagacttatccccccgctgaaccagctggagctgctgaggaacctcaagagtaaatctggactcgctttcaggaaggaccccccgccggagccgtctccaagccagaaggtcagtttgaaagatcgtgtcttctccagcccccgaggcgtggctgccaaggggaaggggtccccgcaggcccagactgtgaggcggtcacccagcgccgaccagagcctcgaggacagccccagcaaggtgcccaagagctggagcttcggggaccgcagccgggcacgccaggctttccgcatcaagggtgccgcgtcacggcagaactcagaagaagcaagcctccccggagaggacattgtggatgacaagagctgcccctgcgagtttgtgaccgaggacctgaccccgggcctcaaagtcagcatcagagccgtgtgtgtcatgcggttcctggtgtccaagcggaagttcaaggagagcctgcggccctacgacgtgatggacgtcatcgagcagtactcagccggccacctggacatgctgtcccgaattaagagcctgcagtccaggatagatatgattgtgggtcccccgcccccttcaactccccggcacaagaagtaccccaccaaaggacccacggcccctccgagagagtcaccccagtactcacctagagtggaccagatcgtggggcggggcccagcgatcacggacaaggaccgcaccaagggcccggccgaggcggagctgcccgaggaccccagcatgatgggacggctcgggaaggtggagaagcaggtcttgtccatggagaagaagctggacttcctggtgaatatctacatgcagcggatgggcatccccccgacagagaccgaggcctactttggggccaaagagccggagccggcgccgccgtaccacagcccggaagacagccgggagcatgtcgacaggcacggctgcattgtcaagatcgtgcgctccagcagctccacgggccagaagaacttctcggcgcccccggccgcgccccctgtccagtgtccgccctccacctcctggcagccacagagccacccgcgccagggccacggcacctcccccgtgggggaccacggctccctggtgcgcatcccgccgccgcctgcccacgagcggtcgctgtccgcctacggcgggggcaaccgcgccagcatggagttcctgcggcaggaggacaccccgggctgcaggccccccgaggggaacctgcgggacagcgacacgtccatctccatcccgtccgtggaccacgaggagctggagcgttccttcagcggcttcagcatctcccagtccaaggagaacctggatgctctcaacagctgctacgcggccgtggcgccttgtgccaaagtcaggccctacattgcggagggagagtcagacaccgactccgacctctgtaccccgtgcgggcccccgccacgctcggccaccggcgagggtccctttggtgacgtgggctgggccgggcccaggaagtgaggcggcgctgggccagtggacccgcccgcggccctcctcagcacggtgcctccgaggttttgaggcgggaaccctctggggcccttttcttacagtaactgagtgtggcgggaagggtgggccctggaggggcccatgtgggctgaaggatgggggctcctggcagtgaccttttacaaaagttattttccaacagg

SEQ ID NO: 23287 - DNA, 3159 bp, Homo sapiens
  source 1..3159: mol_type = unassigned DNA
cggagcgaggtggccgcagcgtctccgcgcgcggcccaagcccggcaggagtgcggaaccgccgcctcggccatgcggctcccggccggggggcctgggctggggcccgcgccgccccccgcgctccgcccccgctgagcctgagcccgacccggggcgcctcccgccaggcaccatggtgcagaagtcgcgcaacggcggcgtataccccggcccgagcggggagaagaagctgaaggtgggcttcgtggggctggaccccggcgcgcccgactccacccgggacggggcgctgctgatcgccggctccgaggcccccaagcgcggcagcatcctcagcaaacctcgcgcgggcggcgcgggcgccgggaagccccccaagcgcaacgccttctaccgcaagctgcagaatttcctctacaacgtgctggagcggccgcgcggctgggcgttcatctaccacgcctacgtgttcctcctggttttctcctgcctcgtgctgtctgtgttttccaccatcaaggagtatgagaagagctcggagggggccctctacatcctggaaatcgtgactatcgtggtgtttggcgtggagtacttcgtgcggatctgggccgcaggctgctgctgccggtaccgtggctggagggggcggctcaagtttgcccggaaaccgttctgtgtgattgacatcatggtgctcatcgcctccattgcggtgctggccgccggctcccagggcaacgtctttgccacatctgcgctccggagcctgcgcttcctgcagattctgcggatgatccgcatggaccggcggggaggcacctggaagctgctgggctctgtggtctatgcccacagcaaggagctggtcactgcctggtacatcggcttcctttgtctcatcctggcctcgttcctggtgtacttggcagagaagggggagaacgaccactttgacacctacgcggatgcactctggtggggcctgatcacgctgaccaccattggctacggggacaagtacccccagacctggaacggcaggctccttgcggcaaccttcaccctcatcggtgtctccttcttcgcgctgcctgcaggcatcttggggtctgggtttgccctgaaggttcaggagcagcacaggcagaagcactttgagaagaggcggaacccggcagcaggcctgatccagtcggcctggagattctacgccaccaacctctcgcgcacagacctgcactccacgtggcagtactacgagcgaacggtcaccgtgcccatgtacagttcgcaaactcaaacctacggggcctccagacttatccccccgctgaaccagctggagctgctgaggaacctcaagagtaaatctggactcgctttcaggaaggaccccccgccggagccgtctccaagcccccgaggcgtggctgccaaggggaaggggtccccgcaggcccagactgtgaggcggtcacccagcgccgaccagagcctcgaggacagccccagcaaggtgcccaagagctggagcttcggggaccgcagccgggcacgccaggctttccgcatcaagggtgccgcgtcacggcagaactcagaagaagcaagcctccccggagaggacattgtggatgacaagagctgcccctgcgagtttgtgaccgaggacctgaccccgggcctcaaagtcagcatcagagccgtgtgtgtcatgcggttcctggtgtccaagcggaagttcaaggagagcctgcggccctacgacgtgatggacgtcatcgagcagtactcagccggccacctggacatgctgtcccgaattaagagcctgcagtccagagtggaccagatcgtggggcggggcccagcgatcacggacaaggaccgcaccaagggcccggccgaggcggagctgcccgaggaccccagcatgatgggacggctcgggaaggtggagaagcaggtcttgtccatggagaagaagctggacttcctggtgaatatctacatgcagcggatgggcatccccccgacagagaccgaggcctactttggggccaaagagccggagccggcgccgccgtaccacagcccggaagacagccgggagcatgtcgacaggcacggctgcattgtcaagatcgtgcgctccagcagctccacgggccagaagaacttctcggcgcccccggccgcgccccctgtccagtgtccgccctccacctcctggcagccacagagccacccgcgccagggccacggcacctcccccgtgggggaccacggctccctggtgcgcatcccgccgccgcctgcccacgagcggtcgctgtccgcctacggcgggggcaaccgcgccagcatggagttcctgcggcaggaggacaccccgggctgcaggccccccgaggggaacctgcgggacagcgacacgtccatctccatcccgtccgtggaccacgaggagctggagcgttccttcagcggcttcagcatctcccagtccaaggagaacctggatgctctcaacagctgctacgcggccgtggcgccttgtgccaaagtcaggccctacattgcggagggagagtcagacaccgactccgacctctgtaccccgtgcgggcccccgccacgctcggccaccggcgagggtccctttggtgacgtgggctgggccgggcccaggaagtgaggcggcgctgggccagtggacccgcccgcggccctcctcagcacggtgcctccgaggttttgaggcgggaaccctctggggcccttttcttacagtaactgagtgtggcgggaagggtgggccctggaggggcccatgtgggctgaaggatgggggctcctggcagtgaccttttacaaaagttattttccaacaggggctggagggctgggcagggccctgtggctccaggagcagcgtgcaggagcaaggctgccctgtccactctgctcagggccgcggccgacatcagcccggtgtgaggaggggcgggagtgatgacggggtgttgccagcgtggcaacaggcggggggttgtctcagccgagcccaggggaggcacaaagggcaggcctgttccctgaggacctgcgcaaagggcgggcctgtttggtgaggacctgcggccttgggtc

SEQ ID NO: 23288 - DNA, 3158 bp, Homo sapiens
  source 1..3158: mol_type = unassigned DNA
cgcggagcgaggtggccgcagcgtctccgcgcgcggcccaagcccggcaggagtgcggaaccgccgcctcggccatgcggctcccggccggggggcctgggctggggcccgcgccgccccccgcgctccgcccccgctgagcctgagcccgacccggggcgcctcccgccaggcaccatggtgcagaagtcgcgcaacggcggcgtataccccggcccgagcggggagaagaagctgaaggtgggcttcgtggggctggaccccggcgcgcccgactccacccgggacggggcgctgctgatcgccggctccgaggcccccaagcgcggcagcatcctcagcaaacctcgcgcgggcggcgcgggcgccgggaagccccccaagcgcaacgccttctaccgcaagctgcagaatttcctctacaacgtgctggagcggccgcgcggctgggcgttcatctaccacgcctacgtgttcctcctggttttctcctgcctcgtgctgtctgtgttttccaccatcaaggagtatgagaagagctcggagggggccctctacatcctggaaatcgtgactatcgtggtgtttggcgtggagtacttcgtgcggatctgggccgcaggctgctgctgccggtaccgtggctggagggggcggctcaagtttgcccggaaaccgttctgtgtgattgacatcatggtgctcatcgcctccattgcggtgctggccgccggctcccagggcaacgtctttgccacatctgcgctccggagcctgcgcttcctgcagattctgcggatgatccgcatggaccggcggggaggcacctggaagctgctgggctctgtggtctatgcccacagcaaggagctggtcactgcctggtacatcggcttcctttgtctcatcctggcctcgttcctggtgtacttggcagagaagggggagaacgaccactttgacacctacgcggatgcactctggtggggcctgatcacgctgaccaccattggctacggggacaagtacccccagacctggaacggcaggctccttgcggcaaccttcaccctcatcggtgtctccttcttcgcgctgcctgcaggcatcttggggtctgggtttgccctgaaggttcaggagcagcacaggcagaagcactttgagaagaggcggaacccggcagcaggcctgatccagtcggcctggagattctacgccaccaacctctcgcgcacagacctgcactccacgtggcagtactacgagcgaacggtcaccgtgcccatgtacagttcgcaaactcaaacctacggggcctccagacttatccccccgctgaaccagctggagctgctgaggaacctcaagagtaaatctggactcgctttcaggaaggaccccccgccggagccgtctccaagcccccgaggcgtggctgccaaggggaaggggtccccgcaggcccagactgtgaggcggtcacccagcgccgaccagagcctcgaggacagccccagcaaggtgcccaagagctggagcttcggggaccgcagccgggcacgccaggctttccgcatcaagggtgccgcgtcacggcagaactcagaagcaagcctccccggagaggacattgtggatgacaagagctgcccctgcgagtttgtgaccgaggacctgaccccgggcctcaaagtcagcatcagagccgtgtgtgtcatgcggttcctggtgtccaagcggaagttcaaggagagcctgcggccctacgacgtgatggacgtcatcgagcagtactcagccggccacctggacatgctgtcccgaattaagagcctgcagtccagagtggaccagatcgtggggcggggcccagcgatcacggacaaggaccgcaccaagggcccggccgaggcggagctgcccgaggaccccagcatgatgggacggctcgggaaggtggagaagcaggtcttgtccatggagaagaagctggacttcctggtgaatatctacatgcagcggatgggcatccccccgacagagaccgaggcctactttggggccaaagagccggagccggcgccgccgtaccacagcccggaagacagccgggagcatgtcgacaggcacggctgcattgtcaagatcgtgcgctccagcagctccacgggccagaagaacttctcggcgcccccggccgcgccccctgtccagtgtccgccctccacctcctggcagccacagagccacccgcgccagggccacggcacctcccccgtgggggaccacggctccctggtgcgcatcccgccgccgcctgcccacgagcggtcgctgtccgcctacggcgggggcaaccgcgccagcatggagttcctgcggcaggaggacaccccgggctgcaggccccccgaggggaacctgcgggacagcgacacgtccatctccatcccgtccgtggaccacgaggagctggagcgttccttcagcggcttcagcatctcccagtccaaggagaacctggatgctctcaacagctgctacgcggccgtggcgccttgtgccaaagtcaggccctacattgcggagggagagtcagacaccgactccgacctctgtaccccgtgcgggcccccgccacgctcggccaccggcgagggtccctttggtgacgtgggctgggccgggcccaggaagtgaggcggcgctgggccagtggacccgcccgcggccctcctcagcacggtgcctccgaggttttgaggcgggaaccctctggggcccttttcttacagtaactgagtgtggcgggaagggtgggccctggaggggcccatgtgggctgaaggatgggggctcctggcagtgaccttttacaaaagttattttccaacaggggctggagggctgggcagggccctgtggctccaggagcagcgtgcaggagcaaggctgccctgtccactctgctcagggccgcggccgacatcagcccggtgtgaggaggggcgggagtgatgacggggtgttgccagcgtggcaacaggcggggggttgtctcagccgagcccaggggaggcacaaagggcaggcctgttccctgaggacctgcgcaaagggcgggcctgtttggtgaggacctgcggccttgggtc

SEQ ID NO: 23289 - DNA, 5356 bp, Homo sapiens
  source 1..5356: mol_type = unassigned DNA
ggctggcaccgggcttgtaaataaactgcgatgctgtcttgggctcgccggcctgggtgccgccgccgccgccgccgccccggagcgccggttccaggctcccgccgccgcgcgccctagcgcctccgcgccagcctcgcgcgccctcccagcttctccgcagcccccggcccgcgaccctcggggtcctgcggctgacccgcgcgggatgtgaccccctgaccccctgcctggcctcccctgccccccagggggcccgcctttgcctgcttttgggggggggtggggaggggcgcgcggatcatggcattggagttcccgggcttgcagccgccgccgccgcctcgttcacgcaccccgagcgccccttcttcccagagcagcagcggagaaggcgaagcggccggcgggggcgaggcagatggggctcaaggcgcgcagggcggcgggggcggctggcggcggcggcgacgggggcggcggaggcggcggggcggctaacccagccggaggggacgcggcggcggccggcgacgaggagcggaaagtggggctggcgcccggcgacgtggagcaagtcaccttggcgctcggggccggagccgacaaagacgggaccctgctgctggagggcggcggccgcgacgaggggcagcggaggaccccgcagggcatcgggctcctggccaagaccccgctgagccgcccagtcaagagaaacaacgccaagtaccggcgcatccaaactttgatctacgacgccctggagagaccgcggggctgggcgctgctttaccacgcgttggtgttcctgattgtcctggggtgcttgattctggctgtcctgaccacattcaaggagtatgagactgtctcgggagactggcttctgttactggagacatttgctattttcatctttggagccgagtttgctttgaggatctgggctgctggatgttgctgccgatacaaaggctggcggggccgactgaagtttgccaggaagcccctgtgcatgttggacatctttgtgctgattgcctctgtgccagtggttgctgtgggaaaccaaggcaatgttctggccacctccctgcgaagcctgcgcttcctgcagatcctgcgcatgctgcggatggaccggagaggtggcacctggaagcttctgggctcagccatctgtgcccacagcaaagaactcatcacggcctggtacatcggtttcctgacactcatcctttcttcatttcttgtctacctggttgagaaagacgtcccagaggtggatgcacaaggagaggagatgaaagaggagtttgagacctatgcagatgccctgtggtggggcctgatcacactggccaccattggctatggagacaagacacccaaaacgtgggaaggccgtctgattgccgccaccttttccttaattggcgtctccttttttgcccttccagcgggcatcctggggtccgggctggccctcaaggtgcaggagcaacaccgtcagaagcactttgagaaaaggaggaagccagctgctgagctcattcaggctgcctggaggtattatgctaccaaccccaacaggattgacctggtggcgacatggagattttatgaatcagtcgtctcttttcctttcttcaggaaagaacagctggaggcagcatccagccaaaagctgggtctcttggatcgggttcgcctttctaatcctcgtggtagcaatactaaaggaaagctatttacccctctgaatgtagatgccatagaagaaagtccttctaaagaaccaaagcctgttggcttaaacaataaagagcgtttccgcacggccttccgcatgaaagcctacgctttctggcagagttctgaagatgccgggacaggtgaccccatggcggaagacaggggctatgggaatgacttccccatcgaagacatgatccccaccctgaaggccgccatccgagccgtcagaattctacaattccgtctctataaaaaaaaattcaaggagactttgaggccttacgatgtgaaggatgtgattgagcagtattctgccgggcatctcgacatgctttccaggataaagtaccttcagacgagaatagatatgattttcacccctggacctccctccacgccaaaacacaagaagtctcagaaagggtcagcattcaccttcccatcccagcaatctcccaggaatgaaccatatgtagccagaccatccacatcagaaatcgaagaccaaagcatgatggggaagtttgtaaaagttgaaagacaggttcaggacatggggaagaagctggacttcctcgtggatatgcacatgcaacacatggaacggttgcaggtgcaggtcacggagtattacccaaccaagggcacctcctcgccagctgaagcagagaagaaggaggacaacaggtattccgatttgaaaaccatcatctgcaactattctgagacaggccccccggaaccaccctacagcttccaccaggtgaccattgacaaagtcagcccctatgggttttttgcacatgaccctgtgaacctgccccgagggggacccagttctggaaaggttcaggcaactcctccttcctcagcaacaacgtatgtggagaggcccacggtcctgcctatcttgactcttctcgactcccgagtgagctgccactcccaggctgacctgcagggcccctactcggaccgaatctccccccggcagagacgtagcatcacgcgagacagtgacacacctctgtccctgatgtcggtcaaccacgaggagctggagaggtctccaagtggcttcagcatctcccaggacagagatgattatgtgttcggccccaatggggggtcgagctggatgagggagaagcggtacctcgccgagggtgagacggacacagacacggaccccttcacgcccagcggctccatgcctctgtcgtccacaggggatgggatttctgattcagtatggaccccttccaataagcccatttaaaagaggtcactggctgacccctccttgtaatgtagacagactttgtatagttcacttactcttacacccgacgcttaccagcggggacaccaatggctgcatcaaatgcatgcgtgtgcgtggtggccccacccaggcaggggcttcccacagcctcttcctccccatgtcaccacaacaaagtgcttccttttcagcatggtttgcatgactttacactatataaatggttccgctaatctcttctaggatacacatttatctgctgttcttacttttaatcacgattggaccagtacagggagaaattactgatgagccatgctatttgtctgtttggttggctggtttgggttttggtttggtaagcagagaaagtagtttaagttatttctaggatcactgccctcttgtgtaaaacgctccagcaattaactgtttttgaaagcaaggaaataattttctcaacaaaaccacattgtgtatcagtggggctgcctactgagctaacattaggaaaggaatgagatagtcattgtgtctctaaaacaaagaatttaaacaaatatttaaggcaaaaccttttaaaagctctccaaaagacctcacttggcctgatgttacttagtatcatgcctcagtttccttatctgtaaaaagtggtggtaatcccaagtgtagcatttctgatgagttatgaattggcagggagaaaacacacacacacacacacacacacacacacacacacacatacacaaagttaaaatagtttccaatttatgtagccaaggacaatggaatttatcagaagtgaagtgcccctctgggcaggagctgagttcagtgcctttaaaatgaatttccaactctcatttcttcccatgatactgaagtacaaaatatccatctaaaatagaaattaaagtcaagaaggcacacagaaattttctagtccaaggacttccttttataaatgaagaatcttaggctcaggtaaagtgacatacccagagtcactcagttgtcccatagagaaccaggactcaaaagtcaggtctgcccactctccctgaccttgtttcccctcaccacaccattcttccatttatataatgcatcctagagattgtgtcaagatatatgactttgtgtcgcgtggaaagcacccagtttatccagcaggagggggatttccacttttattgcaaaacatgcttgcttgatgcaatgcatttcagatctagaaaaaaataatgcaagcaagctacatttacagatgtgtaaacaggcaaaatttccagaaccgtccaattttacttttccaaatttatggaaccaacccagattttttaaatgaaaatactaaaaccatatgtaaccgtaagacaagctaaaatgtaagcagacagcctgggaagcactgccctactgtacaggtgtgatattaagcacaagccatcctctggcctcttatgagatgttgttattctctgaaaaactttgatggaaaaggtttctgttaggcttagactgaattagctaaatgaccatgccacagtattattgtatcactcttctcacacacctaggcactggttgtggatagttgccatggtgacaatcaagataatccagatgacctaaacaaatgtctgtatgcagctgacactgctattctccctcacagtcttgtcaagagccacagtagctatggcagacatttggttgatggtttcatcatttcctaatacgagagtctggcactatgttggagagaggaatcacttcctcagagataggttcctttcaactcacatgtcaacagttactgtacaaaaagctcagaatacagtaatgattagagcttgacccctgactttaggaacttagaaccaaagcccaaagtcccaggccaagggcagacattgtgagcagcagaagggtgttttttatggagagccccataaatggatgggtgtagaccttgaagtctgagatgggaaatataccagaatgctcaatgcatcagacatgaagccccacgggcttccatttgacatgctggcaatctgaaggacaaagggcatgggttatttgggccttttccccactccttcaatatggctgaaagtgccagtggggattacaacctaagaaaccctatgccccttcctgagggcttgattattgaatcctgatcttcctggaatctttcacttgagatgatcacctgcctaacatccaacatgttactatgctcttctttatgtacatgagttactggaaaccaacaataaaggagagtgagtcata

SEQ ID NO: 23290 - DNA, 2256 bp, Homo sapiens
  source 1..2256: mol_type = unassigned DNA
aagccaaaaaagcatggtcctatgttcctgattgtcctggggtgcttgattctggctgtcctgaccacattcaaggagtatgagactgtctcgggagactggcttctgttactggagacatttgctattttcatctttggagccgagtttgctttgaggatctgggctgctggatgttgctgccgatacaaaggctggcggggccgactgaagtttgccaggaagcccctgtgcatgttggacatctttgtgctgattgcctctgtgccagtggttgctgtgggaaaccaaggcaatgttctggccacctccctgcgaagcctgcgcttcctgcagatcctgcgcatgctgcggatggaccggagaggtggcacctggaagcttctgggctcagccatctgtgcccacagcaaagaactcatcacggcctggtacatcggtttcctgacactcatcctttcttcatttcttgtctacctggttgagaaagacgtcccagaggtggatgcacaaggagaggagatgaaagaggagtttgagacctatgcagatgccctgtggtggggcctgatcacactggccaccattggctatggagacaagacacccaaaacgtgggaaggccgtctgattgccgccaccttttccttaattggcgtctccttttttgcccttccagcgggcatcctggggtccgggctggccctcaaggtgcaggagcaacaccgtcagaagcactttgagaaaaggaggaagccagctgctgagctcattcaggctgcctggaggtattatgctaccaaccccaacaggattgacctggtggcgacatggagattttatgaatcagtcgtctcttttcctttcttcaggaaagaacagctggaggcagcatccagccaaaagctgggtctcttggatcgggttcgcctttctaatcctcgtggtagcaatactaaaggaaagctatttacccctctgaatgtagatgccatagaagaaagtccttctaaagaaccaaagcctgttggcttaaacaataaagagcgtttccgcacggccttccgcatgaaagcctacgctttctggcagagttctgaagatgccgggacaggtgaccccatggcggaagacaggggctatgggaatgacttccccatcgaagacatgatccccaccctgaaggccgccatccgagccgtcagaattctacaattccgtctctataaaaaaaaattcaaggagactttgaggccttacgatgtgaaggatgtgattgagcagtattctgccgggcatctcgacatgctttccaggataaagtaccttcagacgagaatagatatgattttcacccctggacctccctccacgccaaaacacaagaagtctcagaaagggtcagcattcaccttcccatcccagcaatctcccaggaatgaaccatatgtagccagaccatccacatcagaaatcgaagaccaaagcatgatggggaagtttgtaaaagttgaaagacaggttcaggacatggggaagaagctggacttcctcgtggatatgcacatgcaacacatggaacggttgcaggtgcaggtcacggagtattacccaaccaagggcacctcctcgccagctgaagcagagaagaaggaggacaacaggtattccgatttgaaaaccatcatctgcaactattctgagacaggccccccggaaccaccctacagcttccaccaggtgaccattgacaaagtcagcccctatgggttttttgcacatgaccctgtgaacctgccccgagggggacccagttctggaaaggttcaggcaactcctccttcctcagcaacaacgtatgtggagaggcccacggtcctgcctatcttgactcttctcgactcccgagtgagctgccactcccaggctgacctgcagggcccctactcggaccgaatctccccccggcagagacgtagcatcacgcgagacagtgacacacctctgtccctgatgtcggtcaaccacgaggagctggagaggtctccaagtggcttcagcatctcccaggacagagatgattatgtgttcggccccaatggggggtcgagctggatgagggagaagcggtacctcgccgagggtgagacggacacagacacggaccccttcacgcccagcggctccatgcctctgtcgtccacaggggatgggatttctgattcagtatggaccccttccaataagcccatttaa

SEQ ID NO: 23291 - DNA, 2550 bp, Homo sapiens
  source 1..2550: mol_type = unassigned DNA
agagcagcagcggagaaggcgaagcggccggcgggggcgaggcagatggggctcaaggcgcgcagggcggcggccggcgacgaggagcggaaagtggggctggcgcccggcgacgtggagcaagtcaccttggcgctcggggccggagccgacaaagacgggaccctgctgctggagggcggcggccgcgacgaggggcagcggaggaccccgcagggcatcgggctcctggccaagaccccgctgagccgcccagtcaagagaaacaacgccaagtaccggcgcatccaaactttgatctacgacgccctggagagaccgcggggctgggcgctgctttaccacgcgttggtgttcctgattgtcctggggtgcttgattctggctgtcctgaccacattcaaggagtatgagactgtctcgggagactggcttctgttactggagacatttgctattttcatctttggagccgagtttgctttgaggatctgggctgctggatgttgctgccgatacaaaggctggcggggccgactgaagtttgccaggaagcccctgtgcatgttggacatctttgtgctgattgcctctgtgccagtggttgctgtgggaaaccaaggcaatgttctggccacctccctgcgaagcctgcgcttcctgcagatcctgcgcatgctgcggatggaccggagaggtggcacctggaagcttctgggctcagccatctgtgcccacagcaaagaactcatcacggcctggtacatcggtttcctgacactcatcctttcttcatttcttgtctacctggttgagaaagacgtcccagaggtggatgcacaaggagaggagatgaaagaggagtttgagacctatgcagatgccctgtggtggggcctgatcacactggccaccattggctatggagacaagacacccaaaacgtgggaaggccgtctgattgccgccaccttttccttaattggcgtctccttttttgcccttccagcgggcatcctggggtccgggctggccctcaaggtgcaggagcaacaccgtcagaagcactttgagaaaaggaggaagccagctgctgagctcattcaggctgcctggaggtattatgctaccaaccccaacaggattgacctggtggcgacatggagattttatgaatcagtcgtctcttttcctttcttcaggaaagaacagctggaggcagcatccagccaaaagctgggtctcttggatcgggttcgcctttctaatcctcgtggtagcaatactaaaggaaagctatttacccctctgaatgtagatgccatagaagaaagtccttctaaagaaccaaagcctgttggcttaaacaataaagagcgtttccgcacggccttccgcatgaaagcctacgctttctggcagagttctgaagatgccgggacaggtgaccccatggcggaagacaggggctatgggaatgacttccccatcgaagacatgatccccaccctgaaggccgccatccgagccgtcagaattctacaattccgtctctataaaaaaaaattcaaggagactttgaggccttacgatgtgaaggatgtgattgagcagtattctgccgggcatctcgacatgctttccaggataaagtaccttcagacgagaatagatatgattttcacccctggacctccctccacgccaaaacacaagaagtctcagaaagggaatgaaccatatgtagccagaccatccacatcagaaatcgaagaccaaagcatgatggggaagtttgtaaaagttgaaagacaggttcaggacatggggaagaagctggacttcctcgtggatatgcacatgcaacacatggaacggttgcaggtgcaggtcacggagtattacccaaccaagggcacctcctcgccagctgaagcagagaagaaggaggacaacaggtattccgatttgaaaaccatcatctgcaactattctgagacaggccccccggaaccaccctacagcttccaccaggtgaccattgacaaagtcagcccctatgggttttttgcacatgaccctgtgaacctgccccgagggggacccagttctggaaaggttcaggcaactcctccttcctcagcaacaacgtatgtggagaggcccacggtcctgcctatcttgactcttctcgactcccgagtgagctgccactcccaggctgacctgcagggcccctactcggaccgaatctccccccggcagagacgtagcatcacgcgagacagtgacacacctctgtccctgatgtcggtcaaccacgaggagctggagaggtctccaagtggcttcagcatctcccaggacagagatgattatgtgttcggccccaatggggggtcgagctggatgagggagaagcggtacctcgccgagggtgagacggacacagacacggaccccttcacgcccagcggctccatgcctctgtcgtccacaggggatgggatttctgattcagtatggaccccttccaataagcccatttaa

SEQ ID NO: 23292 - DNA, 4099 bp, Homo sapiens
  source 1..4099: mol_type = unassigned DNA
agccatgcgtctctgagcgccccgagcgcgcccccgccccggaccgtgcccgggccccggcgcccccagcccggcgccgcccatggccgaggcccccccgcgccgcctcggcctgggtcccccgcccggggacgccccccgcgcggagctagtggcgctcacggccgtgcagagcgaacagggcgaggcgggcgggggcggctccccgcgccgcctcggcctcctgggcagccccctgccgccgggcgcgcccctccctgggccgggctccggctcgggctccgcctgcggccagcgctcctcggccgcgcacaagcgctaccgccgcctgcagaactgggtctacaacgtgctggagcggccccgcggctgggccttcgtctaccacgtcttcatatttttgctggtcttcagctgcctggtgctgtctgtgctgtccactatccaggagcaccaggaacttgccaacgagtgtctcctcatcttggaattcgtgatgatcgtggttttcggcttggagtacatcgtccgggtctggtccgccggatgctgctgccgctaccgaggatggcagggtcgcttccgctttgccagaaagcccttctgtgtcatcgacttcatcgtgttcgtggcctcggtggccgtcatcgccgcgggtacccagggcaacatcttcgccacgtccgcgctgcgcagcatgcgcttcctgcagatcctgcgcatggtgcgcatggaccgccgcggcggcacctggaagctgctgggctcagtggtctacgcgcatagcaaggagctgatcaccgcctggtacatcgggttcctggtgctcatcttcgcctccttcctggtctacctggctgagaaggacgccaactccgacttctcctcctacgccgactcgctctggtgggggacgattacattgacaaccatcggctatggtgacaagacaccgcacacatggctgggcagggtcctggctgctggcttcgccttactgggcatctctttctttgccctgcctgccggcatcctaggctccggctttgccctgaaggtccaggagcagcaccggcagaagcacttcgagaagcggaggatgccggcagccaacctcatccaggctgcctggcgcctgtactccaccgatatgagccgggcctacctgacagccacctggtactactatgacagtatcctcccatccttcagagagctggccctcttgtttgagcacgtgcaacgggcccgcaatgggggcctacggcccctggaggtgcggcgggcgccggtacccgacggagcaccctcccgttacccgcccgttgccacctgccaccggccgggcagcacctccttctgccctggggaaagcagccggatgggcatcaaagaccgcatccgcatgggcagctcccagcggcggacgggtccttccaagcagcatctggcacctccaacaatgcccacctccccaagcagcgagcaggtgggtgaggccaccagccccaccaaggtgcaaaagagctggagcttcaatgaccgcacccgcttccgggcatctctgagactcaaaccccgcacctctgctgaggatgccccctcagaggaagtagcagaggagaagagctaccagtgtgagctcacggtggacgacatcatgcctgctgtgaagacagtcatccgctccatcaggattctcaagttcctggtggccaaaaggaaattcaaggagacactgcgaccgtacgacgtgaaggacgtcattgagcagtactcagcaggccacctggacatgctgggccggatcaagagcctgcaaactcgggtggaccaaattgtgggtcgggggcccggggacaggaaggcccgggagaagggcgacaaggggccctccgacgcggaggtggtggatgaaatcagcatgatgggacgcgtggtcaaggtggagaagcaggtgcagtccatcgagcacaagctggacctgctgttgggcttctattcgcgctgcctgcgctctggcacctcggccagcctgggcgccgtgcaagtgccgctgttcgaccccgacatcacctccgactaccacagccctgtggaccacgaggacatctccgtctccgcacagacgctcagcatctcccgctcggtcagcaccaacatggactgagggacttctcagaggcagggcagcacacggccagccccgcggcctggcgctccgactgccctctgaggcctccggactcctctcgtacttgaactcactccctcacggggagagagaccacacgcagtattgagctgcctgagtgggcgtggtacctgctgtgggtgccagcgccccttccccacctcaggagcgtgagatgccaggtcgcacagagggcagcagcagcggccgtcccgcggcctctgggccccccagtgccctgcccactccatcaaggccctatgtggcccacctggcaggggcacagccccgggagtgggagcgggcgctggggccctgggccctgacccagcttccagctatgcaaggtgaggtctctggcccacccttcggacacagcagggaagccctcccgccaagtccccgccccacttgggggtgggccaaggtgcccccacaggtacccacaaagcacaggaccctgccacaaggcaggtggacaccatatatgcaaaccatgttaaatatgcaactttggggacccccatggggtctctctgtccctcccccattgggagctgggcccccagcagtagctggtctcaggctgcttggccaccaccctgtccctattctttggcttatcactccttcccctcccagcatggggcctgtttctcccctgccctctcctaagggcaatgcctgggcctttcttcccatttgcaagtgtcagctcccaggggctccctcctcctgctgggtggccactcccctccttggccctccagacaccactcatagtcagcacaggtttctgtatcctccccaaaactcccagacagtgcttcgtggacgatcgcacaaacatagccttttagtttctccagacaggaagaaagcctctcacacttaaacatgcaatgacgtgacacacttggagacatgagtgcagagccactcagccgctcctgggcctctgcagcagatgccagtggactggccttgcagggtgacgaccactaagaggaagacccccaactccatctgagcaggagaaggagctttgaagtaacccgagagctctccaggccccacccagacctttacccgctccccttcttcaagaagatctcctcctctctggtccaggagccctaacccactgcctctgcctgtccccaagggcccgcctccgtgtctccacagcacaactcgggcccaggcctgacaccactggagagaccccaggcccacttctagccaggcctgtgccttcctagtcactctaactcccagagagaataagaatgcatgtaatagctataccaaccgcgcatccggctttcacatgcactgtctcccctccctccacaccccacttcttcacttcaattggcagcgccacatccaggcgtcagcccccattcactccaggaacactttcttatccccacccctttgctcctcttctgcaaagccaatgcaggtggcaggaaggtgaggggtagtggaccaatggcaaccctctgtgggaacaaggggccgaggccacgctgcctgcatctcgtgctggggacctgcatgcgccagcaccagggcttggactggatcttactcagtccatggtgcccagcctctgccccaacatgccctctgcatgtgaccgtcatgccctggatggagccactcctggctcaccccacctgcactgcactgtccccagagagccacccctccacccactcagagacagctgtggagagggccaggagaatgggattaccctatgaccaaggagacatgggaagaagccctccttccttccacgatcgaggttccgccatcaactcggttctcggatatgcaagtacctcactttgttaacttattaacttattggtttcattaaagttttcaagagga

SEQ ID NO: 23293 - DNA, 6688 bp, Homo sapiens
  source 1..6688: mol_type = unassigned DNA
ggctgggtgtgcgcgcgtgggagcgcgcctcggagcgccccgcactcccccactctatccccgggggcagtttgggaaggagggagtggtagtcgcgggaatgagggagcaagagaaaccctctcaaagtgacgccccaaacaggtccggatttagaattcgaagctaaaggctgttagaaattgggactcctcggcctcctctgcagcccctcctttcccgccccgaagcccgggcggtttgctggctgcctgcttccccgcccccggctcagaggtctctggctggcgggcgccccgtcggccgccggcttcctccttgaaacccgccggcgcacatgaggccgctgcccccgccgcaggcgctggcggccccctcgcggtgcccgtggtgatgccatgccccgccaccacgcgggaggagaggagggcggcgccgccgggctctgggtgaagagcggcgcagcggcggcggcggcgggcggggggcgcttgggcagcggcatgaaggatgtggagtccggccggggcagggtgctgctgaactcggcagccgccaggggcgacggcctgctactgctgggcacccgcgcggccacgctcggtggcggcggcggtggcctgagggagagccgccggggcaagcagggggcccggatgagcctgctggggaagccgctctcttacacgagtagccagagctgccggcgcaacgtcaagtaccggcgggtgcagaactacctgtacaacgtgctggagagaccccgcggctgggcgttcatctaccacgctttcgtttttctccttgtctttggttgcttgattttgtcagtgttttctaccatccctgagcacacaaaattggcctcaagttgcctcttgatcctggagttcgtgatgattgtcgtctttggtttggagttcatcattcgaatctggtctgcgggttgctgttgtcgatatagaggatggcaaggaagactgaggtttgctcgaaagcccttctgtgttatagataccattgttcttatcgcttcaatagcagttgtttctgcaaaaactcagggtaatatttttgccacgtctgcactcagaagtctccgtttcctacagatcctccgcatggtgcgcatggaccgaaggggaggcacttggaaattactgggttcagtggtttatgctcacagcaaggaattaatcacagcttggtacataggatttttggttcttattttttcgtctttccttgtctatctggtggaaaaggatgccaataaagagttttctacatatgcagatgctctctggtggggcacaattacattgacaactattggctatggagacaaaactcccctaacttggctgggaagattgctttctgcaggctttgcactccttggcatttctttctttgcacttcctgccggcattcttggctcaggttttgcattaaaagtacaagaacaacaccgccagaaacactttgagaaaagaaggaacccagctgccaacctcattcagtgtgtttggcgtagttacgcagctgatgagaaatctgtttccattgcaacctggaagccacacttgaaggccttgcacacctgcagccctaccaagaaagaacaaggggaagcatcaagcagtaagttctgtagtaataagcagaagctcttcagaatgtacacctcacggaagcagagtcagaagctaagttttaaggagcgagtgcgcatggctagccccaggggccagagtattaagagccgacaagcctcagtaggtgacaggaggtccccaagcaccgacatcacagccgagggcagtcccaccaaagtgcagaagagctggagcttcaacgaccgaacccgcttccggccctcgctgcgcctcaaaagttctcagccaaaaccagtgatagatgctgacacagcccttggcactgatgatgtatatgatgaaaaaggatgccagtgtgatgtatcagtggaagacctcaccccaccacttaaaactgtcattcgagctatcagaattatgaaatttcatgttgcaaaacggaagtttaaggaaacattacgtccatatgatgtaaaagatgtcattgaacaatattctgctggtcatctggacatgttgtgtagaattaaaagccttcaaacacgtgttgatcaaattcttggaaaagggcaaatcacatcagataagaagagccgagagaaaataacagcagaacatgagaccacagacgatctcagtatgctcggtcgggtggtcaaggttgaaaaacaggtacagtccatagaatccaagctggactgcctactagacatctatcaacaggtccttcggaaaggctctgcctcagccctcgctttggcttcattccagatcccaccttttgaatgtgaacagacatctgactatcaaagccctgtggatagcaaagatctttcgggttccgcacaaaacagtggctgcttatccagatcaactagtgccaacatctcgagaggcctgcagttcattctgacgccaaatgagttcagtgcccagactttctacgcgcttagccctactatgcacagtcaagcaacacaggtgccaattagtcaaagcgatggctcagcagtggcagccaccaacaccattgcaaaccaaataaatacggcacccaagccagcagccccaacaactttacagatcccacctcctctcccagccatcaagcatctgcccaggccagaaactctgcaccctaaccctgcaggcttacaggaaagcatttctgacgtcaccacctgccttgttgcctccaaggaaaatgttcaggttgcacagtcaaatctcaccaaggaccgttctatgaggaaaagctttgacatgggaggagaaactctgttgtctgtctgtcccatggtgccgaaggacttgggcaaatctttgtctgtgcaaaacctgatcaggtcgaccgaggaactgaatatacaactttcagggagtgagtcaagtggctccagaggcagccaagatttttaccccaaatggagggaatccaaattgtttataactgatgaagaggtgggtcccgaagagacagagacagacacttttgatgccgcaccgcagcctgccagggaagctgcctttgcatcagactctctaaggactggaaggtcacgatcatctcagagcatttgtaaggcaggagaaagtacagatgccctcagcttgcctcatgtcaaactgaaataagttcttcattttctttccaggcatagcagttctttagccatacatatcattgcatgaactatttcgaaagcccttctaaaaagttgaaattgcaagaatcgggaagaacatgaaaggcagtttataagcccgttaccttttaattgcatgaaaatgcatgtttagggatggctaaaattccaaggtgcatcgacattaacccactcatttagtaatgtaccttgagttaaaaagcctgagaaaccaaacacagctaatgctatggggtgtatgaatatgtcaagtttaggtcatttagaagatttgacactgtattttgaaattatgggagtaaacaccttcaaatttcaggcatttctgctttgtgactaaatacaaactacattttcaagattaggccataatgtatatttaaacacaatggctatcaacagctgctaataaggtatcaactaaagcagaattggggaataatagaaatggctgcttatttcaagatatatttgccaacccattcctattcagtcattttattattaatgtaatttgaatgtcaatttgtgtgcttttggtgatttagcgctgtggcaagcaattttgcacatcattttcatgttgttctttatgacaagaatgttcttcaattagaaaatgtgcaaataatgaaattcagggccagtgaggcaaatagactatctgacatatttgactttatgaaaacatattgcctgatggcagaatcaactttataagtggtcaacttctacacaagcgtatgaaatactggtcagtagaacagccattgtgattggactggtttctctgcaatggcgccaaccccaggcttgccaatactgcctatgtaaagggcaagtgtgagaagctattctcatttcgctgacatacaggtaggactatgggggatgggacatttgagtgggactgagataggaaaggcttgaaaagaacccagaaacaccaccaggaagttggcaaagtaaaagaaaatgacttccccctcaaagggcaatgagagggagagaaacaaaccaaaatagaagaactagactttttagaaaatgagtattgctagggaattcaactacctaatcttcccttattcttatatataagcagagaatttttgcaaggtatttattttttaatatgccctgaatgtcttttgctattatgtgtacattttgcatatgaaagtctaaaacgaaacttcctttactttttatactgtagtgaaaattttctattcttcccaagaatgttgtcccaaatctgaaattactggttcaatttcctgatataaacatttacaattagaagctagatagtactggcagagtctgcaaatcagaacacttaaatatatcatggcagcaaaaagaccaagggaaacaaaatgacaaatgtatttatcagaaagcaagcaatgctgactgcttgttagaaacccatctagctatcttaggtcaccagaacttcagccaacgtaatgacattcaaaaaaaaaggacataagagatagcatttcaattcaattaaaccctagccacaggaggactcaagaaaggaagttgtttccttggcagacataaatgctgcctccagaagtacttctccagcagccaagcagaatgagcagggttatcaagtggatgttcaaaggaagaaggaggccctgaactccaccaatcctccccagccctccccaacaggctttctccatcattgactctcccctgcttttcttcttcattaactccttattcattccctgccagtattttgcttctgaacttcaccaggccttaaccagcctccatccccaggtcaaccagttctccgctttacctaaaatgtgcttctcaaccttttagaaccttgtcccttttgataaacatggaaatttttaaagcttcctcttcgcatcccacttggattctaagacaattagaatcatttagaatctttttggctgctggaaatgtatagaagatagaggctaaattttacacttcagttaagacattgtcaatccttttaagcaattgttttcattttcaaaatacagaatgttagtaaattatgaaaatcaatttttcatcttcattcaacctgaagttgtgattcccccttgcaagaatgttgcatacacacacacacacacacacacacacacacacacacacacacacacacacacacacacacacccctccactgacctaaagccagacacctgccgtgactgggcaggctctctcccattattaacagaggaagaggagggaggcagcaactttcaggtagcactgattcttggacatactctgtcctgggtcaaaccccactggcagcaggaattctgaatgtattggggacccctccttaggcctcgttaagtctcaaacacagtacagctcacccagcattgctgacgactgaagattcagaaacaaaacctacacacagcactgaggtcttaatcatagcaaaatgtgataaaccatgttgtgaaaaacttttatacattgaagccatgaccattttgtgtctatcttactctagcacaaaaattgggggatgttaaaagatagttgtgtggaagctataaggttctgtctgtcgtgttactctctgtggaaatgagaggggtctcccatttacactaagcaaatttccattggtcaattttaatgatgtcttgaagcacaatttagctgagcactgagtagccatatgctttctgagtacaagtgtgtctgccttcttcaacatgtagggttgatcaagctaatacttaattgcaaatatcccttgtatgaggttaactaaaaaaattttgctatgtctgatctacatgtttgcattttgttcaactaaattaatatttgtagattgcaagttttgtttaaaataactttattgagtttttaagtcctgatctgttctaaggtgcctttctcacctcccattgattcagtgattctgaagttcttaatttgcaagtaaaataagtctactagagaggaggaaatcaggcacaaattgaccaattctcatgccatttgcaaagcaaaactgtaaggatgatgaaacctggctaactaaattaatggatcatttcactaaatcagatagaggaaatatcataaatattaacttgtctccctagaagctgagatttttcgccttaaatgacatggttgtgtttttgtaagagaaacttaatctaatctaataatgtgcatttaagtaagcagttctaagtcatgtatgacaatgcaattgtctgtttcctgaaaacaaataaatcgggaacaccatatccatttcaagctatcattaaagtgtaatttcctttgctctcttttactgggattatttgttttaaagtaaaacattaaaaagatgtctat

SEQ ID NO: 23294 - DNA, 6566 bp, Homo sapiens
  source 1..6566: mol_type = unassigned DNA
actctatccccgggggcagtttgggaaggagggagtggtagtcgcgggaatgagggagcaagagaaaccctctcaaagtgacgccccaaacaggtccggatttagaattcgaagctaaaggctgttagaaattgggactcctcggcctcctctgcagcccctcctttcccgccccgaagcccgggcggtttgctggctgcctgcttccccgcccccggctcagaggtctctggctggcgggcgccccgtcggccgccggcttcctccttgaaacccgccggcgcacatgaggccgctgcccccgccgcaggcgctggcggccccctcgcggtgcccgtggtgatgccatgccccgccaccacgcgggaggagaggagggcggcgccgccgggctctgggtgaagagcggcgcagcggcggcggcggcgggcggggggcgcttgggcagcggcatgaaggatgtggagtccggccggggcagggtgctgctgaactcggcagccgccaggggcgacggcctgctactgctgggcacccgcgcggccacgctcggtggcggcggcggtggcctgagggagagccgccggggcaagcagggggcccggatgagcctgctggggaagccgctctcttacacgagtagccagagctgccggcgcaacgtcaagtaccggcgggtgcagaactacctgtacaacgtgctggagagaccccgcggctgggcgttcatctaccacgctttcgtttttctccctgtctttggttgcttgattttgtcagtgttttctaccatccctgagcacacaaaattggcctcaagttgcctcttgatcctggagttcgtgatgattgtcgtctttggtttggagttcatcattcgaatctggtctgcgggttgctgttgtcgatatagaggatggcaaggaagactgaggtttgctcgaaagcccttctgtgttatagataccattgttcttatcgcttcaatagcagttgtttctgcaaaaactcagggtaatatttttgccacgtctgcactcagaagtctccgtttcctacagatcctccgcatggtgcgcatggaccgaaggggaggcacttggaaattactgggttcagtggtttatgctcacagcaaggaattaatcacagcttggtacataggatttttggttcttattttttcgtctttccttgtctatctggtggaaaaggatgccaataaagagttttctacatatgcagatgctctctggtggggcacaattacattgacaactattggctatggagacaaaactcccctaacttggctgggaagattgctttctgcaggctttgcactccttggcatttctttctttgcacttcctgccggcattcttggctcaggttttgcattaaaagtacaagaacaacaccgccagaaacactttgagaaaagaaggaacccagctgccaacctcattcagtgtgtttggcgtagttacgcagctgatgagaaatctgtttccattgcaacctggaagccacacttgaaggccttgcacacctgcagccctaccaagaaagaacaaggggaagcatcaagcagtcagaagctaagttttaaggagcgagtgcgcatggctagccccaggggccagagtattaagagccgacaagcctcagtaggtgacaggaggtccccaagcaccgacatcacagccgagggcagtcccaccaaagtgcagaagagctggagcttcaacgaccgaacccgcttccggccctcgctgcgcctcaaaagttctcagccaaaaccagtgatagatgctgacacagcccttggcactgatgatgtatatgatgaaaaaggatgccagtgtgatgtatcagtggaagacctcaccccaccacttaaaactgtcattcgagctatcagaattatgaaatttcatgttgcaaaacggaagtttaaggaaacattacgtccatatgatgtaaaagatgtcattgaacaatattctgctggtcatctggacatgttgtgtagaattaaaagccttcaaacacgtgttgatcaaattcttggaaaagggcaaatcacatcagataagaagagccgagagaaaataacagcagaacatgagaccacagacgatctcagtatgctcggtcgggtggtcaaggttgaaaaacaggtacagtccatagaatccaagctggactgcctactagacatctatcaacaggtccttcggaaaggctctgcctcagccctcgctttggcttcattccagatcccaccttttgaatgtgaacagacatctgactatcaaagccctgtggatagcaaagatctttcgggttccgcacaaaacagtggctgcttatccagatcaactagtgccaacatctcgagaggcctgcagttcattctgacgccaaatgagttcagtgcccagactttctacgcgcttagccctactatgcacagtcaagcaacacaggtgccaattagtcaaagcgatggctcagcagtggcagccaccaacaccattgcaaaccaaataaatacggcacccaagccagcagccccaacaactttacagatcccacctcctctcccagccatcaagcatctgcccaggccagaaactctgcaccctaaccctgcaggcttacaggaaagcatttctgacgtcaccacctgccttgttgcctccaaggaaaatgttcaggttgcacagtcaaatctcaccaaggaccgttctatgaggaaaagctttgacatgggaggagaaactctgttgtctgtctgtcccatggtgccgaaggacttgggcaaatctttgtctgtgcaaaacctgatcaggtcgaccgaggaactgaatatacaactttcagggagtgagtcaagtggctccagaggcagccaagatttttaccccaaatggagggaatccaaattgtttataactgatgaagaggtgggtcccgaagagacagagacagacacttttgatgccgcaccgcagcctgccagggaagctgcctttgcatcagactctctaaggactggaaggtcacgatcatctcagagcatttgtaaggcaggagaaagtacagatgccctcagcttgcctcatgtcaaactgaaataagttcttcattttctttccaggcatagcagttctttagccatacatatcattgcatgaactatttcgaaagcccttctaaaaagttgaaattgcaagaatcgggaagaacatgaaaggcagtttataagcccgttaccttttaattgcatgaaaatgcatgtttagggatggctaaaattccaaggtgcatcgacattaacccactcatttagtaatgtaccttgagttaaaaagcctgagaaaccaaacacagctaatgctatggggtgtatgaatatgtcaagtttaggtcatttagaagatttgacactgtattttgaaattatgggagtaaacaccttcaaatttcaggcatttctgctttgtgactaaatacaaactacattttcaagattaggccataatgtatatttaaacacaatggctatcaacagctgctaataaggtatcaactaaagcagaattggggaataatagaaatggctgcttatttcaagatatatttgccaacccattcctattcagtcattttattattaatgtaatttgaatgtcaatttgtgtgcttttggtgatttagcgctgtggcaagcaattttgcacatcattttcatgttgttctttatgacaagaatgttcttcaattagaaaatgtgcaaataatgaaattcagggccagtgaggcaaatagactatctgacatatttgactttatgaaaacatattgcctgatggcagaatcaactttataagtggtcaacttctacacaagcgtatgaaatactggtcagtagaacagccattgtgattggactggtttctctgcaatggcgccaaccccaggcttgccaatactgcctatgtaaagggcaagtgtgagaagctattctcatttcgctgacatacaggtaggactatgggggatgggacatttgagtgggactgagataggaaaggcttgaaaagaacccagaaacaccaccaggaagttggcaaagtaaaagaaaatgacttccccctcaaagggcaatgagagggagagaaacaaaccaaaatagaagaactagactttttagaaaatgagtattgctagggaattcaactacctaatcttcccttattcttatatataagcagagaatttttgcaaggtatttattttttaatatgccctgaatgtcttttgctattatgtgtacattttgcatatgaaagtctaaaacgaaacttcctttactttttatactgtagtgaaaattttctattcttcccaagaatgttgtcccaaatctgaaattactggttcaatttcctgatataaacatttacaattagaagctagatagtactggcagagtctgcaaatcagaacacttaaatatatcatggcagcaaaaagaccaagggaaacaaaatgacaaatgtatttatcagaaagcaagcaatgctgactgcttgttagaaacccatctagctatcttaggtcaccagaacttcagccaacgtaatgacattcaaaaaaaaaggacataagagatagcatttcaattcaattaaaccctagccacaggaggactcaagaaaggaagttgtttccttggcagacataaatgctgcctccagaagtacttctccagcagccaagcagaatgagcagggttatcaagtggatgttcaaaggaagaaggaggccctgaactccaccaatcctccccagccctccccaacaggctttctccatcattgactctcccctgcttttcttcttcattaactccttattcattccctgccagtattttgcttctgaacttcaccaggccttaaccagcctccatccccaggtcaaccagttctccgctttacctaaaatgtgcttctcaaccttttagaaccttgtcccttttgataaacatggaaatttttaaagcttcctcttcgcatcccacttggattctaagacaattagaatcatttagaatctttttggctgctggaaatgtatagaagatagaggctaaattttacacttcagttaagacattgtcaatccttttaagcaattgttttcattttcaaaatacagaatgttagtaaattatgaaaatcaatttttcatcttcattcaacctgaagttgtgattcccccttgcaagaatgttgcatacacacacacacacacacacacacacacacacacacacacacacacacacacacacacacacccctccactgacctaaagccagacacctgccgtgactgggcaggctctctcccattattaacagaggaagaggagggaggcagcaactttcaggtagcactgattcttggacatactctgtcctgggtcaaaccccactggcagcaggaattctgaatgtattggggacccctccttaggcctcgttaagtctcaaacacagtacagctcacccagcattgctgacgactgaagattcagaaacaaaacctacacacagcactgaggtcttaatcatagcaaaatgtgataaaccatgttgtgaaaaacttttatacattgaagccatgaccattttgtgtctatcttactctagcacaaaaattgggggatgttaaaagatagttgtgtggaagctataaggttctgtctgtcgtgttactctctgtggaaatgagaggggtctcccatttacactaagcaaatttccattggtcaattttaatgatgtcttgaagcacaatttagctgagcactgagtagccatatgctttctgagtacaagtgtgtctgccttcttcaacatgtagggttgatcaagctaatacttaattgcaaatatcccttgtatgaggttaactaaaaaaattttgctatgtctgatctacatgtttgcattttgttcaactaaattaatatttgtagattgcaagttttgtttaaaataactttattgagtttttaagtcctgatctgttctaaggtgcctttctcacctcccattgattcagtgattctgaagttcttaatttgcaagtaaaataagtctactagagaggaggaaatcaggcacaaattgaccaattctcatgccatttgcaaagcaaaactgtaaggatgatgaaacctggctaactaaattaatggatcatttcactaaatcagatagaggaaatatcataaatattaacttgtctccctagaagctgagatttttcgccttaaatgacatggttgtgtttttgtaagagaaacttaatctaatctaataatgtgcatttaagtaagcagttctaagtcatgtatgacaatgcaattgtctgtttcctgaaaacaaataaatcgggaacaccatatccatttcaagctatcattaaagtgtaatttcctttgctctcttttactgggattatttgttttaaagtaaaacatt

SEQ ID NO: 23295 - DNA, 2802 bp, Homo sapiens
  source 1..2802: mol_type = unassigned DNA
atgccccgccaccacgcgggaggagaggagggcggcgccgccgggctctgggtgaagagcggcgcagcggcggcggcggcgggcggggggcgcttgggcagcggcatgaaggatgtggagtccggccggggcagggtgctgctgaactcggcagccgccaggggcgacggcctgctactgctgggcacccgcgcggccacgctcggtggcggcggcggtggcctgagggagagccgccggggcaagcagggggcccggatgagcctgctggggaagccgctctcttacacgagtagccagagctgccggcgcaacgtcaagtaccggcgggtgcagaactacctgtacaacgtgctggagagaccccgcggctgggcgttcatctaccacgctttcgtttttctccttgtctttggttgcttgattttgtcagtgttttctaccatccctgagcacacaaaattggcctcaagttgcctcttgatcctggagttcgtgatgattgtcgtctttggtttggagttcatcattcgaatctggtctgcgggttgctgttgtcgatatagaggatggcaaggaagactgaggtttgctcgaaagcccttctgtgttatagataccattgttcttatcgcttcaatagcagttgtttctgcaaaaactcagggtaatatttttgccacgtctgcactcagaagtctccgtttcctacagatcctccgcatggtgcgcatggaccgaaggggaggcacttggaaattactgggttcagtggtttatgctcacagcaaggaattaatcacagcttggtacataggatttttggttcttattttttcgtctttccttgtctatctggtggaaaaggatgccaataaagagttttctacatatgcagatgctctctggtggggcacaattacattgacaactattggctatggagacaaaactcccctaacttggctgggaagattgctttctgcaggctttgcactccttggcatttctttctttgcacttcctgccggcattcttggctcaggttttgcattaaaagtacaagaacaacaccgccagaaacactttgagaaaagaaggaacccagctgccaacctcattcagtgtgtttggcgtagttacgcagctgatgagaaatctgtttccattgcaacctggaagccacacttgaaggccttgcacacctgcagccctaccaagcagaaccagcaaggagaatcccagagttgtcagaagctaagttttaaggagcgagtgcgcatggctagccccaggggccagagtattaagagccgacaagcctcagtaggtgacaggaggtccccaagcaccgacatcacagccgagggcagtcccaccaaagtgcagaagagctggagcttcaacgaccgaacccgcttccggccctcgctgcgcctcaaaagttctcagccaaaaccagtgatagatgctgacacagcccttggcactgatgatgtatatgatgaaaaaggatgccagtgtgatgtatcagtggaagacctcaccccaccacttaaaactgtcattcgagctatcagaattatgaaatttcatgttgcaaaacggaagtttaaggaaacattacgtccatatgatgtaaaagatgtcattgaacaatattctgctggtcatctggacatgttgtgtagaattaaaagccttcaaacacgtgttgatcaaattcttggaaaagggcaaatcacatcagataagaagagccgagagaaaataacagcagaacatgagaccacagacgatctcagtatgctcggtcgggtggtcaaggttgaaaaacaggtacagtccatagaatccaagctggactgcctactagacatctatcaacaggtccttcggaaaggctctgcctcagccctcgctttggcttcattccagatcccaccttttgaatgtgaacagacatctgactatcaaagccctgtggatagcaaagatctttcgggttccgcacaaaacagtggctgcttatccagatcaactagtgccaacatctcgagaggcctgcagttcattctgacgccaaatgagttcagtgcccagactttctacgcgcttagccctactatgcacagtcaagcaacacaggtgccaattagtcaaagcgatggctcagcagtggcagccaccaacaccattgcaaaccaaataaatacggcacccaagccagcagccccaacaactttacagatcccacctcctctcccagccatcaagcatctgcccaggccagaaactctgcaccctaaccctgcaggcttacaggaaagcatttctgacgtcaccacctgccttgttgcctccaaggaaaatgttcaggttgcacagtcaaatctcaccaaggaccgttctatgaggaaaagctttgacatgggaggagaaactctgttgtctgtctgtcccatggtgccgaaggacttgggcaaatctttgtctgtgcaaaacctgatcaggtcgaccgaggaactgaatatacaactttcagggagtgagtcaagtggctccagaggcagccaagatttttaccccaaatggagggaatccaaattgtttataactgatgaagaggtgggtcccgaagagacagagacagacacttttgatgccgcaccgcagcctgccagggaagctgcctttgcatcagactctctaaggactggaaggtcacgatcatctcagagcatttgtaaggcaggagaaagtacagatgccctcagcttgcctcatgtcaaactgaaataa

SEQ ID NO: 23296 - DNA, 1469 bp, Homo sapiens
  source 1..1469: mol_type = unassigned DNA
ctccttgaaacccgccggcgcacatgaggccgctgcccccgccgcaggcgctggcggccccctcgcggtgcccgtggtgatgccatgccccgccaccacgcgggaggagaggagggcggcgccgccgggctctgggtgaagagcggcgcagcggcggcggcggcgggcggggggcgcttgggcagcggcatgaaggatgtggagtccggccggggcagggtgctgctgaactcggcagccgccaggggcgacggcctgctactgctgggcacccgcgcggccacgctcggtggcggcggcggtggcctgagggagagccgccggggcaagcagggggcccggatgagcctgctggggaagccgctctcttacacgagtagccagagctgccggcgcaacgtcaagtaccggcgggtgcagaactacctgtacaacgtgctggagagaccccgcggctgggcgttcatctaccacgctttcgtttttctccttgtctttggttgcttgattttgtcagtgttttctaccatccctgagcacacaaaattggcctcaagttgcctcttgatcctggagttcgtgatgattgtcgtctttggtttggagttcatcattcgaatctggtctgcgggttgctgttgtcgatatagaggatggcaaggaagactgaggtttgctcgaaagcccttctgtgttatagataccattgttcttatcgcttcaatagcagttgtttctgcaaaaactcagggtaatatttttgccacgtctgcactcagaagtctccgtttcctacagatcctccgcatggtgcgcatggaccgaaggggaggcacttggaaattactgggttcagtggtttatgctcacagcaaggaattaatcacagcttggtacataggatttttggttcttattttttcgtctttccttgtctatctggtggaaaaggatgccaataaagagttttctacatatgcagatgctctctggtggggcacaattacattgacaactattggctatggagacaaaactcccctaacttggctgggaagattgctttctgcaggctttgcactccttggcatttctttctttgcacttcctgccggcattcttggctcaggttttgcattaaaagtacaagaacaacaccgccagaaacactttgagaaaagaaggaacccagctgccaacctcattcagtgtgtttggcgtagttacgcagctgatgagaaatctgtttccattgcaacctggaagccacacttgaaggccttgcacacctgcagccctaccaagaaagaacaaggggaagcatcaagcaggtttgtgatttctctcttgctacatgtttgtttataaatctgatacctaccaggtgttttaaatgtgtctcatgtgagtaaaatcgatcaacaaatacaagatgattaaaagtgacctttcacaagattgcctgcaaa

SEQ ID NO: 23297 - DNA, 6345 bp, Homo sapiens
  source 1..6345: mol_type = unassigned DNA
gggcgccccgtcggccgccggcttcctccttgaaacccgccggcgcacatgaggccgctgcccccgccgcaggcgctggcggccccctcgcggtgcccgtggtgatgccatgccccgccaccacgcgggaggagaggagggcggcgccgccgggctctgggtgaagagcggcgcagcggcggcggcggcgggcggggggcgcttgggcagcggcatgaaggatgtggagtccggccggggcagggtgctgctgaactcggcagccgccaggggcgacggcctgctactgctgggcacccgcgcggccacgctcggtggcggcggcggtggcctgagggagagccgccggggcaagcagggggcccggatgagcctgctggggaagccgctctcttacacgagtagccagagctgccggcgcaacgtcaagtaccggcgggtgcagaactacctgtacaacgtgctggagagaccccgcggctgggcgttcatctaccacgctttcgtttttctccttgtctttggttgcttgattttgtcagtgttttctaccatccctgagcacacaaaattggcctcaagttgcctcttgatcctggagttcgtgatgattgtcgtctttggtttggagttcatcattcgaatctggtctgcgggttgctgttgtcgatatagaggatggcaaggaagactgaggtttgctcgaaagcccttctgtgttatagataccattgttcttatcgcttcaatagcagttgtttctgcaaaaactcagggtaatatttttgccacgtctgcactcagaagtctccgtttcctacagatcctccgcatggtgcgcatggaccgaaggggaggcacttggaaattactgggttcagtggtttatgctcacagcaaggaattaatcacagcttggtacataggatttttggttcttattttttcgtctttccttgtctatctggtggaaaaggatgccaataaagagttttctacatatgcagatgctctctggtggggcacaattacattgacaactattggctatggagacaaaactcccctaacttggctgggaagattgctttctgcaggctttgcactccttggcatttctttctttgcacttcctgccggcattcttggctcaggttttgcattaaaagtacaagaacaacaccgccagaaacactttgagaaaagaaggaacccagctgccaacctcattcagtgtgtttggcgtagttacgcagctgatgagaaatctgtttccattgcaacctggaagccacacttgaaggccttgcacacctgcagccctaccaagaaagaacaaggggaagcatcaagcagtcagaagctaagttttaaggagcgagtgcgcatggctagccccaggggccagagtattaagagccgacaagcctcagtaggtgacaggaggtccccaagcaccgacatcacagccgagggcagtcccaccaaagtgcagaagagctggagcttcaacgaccgaacccgcttccggccctcgctgcgcctcaaaagttctcagccaaaaccagtgatagatgctgacacagcccttggcactgatgatgtatatgatgaaaaaggatgccagtgtgatgtatcagtggaagacctcaccccaccacttaaaactgtcattcgagctatcagaattatgaaatttcatgttgcaaaacggaagtttaaggaaacattacgtccatatgatgtaaaagatgtcattgaacaatattctgctggtcatctggacatgttgtgtagaattaaaagccttcaaacacgtgttgatcaaattcttggaaaagggcaaatcacatcagataagaagagccgagagaaaataacagcagaacatgagaccacagacgatctcagtatgctcggtcgggtggtcaaggttgaaaaacaggtacagtccatagaatccaagctggactgcctactagacatctatcaacaggtccttcggaaaggctctgcctcagccctcgctttggcttcattccagatcccaccttttgaatgtgaacagacatctgactatcaaagccctgtggatagcaaagatctttcgggttccgcacaaaacagtggctgcttatccagatcaactagtgccaacatctcgagaggcctgcagttcattctgacgccaaatgagttcagtgcccagactttctacgcgcttagccctactatgcacagtcaagcaacacaggtgccaattagtcaaagcgatggctcagcagtggcagccaccaacaccattgcaaaccaaataaatacggcacccaagccagcagccccaacaactttacagatcccacctcctctcccagccatcaagcatctgcccaggccagaaactctgcaccctaaccctgcaggcttacaggaaagcatttctgacgtcaccacctgccttgttgcctccaaggaaaatgttcaggttgcacagtcaaatctcaccaaggaccgttctatgaggaaaagctttgacatgggaggagaaactctgttgtctgtctgtcccatggtgccgaaggacttgggcaaatctttgtctgtgcaaaacctgatcaggtcgaccgaggaactgaatatacaactttcagggagtgagtcaagtggctccagaggcagccaagatttttaccccaaatggagggaatccaaattgtttataactgatgaagaggtgggtcccgaagagacagagacagacacttttgatgccgcaccgcagcctgccagggaagctgcctttgcatcagactctctaaggactggaaggtcacgatcatctcagagcatttgtaaggcaggagaaagtacagatgccctcagcttgcctcatgtcaaactgaaataagttcttcattttctttccaggcatagcagttctttagccatacatatcattgcatgaactatttcgaaagcccttctaaaaagttgaaattgcaagaatcgggaagaacatgaaaggcagtttataagcccgttaccttttaattgcatgaaaatgcatgtttagggatggctaaaattccaaggtgcatcgacattaacccactcatttagtaatgtaccttgagttaaaaagcctgagaaaccaaacacagctaatgctatggggtgtatgaatatgtcaagtttaggtcatttagaagatttgacactgtattttgaaattatgggagtaaacaccttcaaatttcaggcatttctgctttgtgactaaatacaaactacattttcaagattaggccataatgtatatttaaacacaatggctatcaacagctgctaataaggtatcaactaaagcagaattggggaataatagaaatggctgcttatttcaagatatatttgccaacccattcctattcagtcattttattattaatgtaatttgaatgtcaatttgtgtgcttttggtgatttagcgctgtggcaagcaattttgcacatcattttcatgttgttctttatgacaagaatgttcttcaattagaaaatgtgcaaataatgaaattcagggccagtgaggcaaatagactatctgacatatttgactttatgaaaacatattgcctgatggcagaatcaactttataagtggtcaacttctacacaagcgtatgaaatactggtcagtagaacagccattgtgattggactggtttctctgcaatggcgccaaccccaggcttgccaatactgcctatgtaaagggcaagtgtgagaagctattctcatttcgctgacatacaggtaggactatgggggatgggacatttgagtgggactgagataggaaaggcttgaaaagaacccagaaacaccaccaggaagttggcaaagtaaaagaaaatgacttccccctcaaagggcaatgagagggagagaaacaaaccaaaatagaagaactagactttttagaaaatgagtattgctagggaattcaactacctaatcttcccttattcttatatataagcagagaatttttgcaaggtatttattttttaatatgccctgaatgtcttttgctattatgtgtacattttgcatatgaaagtctaaaacgaaacttcctttactttttatactgtagtgaaaattttctattcttcccaagaatgttgtcccaaatctgaaattactggttcaatttcctgatataaacatttacaattagaagctagatagtactggcagagtctgcaaatcagaacacttaaatatatcatggcagcaaaaagaccaagggaaacaaaatgacaaatgtatttatcagaaagcaagcaatgctgactgcttgttagaaacccatctagctatcttaggtcaccagaacttcagccaacgtaatgacattcaaaaaaaaaggacataagagatagcatttcaattcaattaaaccctagccacaggaggactcaagaaaggaagttgtttccttggcagacataaatgctgcctccagaagtacttctccagcagccaagcagaatgagcagggttatcaagtggatgttcaaaggaagaaggaggccctgaactccaccaatcctccccagccctccccaacaggctttctccatcattgactctcccctgcttttcttcttcattaactccttattcattccctgccagtattttgcttctgaacttcaccaggccttaaccagcctccatccccaggtcaaccagttctccgctttacctaaaatgtgcttctcaaccttttagaaccttgtcccttttgataaacatggaaatttttaaagcttcctcttcgcatcccacttggattctaagacaattagaatcatttagaatctttttggctgctggaaatgtatagaagatagaggctaaattttacacttcagttaagacattgtcaatccttttaagcaattgttttcattttcaaaatacagaatgttagtaaattatgaaaatcaatttttcatcttcattcaacctgaagttgtgattcccccttgcaagaatgttgcatacacacacacacacacacacacacacacacacacacacacacacacacacacacacacacacccctccactgacctaaagccagacacctgccgtgactgggcaggctctctcccattattaacagaggaagaggagggaggcagcaactttcaggtagcactgattcttggacatactctgtcctgggtcaaaccccactggcagcaggaattctgaatgtattggggacccctccttaggcctcgttaagtctcaaacacagtacagctcacccagcattgctgacgactgaagattcagaaacaaaacctacacacagcactgaggtcttaatcatagcaaaatgtgataaaccatgttgtgaaaaacttttatacattgaagccatgaccattttgtgtctatcttactctagcacaaaaattgggggatgttaaaagatagttgtgtggaagctataaggttctgtctgtcgtgttactctctgtggaaatgagaggggtctcccatttacactaagcaaatttccattggtcaattttaatgatgtcttgaagcacaatttagctgagcactgagtagccatatgctttctgagtacaagtgtgtctgccttcttcaacatgtagggttgatcaagctaatacttaattgcaaatatcccttgtatgaggttaactaaaaaaattttgctatgtctgatctacatgtttgcattttgttcaactaaattaatatttgtagattgcaagttttgtttaaaataactttattgagtttttaagtcctgatctgttctaaggtgcctttctcacctcccattgattcagtgattctgaagttcttaatttgcaagtaaaataagtctactagagaggaggaaatcaggcacaaattgaccaattctcatgccatttgcaaagcaaaactgtaaggatgatgaaacctggctaactaaattaatggatcatttcactaaatcagatagaggaaatatcataaatattaacttgtctccctagaagctgagatttttcgccttaaatgacatggttgtgtttttgtaagagaaacttaatctaatctaataatgtgcatttaagtaagcagttctaagtcatgtatgacaatgcaattgtctgtttcctgaaaacaaataaatcgggaacaccatatccatttcaagctatcattaaagtgtaatttcctttgctctcttttactgggattatttgttttaaagtaaaacattaaaaagatgtctataaa

SEQ ID NO: 23298 - DNA, 2829 bp, Homo sapiens
  source 1..2829: mol_type = unassigned DNA
atgccccgccaccacgcgggaggagaggagggcggcgccgccgggctctgggtgaagagcggcgcagcggcggcggcggcgggcggggggcgcttgggcagcggcatgaaggatgtggagtccggccggggcagggtgctgctgaactcggcagccgccaggggcgacggcctgctactgctgggcacccgcgcggccacgctcggtggcggcggcggtggcctgagggagagccgccggggcaagcagggggcccggatgagcctgctggggaagccgctctcttacacgagtagccagagctgccggcgcaacgtcaagtaccggcgggtgcagaactacctgtacaacgtgctggagagaccccgcggctgggcgttcatctaccacgctttcgtttttctccttgtctttggttgcttgattttgtcagtgttttctaccatccctgagcacacaaaattggcctcaagttgcctcttgatcctggagttcgtgatgattgtcgtctttggtttggagttcatcattcgaatctggtctgcgggttgctgttgtcgatatagaggatggcaaggaagactgaggtttgctcgaaagcccttctgtgttatagataccattgttcttatcgcttcaatagcagttgtttctgcaaaaactcagggtaatatttttgccacgtctgcactcagaagtctccgtttcctacagatcctccgcatggtgcgcatggaccgaaggggaggcacttggaaattactgggttcagtggtttatgctcacagcaaggaattaatcacagcttggtacataggatttttggttcttattttttcgtctttccttgtctatctggtggaaaaggatgccaataaagagttttctacatatgcagatgctctctggtggggcacaattacattgacaactattggctatggagacaaaactcccctaacttggctgggaagattgctttctgcaggctttgcactccttggcatttctttctttgcacttcctgccggcattcttggctcaggttttgcattaaaagtacaagaacaacaccgccagaaacactttgagaaaagaaggaacccagctgccaacctcattcagtgtgtttggcgtagttacgcagctgatgagaaatctgtttccattgcaacctggaagccacacttgaaggccttgcacacctgcagccctaccaataagttctgtagtaataagcagaagctcttcagaatgtacacctcacggaagcagagtcagaagctaagttttaaggagcgagtgcgcatggctagccccaggggccagagtattaagagccgacaagcctcagtaggtgacaggaggtccccaagcaccgacatcacagccgagggcagtcccaccaaagtgcagaagagctggagcttcaacgaccgaacccgcttccggccctcgctgcgcctcaaaagttctcagccaaaaccagtgatagatgctgacacagcccttggcactgatgatgtatatgatgaaaaaggatgccagtgtgatgtatcagtggaagacctcaccccaccacttaaaactgtcattcgagctatcagaattatgaaatttcatgttgcaaaacggaagtttaaggaaacattacgtccatatgatgtaaaagatgtcattgaacaatattctgctggtcatctggacatgttgtgtagaattaaaagccttcaaacacgtgttgatcaaattcttggaaaagggcaaatcacatcagataagaagagccgagagaaaataacagcagaacatgagaccacagacgatctcagtatgctcggtcgggtggtcaaggttgaaaaacaggtacagtccatagaatccaagctggactgcctactagacatctatcaacaggtccttcggaaaggctctgcctcagccctcgctttggcttcattccagatcccaccttttgaatgtgaacagacatctgactatcaaagccctgtggatagcaaagatctttcgggttccgcacaaaacagtggctgcttatccagatcaactagtgccaacatctcgagaggcctgcagttcattctgacgccaaatgagttcagtgcccagactttctacgcgcttagccctactatgcacagtcaagcaacacaggtgccaattagtcaaagcgatggctcagcagtggcagccaccaacaccattgcaaaccaaataaatacggcacccaagccagcagccccaacaactttacagatcccacctcctctcccagccatcaagcatctgcccaggccagaaactctgcaccctaaccctgcaggcttacaggaaagcatttctgacgtcaccacctgccttgttgcctccaaggaaaatgttcaggttgcacagtcaaatctcaccaaggaccgttctatgaggaaaagctttgacatgggaggagaaactctgttgtctgtctgtcccatggtgccgaaggacttgggcaaatctttgtctgtgcaaaacctgatcaggtcgaccgaggaactgaatatacaactttcagggagtgagtcaagtggctccagaggcagccaagatttttaccccaaatggagggaatccaaattgtttataactgatgaagaggtgggtcccgaagagacagagacagacacttttgatgccgcaccgcagcctgccagggaagctgcctttgcatcagactctctaaggactggaaggtcacgatcatctcagagcatttgtaaggcaggagaaagtacagatgccctcagcttgcctcatgtcaaactgaaataa

SEQ ID NO: 23299 - DNA, 2772 bp, Homo sapiens
  source 1..2772: mol_type = unassigned DNA
atgccccgccaccacgcgggaggagaggagggcggcgccgccgggctctgggtgaagagcggcgcagcggcggcggcggcgggcggggggcgcttgggcagcggcatgaaggatgtggagtccggccggggcagggtgctgctgaactcggcagccgccaggggcgacggcctgctactgctgggcacccgcgcggccacgctcggtggcggcggcggtggcctgagggagagccgccggggcaagcagggggcccggatgagcctgctggggaagccgctctcttacacgagtagccagagctgccggcgcaacgtcaagtaccggcgggtgcagaactacctgtacaacgtgctggagagaccccgcggctgggcgttcatctaccacgctttcgtttttctccttgtctttggttgcttgattttgtcagtgttttctaccatccctgagcacacaaaattggcctcaagttgcctcttgatcctggagttcgtgatgattgtcgtctttggtttggagttcatcattcgaatctggtctgcgggttgctgttgtcgatatagaggatggcaaggaagactgaggtttgctcgaaagcccttctgtgttatagataccattgttcttatcgcttcaatagcagttgtttctgcaaaaactcagggtaatatttttgccacgtctgcactcagaagtctccgtttcctacagatcctccgcatggtgcgcatggaccgaaggggaggcacttggaaattactgggttcagtggtttatgctcacagcaaggaattaatcacagcttggtacataggatttttggttcttattttttcgtctttccttgtctatctggtggaaaaggatgccaataaagagttttctacatatgcagatgctctctggtggggcacaattacattgacaactattggctatggagacaaaactcccctaacttggctgggaagattgctttctgcaggctttgcactccttggcatttctttctttgcacttcctgccggcattcttggctcaggttttgcattaaaagtacaagaacaacaccgccagaaacactttgagaaaagaaggaacccagctgccaacctcattcagtgtgtttggcgtagttacgcagctgatgagaaatctgtttccattgcaacctggaagccacacttgaaggccttgcacacctgcagccctaccaatcagaagctaagttttaaggagcgagtgcgcatggctagccccaggggccagagtattaagagccgacaagcctcagtaggtgacaggaggtccccaagcaccgacatcacagccgagggcagtcccaccaaagtgcagaagagctggagcttcaacgaccgaacccgcttccggccctcgctgcgcctcaaaagttctcagccaaaaccagtgatagatgctgacacagcccttggcactgatgatgtatatgatgaaaaaggatgccagtgtgatgtatcagtggaagacctcaccccaccacttaaaactgtcattcgagctatcagaattatgaaatttcatgttgcaaaacggaagtttaaggaaacattacgtccatatgatgtaaaagatgtcattgaacaatattctgctggtcatctggacatgttgtgtagaattaaaagccttcaaacacgtgttgatcaaattcttggaaaagggcaaatcacatcagataagaagagccgagagaaaataacagcagaacatgagaccacagacgatctcagtatgctcggtcgggtggtcaaggttgaaaaacaggtacagtccatagaatccaagctggactgcctactagacatctatcaacaggtccttcggaaaggctctgcctcagccctcgctttggcttcattccagatcccaccttttgaatgtgaacagacatctgactatcaaagccctgtggatagcaaagatctttcgggttccgcacaaaacagtggctgcttatccagatcaactagtgccaacatctcgagaggcctgcagttcattctgacgccaaatgagttcagtgcccagactttctacgcgcttagccctactatgcacagtcaagcaacacaggtgccaattagtcaaagcgatggctcagcagtggcagccaccaacaccattgcaaaccaaataaatacggcacccaagccagcagccccaacaactttacagatcccacctcctctcccagccatcaagcatctgcccaggccagaaactctgcaccctaaccctgcaggcttacaggaaagcatttctgacgtcaccacctgccttgttgcctccaaggaaaatgttcaggttgcacagtcaaatctcaccaaggaccgttctatgaggaaaagctttgacatgggaggagaaactctgttgtctgtctgtcccatggtgccgaaggacttgggcaaatctttgtctgtgcaaaacctgatcaggtcgaccgaggaactgaatatacaactttcagggagtgagtcaagtggctccagaggcagccaagatttttaccccaaatggagggaatccaaattgtttataactgatgaagaggtgggtcccgaagagacagagacagacacttttgatgccgcaccgcagcctgccagggaagctgcctttgcatcagactctctaaggactggaaggtcacgatcatctcagagcatttgtaaggcaggagaaagtacagatgccctcagcttgcctcatgtcaaactgaaataa

SEQ ID NO: 23300 - DNA, 2469 bp, Homo sapiens
  source 1..2469: mol_type = unassigned DNA
atgccccgccaccacgcgggaggagaggagggcggcgccgccgggctctgggtgaagagcggcgcagcggcggcggcggcgggcggggggcgcttgggcagcggcatgaaggatgtggagtccggccggggcagggtgctgctgaactcggcagccgccaggggcgacggcctgctactgctgggcacccgcgcggccacgctcggtggcggcggcggtggcctgagggagagccgccggggcaagcagggggcccggatgagcctgctggggaagccgctctcttacacgagtagccagagctgccggcgcaacgtcaagtaccggcgggtgcagaactacctgtacaacgtgctggagagaccccgcggctgggcgttcatctaccacgctttcgtttttctccttgtctttggttgcttgattttgtcagtgttttctaccatccctgagcacacaaaattggcctcaagttgcctcttgatcctggagttcgtgatgattgtcgtctttggtttggagttcatcattcgaatctggtctgcgggttgctgttgtcgatatagaggatggcaaggaagactgaggtttgctcgaaagcccttctgtgttatagataccattgttcttatcgcttcaatagcagttgtttctgcaaaaactcagggtaatatttttgccacgtctgcactcagaagtctccgtttcctacagatcctccgcatggtgcgcatggaccgaaggggaggcacttggaaattactgggttcagtggtttatgctcacagcaaggaattaatcacagcttggtacataggatttttggttcttattttttcgtctttccttgtctatctggtggaaaaggatgccaataaagagttttctacatatgcagatgctctctggtggggcacaattacattgacaactattggctatggagacaaaactcccctaacttggctgggaagattgctttctgcaggctttgcactccttggcatttctttctttgcacttcctgccggcattcttggctcaggttttgcattaaaagtacaagaacaacaccgccagaaacactttgagaaaagaaggaacccagctgccaacctcattcagtgtgtttggcgtagttacgcagctgatgagaaatctgtttccattgcaacctggaagccacacttgaaggccttgcacacctgcagccctaccaagaaagaacaaggggaagcatcaagcagaattatgaaatttcatgttgcaaaacggaagtttaaggaaacattacgtccatatgatgtaaaagatgtcattgaacaatattctgctggtcatctggacatgttgtgtagaattaaaagccttcaaacacgtgttgatcaaattcttggaaaagggcaaatcacatcagataagaagagccgagagaaaataacagcagaacatgagaccacagacgatctcagtatgctcggtcgggtggtcaaggttgaaaaacaggtacagtccatagaatccaagctggactgcctactagacatctatcaacaggtccttcggaaaggctctgcctcagccctcgctttggcttcattccagatcccaccttttgaatgtgaacagacatctgactatcaaagccctgtggatagcaaagatctttcgggttccgcacaaaacagtggctgcttatccagatcaactagtgccaacatctcgagaggcctgcagttcattctgacgccaaatgagttcagtgcccagactttctacgcgcttagccctactatgcacagtcaagcaacacaggtgccaattagtcaaagcgatggctcagcagtggcagccaccaacaccattgcaaaccaaataaatacggcacccaagccagcagccccaacaactttacagatcccacctcctctcccagccatcaagcatctgcccaggccagaaactctgcaccctaaccctgcaggcttacaggaaagcatttctgacgtcaccacctgccttgttgcctccaaggaaaatgttcaggttgcacagtcaaatctcaccaaggaccgttctatgaggaaaagctttgacatgggaggagaaactctgttgtctgtctgtcccatggtgccgaaggacttgggcaaatctttgtctgtgcaaaacctgatcaggtcgaccgaggaactgaatatacaactttcagggagtgagtcaagtggctccagaggcagccaagatttttaccccaaatggagggaatccaaattgtttataactgatgaagaggtgggtcccgaagagacagagacagacacttttgatgccgcaccgcagcctgccagggaagctgcctttgcatcagactctctaaggactggaaggtcacgatcatctcagagcatttgtaaggcaggagaaagtacagatgccctcagcttgcctcatgtcaaactgaaataa

SEQ ID NO: 23301 - DNA, 6623 bp, Homo sapiens
  source 1..6623: mol_type = unassigned DNA
actctatccccgggggcagtttgggaaggagggagtggtagtcgcgggaatgagggagcaagagaaaccctctcaaagtgacgccccaaacaggtccggatttagaattcgaagctaaaggctgttagaaattgggactcctcggcctcctctgcagcccctcctttcccgccccgaagcccgggcggtttgctggctgcctgcttccccgcccccggctcagaggtctctggctggcgggcgccccgtcggccgccggcttcctccttgaaacccgccggcgcacatgaggccgctgcccccgccgcaggcgctggcggccccctcgcggtgcccgtggtgatgccatgccccgccaccacgcgggaggagaggagggcggcgccgccgggctctgggtgaagagcggcgcagcggcggcggcggcgggcggggggcgcttgggcagcggcatgaaggatgtggagtccggccggggcagggtgctgctgaactcggcagccgccaggggcgacggcctgctactgctgggcacccgcgcggccacgctcggtggcggcggcggtggcctgagggagagccgccggggcaagcagggggcccggatgagcctgctggggaagccgctctcttacacgagtagccagagctgccggcgcaacgtcaagtaccggcgggtgcagaactacctgtacaacgtgctggagagaccccgcggctgggcgttcatctaccacgctttcgtttttctccctgtctttggttgcttgattttgtcagtgttttctaccatccctgagcacacaaaattggcctcaagttgcctcttgatcctggagttcgtgatgattgtcgtctttggtttggagttcatcattcgaatctggtctgcgggttgctgttgtcgatatagaggatggcaaggaagactgaggtttgctcgaaagcccttctgtgttatagataccattgttcttatcgcttcaatagcagttgtttctgcaaaaactcagggtaatatttttgccacgtctgcactcagaagtctccgtttcctacagatcctccgcatggtgcgcatggaccgaaggggaggcacttggaaattactgggttcagtggtttatgctcacagcaaggaattaatcacagcttggtacataggatttttggttcttattttttcgtctttccttgtctatctggtggaaaaggatgccaataaagagttttctacatatgcagatgctctctggtggggcacaattacattgacaactattggctatggagacaaaactcccctaacttggctgggaagattgctttctgcaggctttgcactccttggcatttctttctttgcacttcctgccggcattcttggctcaggttttgcattaaaagtacaagaacaacaccgccagaaacactttgagaaaagaaggaacccagctgccaacctcattcagtgtgtttggcgtagttacgcagctgatgagaaatctgtttccattgcaacctggaagccacacttgaaggccttgcacacctgcagccctaccaagaaagaacaaggggaagcatcaagcagtaagttctgtagtaataagcagaagctcttcagaatgtacacctcacggaagcagagtcagaagctaagttttaaggagcgagtgcgcatggctagccccaggggccagagtattaagagccgacaagcctcagtaggtgacaggaggtccccaagcaccgacatcacagccgagggcagtcccaccaaagtgcagaagagctggagcttcaacgaccgaacccgcttccggccctcgctgcgcctcaaaagttctcagccaaaaccagtgatagatgctgacacagcccttggcactgatgatgtatatgatgaaaaaggatgccagtgtgatgtatcagtggaagacctcaccccaccacttaaaactgtcattcgagctatcagaattatgaaatttcatgttgcaaaacggaagtttaaggaaacattacgtccatatgatgtaaaagatgtcattgaacaatattctgctggtcatctggacatgttgtgtagaattaaaagccttcaaacacgtgttgatcaaattcttggaaaagggcaaatcacatcagataagaagagccgagagaaaataacagcagaacatgagaccacagacgatctcagtatgctcggtcgggtggtcaaggttgaaaaacaggtacagtccatagaatccaagctggactgcctactagacatctatcaacaggtccttcggaaaggctctgcctcagccctcgctttggcttcattccagatcccaccttttgaatgtgaacagacatctgactatcaaagccctgtggatagcaaagatctttcgggttccgcacaaaacagtggctgcttatccagatcaactagtgccaacatctcgagaggcctgcagttcattctgacgccaaatgagttcagtgcccagactttctacgcgcttagccctactatgcacagtcaagcaacacaggtgccaattagtcaaagcgatggctcagcagtggcagccaccaacaccattgcaaaccaaataaatacggcacccaagccagcagccccaacaactttacagatcccacctcctctcccagccatcaagcatctgcccaggccagaaactctgcaccctaaccctgcaggcttacaggaaagcatttctgacgtcaccacctgccttgttgcctccaaggaaaatgttcaggttgcacagtcaaatctcaccaaggaccgttctatgaggaaaagctttgacatgggaggagaaactctgttgtctgtctgtcccatggtgccgaaggacttgggcaaatctttgtctgtgcaaaacctgatcaggtcgaccgaggaactgaatatacaactttcagggagtgagtcaagtggctccagaggcagccaagatttttaccccaaatggagggaatccaaattgtttataactgatgaagaggtgggtcccgaagagacagagacagacacttttgatgccgcaccgcagcctgccagggaagctgcctttgcatcagactctctaaggactggaaggtcacgatcatctcagagcatttgtaaggcaggagaaagtacagatgccctcagcttgcctcatgtcaaactgaaataagttcttcattttctttccaggcatagcagttctttagccatacatatcattgcatgaactatttcgaaagcccttctaaaaagttgaaattgcaagaatcgggaagaacatgaaaggcagtttataagcccgttaccttttaattgcatgaaaatgcatgtttagggatggctaaaattccaaggtgcatcgacattaacccactcatttagtaatgtaccttgagttaaaaagcctgagaaaccaaacacagctaatgctatggggtgtatgaatatgtcaagtttaggtcatttagaagatttgacactgtattttgaaattatgggagtaaacaccttcaaatttcaggcatttctgctttgtgactaaatacaaactacattttcaagattaggccataatgtatatttaaacacaatggctatcaacagctgctaataaggtatcaactaaagcagaattggggaataatagaaatggctgcttatttcaagatatatttgccaacccattcctattcagtcattttattattaatgtaatttgaatgtcaatttgtgtgcttttggtgatttagcgctgtggcaagcaattttgcacatcattttcatgttgttctttatgacaagaatgttcttcaattagaaaatgtgcaaataatgaaattcagggccagtgaggcaaatagactatctgacatatttgactttatgaaaacatattgcctgatggcagaatcaactttataagtggtcaacttctacacaagcgtatgaaatactggtcagtagaacagccattgtgattggactggtttctctgcaatggcgccaaccccaggcttgccaatactgcctatgtaaagggcaagtgtgagaagctattctcatttcgctgacatacaggtaggactatgggggatgggacatttgagtgggactgagataggaaaggcttgaaaagaacccagaaacaccaccaggaagttggcaaagtaaaagaaaatgacttccccctcaaagggcaatgagagggagagaaacaaaccaaaatagaagaactagactttttagaaaatgagtattgctagggaattcaactacctaatcttcccttattcttatatataagcagagaatttttgcaaggtatttattttttaatatgccctgaatgtcttttgctattatgtgtacattttgcatatgaaagtctaaaacgaaacttcctttactttttatactgtagtgaaaattttctattcttcccaagaatgttgtcccaaatctgaaattactggttcaatttcctgatataaacatttacaattagaagctagatagtactggcagagtctgcaaatcagaacacttaaatatatcatggcagcaaaaagaccaagggaaacaaaatgacaaatgtatttatcagaaagcaagcaatgctgactgcttgttagaaacccatctagctatcttaggtcaccagaacttcagccaacgtaatgacattcaaaaaaaaaggacataagagatagcatttcaattcaattaaaccctagccacaggaggactcaagaaaggaagttgtttccttggcagacataaatgctgcctccagaagtacttctccagcagccaagcagaatgagcagggttatcaagtggatgttcaaaggaagaaggaggccctgaactccaccaatcctccccagccctccccaacaggctttctccatcattgactctcccctgcttttcttcttcattaactccttattcattccctgccagtattttgcttctgaacttcaccaggccttaaccagcctccatccccaggtcaaccagttctccgctttacctaaaatgtgcttctcaaccttttagaaccttgtcccttttgataaacatggaaatttttaaagcttcctcttcgcatcccacttggattctaagacaattagaatcatttagaatctttttggctgctggaaatgtatagaagatagaggctaaattttacacttcagttaagacattgtcaatccttttaagcaattgttttcattttcaaaatacagaatgttagtaaattatgaaaatcaatttttcatcttcattcaacctgaagttgtgattcccccttgcaagaatgttgcatacacacacacacacacacacacacacacacacacacacacacacacacacacacacacacacccctccactgacctaaagccagacacctgccgtgactgggcaggctctctcccattattaacagaggaagaggagggaggcagcaactttcaggtagcactgattcttggacatactctgtcctgggtcaaaccccactggcagcaggaattctgaatgtattggggacccctccttaggcctcgttaagtctcaaacacagtacagctcacccagcattgctgacgactgaagattcagaaacaaaacctacacacagcactgaggtcttaatcatagcaaaatgtgataaaccatgttgtgaaaaacttttatacattgaagccatgaccattttgtgtctatcttactctagcacaaaaattgggggatgttaaaagatagttgtgtggaagctataaggttctgtctgtcgtgttactctctgtggaaatgagaggggtctcccatttacactaagcaaatttccattggtcaattttaatgatgtcttgaagcacaatttagctgagcactgagtagccatatgctttctgagtacaagtgtgtctgccttcttcaacatgtagggttgatcaagctaatacttaattgcaaatatcccttgtatgaggttaactaaaaaaattttgctatgtctgatctacatgtttgcattttgttcaactaaattaatatttgtagattgcaagttttgtttaaaataactttattgagtttttaagtcctgatctgttctaaggtgcctttctcacctcccattgattcagtgattctgaagttcttaatttgcaagtaaaataagtctactagagaggaggaaatcaggcacaaattgaccaattctcatgccatttgcaaagcaaaactgtaaggatgatgaaacctggctaactaaattaatggatcatttcactaaatcagatagaggaaatatcataaatattaacttgtctccctagaagctgagatttttcgccttaaatgacatggttgtgtttttgtaagagaaacttaatctaatctaataatgtgcatttaagtaagcagttctaagtcatgtatgacaatgcaattgtctgtttcctgaaaacaaataaatcgggaacaccatatccatttcaagctatcattaaagtgtaatttcctttgctctcttttactgggattatttgttttaaagtaaaacatt

SEQ ID NO: 23302 - DNA, 7318 bp, Homo sapiens
  source 1..7318: mol_type = unassigned DNA
gccgtcgggatggaggtgagaagacggccgtgacgcgcgcccgcggggccccctgcacccccagcagcccacagcgctccctgcccccctcccccgcagcagcgggccttgccgtcgagtgacagcggcctgggggggcagggggggcgggggcggccggatcagcgatgccggcgggcatgacgaagcatggctcccgctccaccagctcgctgccgcccgagcccatggagatcgtgcgcagcaaggcgtgctctcggcgggtccgcctcaacgtcggggggctggcgcacgaggtactctggcgtaccctggaccgcctgccccgcacgcggctgggcaagctccgcgactgcaacacgcacgactcgctgctcgaggtgtgcgatgactacagcctcgacgacaacgagtacttctttgaccgccacccgggcgccttcacctccatcctcaacttctaccgcactgggcgactgcacatgatggaggagatgtgcgcgctcagcttcagccaagagctcgactactggggcatcgacgagatctacctggagtcctgctgccaggcccgctaccaccagaagaaagagcagatgaacgaggagctcaagcgtgaggccgagaccctacgggagcgggaaggcgaggagttcgataacacgtgctgcgcagagaagaggaaaaaactctgggacctactggagaagcccaattcctctgtggctgccaagatccttgccataatttccatcatgttcatcgtcctctccaccattgccctgtccctcaacacgctgcctgagctacagagcctcgatgagttcggccagtccacagacaacccccagctggcccacgtggaggccgtgtgcatcgcatggttcaccatggagtacctgctgaggttcctctcctcgcccaagaagtggaagttcttcaagggcccactcaatgccattgacttgttggccattctgccatactatgtcaccattttcctcaccgaatccaacaagagcgtgctgcaattccagaatgtccgccgcgtggtccagatcttccgcatcatgcgaattctccgcatccttaagcttgcacgccactccactggcctccagtctctgggcttcactttgcggaggagctacaatgagttgggcttgctcatcctcttccttgccatgggcattatgatcttctccagccttgtcttctttgctgagaaggatgaggacgacaccaagttcaaaagcatcccagcctctttctggtgggccaccatcaccatgactactgttgggtatggagacatctaccccaagactctcctggggaaaattgttgggggactctgctgcattgcaggagtcctggtgattgctcttcccatccccatcatcgtcaataacttctctgagttctataaggagcagaagagacaggagaaagcaatcaaacggcgagaggctctggagagagccaagaggaatggcagcatcgtatccatgaacatgaaggatgcttttgcccggagcattgagatgatggacattgtggttgagaaaaatggggagaatatgggtaagaaagacaaagtacaagataaccacttgtctcctaacaaatggaaatggacaaagaggacactgtctgaaaccagctcaagtaagtcctttgaaaccaaggaacagggatcccctgaaaaagccagatcgtcttctagtcctcagcacctgaacgttcagcagttggaagacatgtacaataagatggccaagacccaatcccaacccatcctcaataccaaggagtcagcagcacagagcaaaccaaaggaagaacttgaaatggagagtatccccagccccgtagcccctctgcccactcgcacagaaggggtcattgacatgcgaagtatgtcaagcattgatagtttcattagctgtgccacagacttccctgaggccaccagattctcccacagccctttgacatcactccccagcaagactgggggcagcacagccccagaagtgggctggcggggagctctgggtgccagtggtggtaggtttgtggaggccaaccccagccctgatgccagccagcactctagtttcttcatcgagagccccaagagttccatgaaaactaacaaccctttgaagctccgagcacttaaagtcaacttcatggagggtgaccccagtccactcctccccgttctagggatgtaccatgaccctctcaggaaccgggggagtgctgcggctgctgtcgctggactggagtgtgccacgcttttggacaaggctgtgctgagcccagagtcctccatctacaccacagcaagtgctaagacacccccccggtctcctgagaaacacacagcaatagcgttcaactttgaggcgggtgtccaccagtacattgacgcagacacagatgatgagggacagctgctctacagtgtggactccagcccccccaaaagcctccctgggagcaccagtccgaagttcagcacggggacaagatcggagaaaaaccactttgaaagctcccctttacccacctcccctaagttcttaaggcagaactgtatttactccacagaagcattgactggaaaaggccccagtggtcaggaaaagtgcaaacttgagaaccacatctcccctgacgtccgtgtgttgccagggggaggagcccatggaagcacacgagatcagagcatctgaactgccctgccttggaggagagacttttgggtgaggtccaaagaggagagctgttcagcttacctgccacagagcttttctgcatgaactctggaacagaaaggccctgtaaagccctcagagagaagagagactccagagaaggctccctaagaccttgagagccatgacaggtccatcagcatgaagttggccaagccatagggcacagcacctccttgtaacaactctatagccctctttgggagatgacatgagtggaactcacagccaccactaccaccactttagacaggaccgaggccacatactccccattctctcgtggctttccatctcagcctcggagggcaacattgacagtcctcctggcttcagctagagaaggatgctggaacaagcggctggtgttgaaagagtgggttgaccaatttggtattgaatgttgcccagccacccctaggaacacctgtccatcacctcctggatggattccactgttagacagctacagggaatgattggtcatggggaagtctctgcgccataagccacgatcccagcgcaaaacccttactcaaatgtcttcattgacttcggtatttcatagtacctgagattttattttgagataccatcagggtgagttgcaccacttgtactcaattctaattgccccctggcaatctgggaagggttcagaaggtgggcacccagccaacagcatgaactcagagcattgttttagggttggaggaggaacacgctttctttacatcactagtgtagactcaaaagatatgcaagtgtcaaatatgcaaaagaaatagtttattcaaagagactgtgtgttactgaagaacagcataaaaatatgatttttttacttgcaaaaatgaaaggaaaaaaataccacgcattgaaatgcccagttcagactgaataattcctgctgcagcaaggaaagtacctactataatagaaattctgttttgttttctgtggttttcaagttaaaaaaaaaaaagttaaaataaaaagcactttatgtttttcaaaaataggttctgccagggacagtgtcaacatcttgcactttaaaataagcactatttcccatagcccaattgttgggactgtagttggattgttgctacctgcccatttctggccagcatgggtaatattgtgctggtattactgtctgccatatcaaagtctgtgggctccttccctgcccctctgaaaccttcccttaaccctcatgggtcaggaggggttcttgccccttgggtggggcctctcatgaagtcaagtatacaggagacatgcacatctcaaaaggacacagtgacagttggacattgggtgttttactctgttctctttcttgtcaaccagctattggtttttcagtgtcactgtctgtactaaaagctcaactctccttcctgcagccatcgatgcagccagtacagacaaaagcaataagtatttgtgtgcatcctgagtggttctggtgtatttcttggtgttggttttcctgtcctcgtttgatgacctggcattgtcctgcctgcttttagtccaacagcatggtgttgttggccattcctcagtacagtggcattaggttgaaccactgatgaatacaatgctatagtgttggctcacctgtcagtaaagatgacatgttattggtctgcctgtctgtagtacaatggaacaatgttgttctcttaatgtaatgttgatggatgatgtcccaagtacaatagtgtagttctgtctatcctcaatacagtaacaggcatatgtcttcccagtggaagaaagatatggtattggttcacctagtcttaagtctcaatatcatctgttgctggtctgcctgttagtacaatggcatgatccacctctcagtacacaaatatcatggagctgttctgcctgctcttcatacataaggcataaggttgagccacctgccacacatatgatgagatgggatcattccaccacccttaaaaatatgtcttctctgctgtatacaaacccaattcataacacttctcagcatctccagagactgtagatccccccaagagggtgcagtcctgttctttgccgcattaacagagaaaacgagaacgtcactcttcctaggtatcttcagagtattcgcgcagcaactgcaaagggacttaggggcagggagagtgtgaggtcatcccgtgccaggcagaggaagcagcactcccaaaacactttgctgaacacgcagtctgagctgggggcctcttgaggaatgactgtgggacagttctccgccgaccatctcacatgtctcttctttgttttcatcaccattaatgtccaccatcagcacaaatgtgaaaattcagggaaaaaaacaaatgctttttgataaaagtaaatagttgtgatttccaattcagatatttttagagctgatgctatctgtaaaaaataataataataataatatagtctattttacatatcaggaaagtgaacatgtttcaatatagccatatatattgagaaggaacttaccaccccttcttccaatcgaggcatttcatttgttggttgaagcagatgagaactgtacagattgaaaatgatttgtttttttttttttttaaaaaaaacgaaaaccaattggtgcaactctccttgtaaccaaaggccctttctgccttctgtggtcatgtaggacctggcccttccttccttgtgtattttgtccaaccgtaaagtagcattttattgagtcacttttgaaggacgaattcagaagtatcattaagaacctaccttttcaggcttcatagccagagtcctatagagttcttatagaaacagaataattgaaattcagcatatactatgcttagaaagtattttgtttgggtttgattgggtttttttttcttttacttgtgtgtgtatgtactgggggagtatagcttttattctgtgctcaattcgaaagagagtattataagttttcccagcccatccacccgctaaaaaagaacatatccaaattttaatatgtatacacccaacctgtacctatgtacgtgaatatacatgcactgggaaatctacttaagagtcttcactgagaagttcactcgatagaaaggtcttgatagagaagagaagaggaaagcaatggtctgaaggcaaatcctgctttaacttggtggtccatttcccattcattcctgaaccaatgagagcagaaagaaacaagtcaacccaaacaagcaaactaggggctggacgcggcgaatggatgctggtcagtttggcaaattcactgaaactcatcaagaacccagctgaacttgcattccaacttccacaattatctgaaagggctagggaccaggtagccatgtgtcccaatcacacgggggagagtctgccaccggcggtgagagaggtggggaagctttggaggagacagtatattcacctttttatctttgggtaaaagaaaccaacaggactttggtgcagtagatttctcagtgccttctttaggaattctatcttaagcacacttcaaggggaaagaaaaaaggaggagagaacatttgttcccgtgaagtccctttctccaaaggactggggatcaagaaggaagaagagtaagaaggaaaaacaacaaaatcctgaggaggccatttcttttaacccacccagcttgcccctgaaaactgctggtgatacaaactttttcaaactgacttccagcttctccatgtgtcttggtaactgtagcctcgtctctgccctttctcctaataagatccatgtttctaaggagaaaaacaaaacagtattctcttctgtaaaactgtaatgtattgttgatatttgtaactattgtatatttctgtcttgctccagtcccagctggagtgtctagttccatggacaaggggatatttaaaattcaccacggacaagagccactaaagccaggtctctatcgctaatctctctcctattcttatttctctaccaactaatctcaagtaacaataccccaggctttttttcagcctcaattcaagtaactttgaatcaaaagagagcaaggcaaaaagcctccggacatgcttctttgggaaaggactttttctgtagctgcagagtgggcaggagggagaaggggctcccctgagaccccggcaggacaatggaaagcttccagccccgagctgatgtttcctcacctatcactgcttataggacagcatccaaatgctttcatgtcactcagcccaggcaacccaaaccagtcctggctacacccagaaataagagttacctctgcattttctgttgccatttttctggctctagaagtatctgatgcgcgactatgtcatagaatgtccacgcatctcagagtagtctatttttctgttcagataaaatatatatatatatgtatttttagcaaatttataatagggcaattgagtctaatttcttcttttgtaatacagaacaatatcttaggagtttca

SEQ ID NO: 23303 - DNA, 3457 bp, Homo sapiens
  source 1..3457: mol_type = unassigned DNA
cgggatggaggtgagaagacggccgtgacgcggctgggcaagctccgcgactgcaacacgcacgactcgctgctcgaggtgtgcgatgactacagcctcgacgacaacgagtacttctttgaccgccacccgggcgccttcacctccatcctcaacttctaccgcactgggcgactgcacatgatggaggagatgtgcgcgctcagcttcagccaagagctcgactactggggcatcgacgagatctacctggagtcctgctgccaggcccgctaccaccagaagaaagagcagatgaacgaggagctcaagcgtgaggccgagaccctacgggagcgggaaggcgaggagttcgataacacgtgctgcgcagagaagaggaaaaaactctgggacctactggagaagcccaattcctctgtggctgccaagatccttgccataatttccatcatgttcatcgtcctctccaccattgccctgtccctcaacacgctgcctgagctacagagcctcgatgagttcggccagtccacagacaacccccagctggcccacgtggaggccgtgtgcatcgcatggttcaccatggagtacctgctgaggttcctctcctcgcccaagaagtggaagttcttcaagggcccactcaatgccattgacttgttggccattctgccatactatgtcaccattttcctcaccgaatccaacaagagcgtgctgcaattccagaatgtccgccgcgtggtccagatcttccgcatcatgcgaattctccgcatccttaagcttgcacgccactccactggcctccagtctctgggcttcactttgcggaggagctacaatgagttgggcttgctcatcctcttccttgccatgggcattatgatcttctccagccttgtcttctttgctgagaaggatgaggacgacaccaagttcaaaagcatcccagcctctttctggtgggccaccatcaccatgactactgttgggtatggagacatctaccccaagactctcctggggaaaattgttgggggactctgctgcattgcaggagtcctggtgattgctcttcccatccccatcatcgtcaataacttctctgagttctataaggagcagaagagacaggagaaagcaatcaaacggcgagaggctctggagagagccaagaggaatggcagcatcgtatccatgaacatgaaggatgcttttgcccggagcattgagatgatggacattgtggttgagaaaaatggggagaatatgggtaagaaagacaaagtacaagataaccacttgtctcctaacaaatggaaatggacaaagaggacactgtctgaaaccagctcaagtaagtcctttgaaaccaaggaacagggatcccctgaaaaagccagatcgtcttctagtcctcagcacctgaacgttcagcagttggaagacatgtacaataagatggccaagacccaatcccaacccatcctcaataccaaggagtcagcagcacagagcaaaccaaaggaagaacttgaaatggagagtatccccagccccgtagcccctctgcccactcgcacagaaggggtcattgacatgcgaagtatgtcaagcattgatagtttcattagctgtgccacagacttccctgaggccaccagattctcccacagccctttgacatcactccccagcaagactgggggcagcacagccccagaagtgggctggcggggagctctgggtgccagtggtggtaggtttgtggaggccaaccccagccctgatgccagccagcactctagtttcttcatcgagagccccaagagttccatgaaaactaacaaccctttgaagctccgagcacttaaagtcaacttcatggagggtgaccccagtccactcctccccgttctagggatgtaccatgaccctctcaggaaccgggggagtgctgcggctgctgtcgctggactggagtgtgccacgcttttggacaaggctgtgctgagcccagagtcctccatctacaccacagcaagtgctaagacacccccccggtctcctgagaaacacacagcaatagcgttcaactttgaggcgggtgtccaccagtacattgacgcagacacagatgatgagggacagctgctctacagtgtggactccagcccccccaaaagcctccctgggagcaccagtccgaagttcagcacggggacaagatcggagaaaaaccactttgaaagctcccctttacccacctcccctaagttcttaaggcagaactgtatttactccacagaagcattgactggaaaaggccccagtggtcaggaaaagtgcaaacttgagaaccacatctcccctgacgtccgtgtgttgccagggggaggagcccatggaagcacacgagatcagagcatctgaactgccctgccttggaggagagacttttgggtgaggtccaaagaggagagctgttcagcttacctgccacagagcttttctgcatgaactctggaacagaaaggccctgtaaagccctcagagagaagagagactccagagaaggctccctaagaccttgagagccatgacaggtccatcagcatgaagttggccaagccatagggcacagcacctccttgtaacaactctatagccctctttgggagatgacatgagtggaactcacagccaccactaccaccactttagacaggaccgaggccacatactccccattctctcgtggctttccatctcagcctcggagggcaacattgacagtcctcctggcttcagctagagaaggatgctggaacaagcggctggtgttgaaagagtgggttgaccaatttggtattgaatgttgcccagccacccctaggaacacctgtccatcacctcctggatggattccactgttagacagctacagggaatgattggtcatggggaagtctctgcgccataagccacgatcccagcgcaaaacccttactcaaatgtcttcattgacttcggtatttcatagtacctgagattttattttgagataccatcagggtgagttgcaccacttgtactcaattctaattgccccctggcaatctgggaagggttcagaaggtgggcacccagccaacagcatgaactcagagcattgttttagggttggaggaggaacacgctttctttacatcactagtgtagactcaaaagatatgcaagtgtcaaatatgcaaaagaaatagtttattcaaagagactgtgtgttactgaagaacagcataaaaatatgatttttttacttgcaaaaatgaaaggaaaaaaataccacgcattgaaatgcccagttcagactgaataattcctgctgcagcaaggaaagtacctactataatagaaattctgttttgttttctgtggttttcaagtt

SEQ ID NO: 23304 - DNA, 3582 bp, Homo sapiens
  source 1..3582: mol_type = unassigned DNA
cgccgccgctgcgcctcgggcagccccagcgagcggcaactcccgggctggcgcggctcgctttctggctccttccgcgcggcgagctcagccccgctcgatttttcctcttctgttccagccctctcttgtctgggtggctgtggcggcggcagggggatggggaccccgtgtggggaaggggttgaagatcgatgaagattattgttcttttaaaggatgccttagcttcctcccgccgcctttcctctgagccttcctactagagaccgtgaaccagagtcagggatgtaaagacagggggaaagcacgccgggagctccagccagccggggagaccctcctctctgtggaggggagggggatttccagcgacaggtcattggcgaaggggatcgtcgcggggagaggctccccggagggagcggggaatcccacagccctttgtggtgcccgagcccgtgccgcctgctgagcggggtctgtgggagctagctttgtcagtggaaatgcctgccccagagggatattgcttcagttgacctcattttttaaggaccctggctctgcggctttgtccagttcaaaatggcagaaaaggctcccccgggcttaaacaggaagacttcaaggtcgacactttcccttcctccagagcctgtggacattatccggagcaaaacatgctccaggagagttaagatcaatgtggggggcctcaaccacgaagtcctgtggagaacgctggacaggctgcccaggacgcgcctggggaagcttcgagactgcaacacacacgagagcctcctggaagtgtgcgacgactataatctgaacgagaacgagtatttctttgatcggcatccaggagccttcacttccattttaaatttctaccggaccgggaaactccatatgatggaagaaatgtgtgcactttcgtttggccaagaacttgattactgggggattgatgagatctacttggagtcctgctgccaggccagatatcatcaaaaaaaagaacaaatgaacgaagaactgaggcgagaggcagagactatgcgagagcgagaaggagaagagtttgataatacctgctgccctgataaaaggaagaaactgtgggacttgctggagaaacctaactcatcagtggctgcaaagatcctggccatcgtgtctatcctgttcattgtgctttccaccattgctttgtctctcaatacgctgccggagctgcaggaaacggacgaatttggacaactcaatgacaaccgccaattagcacacgtggaggctgtgtgtattgcatggtttaccatggagtaccttttgcgattcttatcctcaccaaataaatggaagttcttcaaaggcccactgaatgtcattgatttgctggccatcttgccgtactatgtcaccatttttctgacggagtccaacaagagcgtgctgcagttccaaaacgtgaggcgcgtggtccagatcttccgaatcatgcgcatcctcaggatcctgaaactcgccaggcattcgacaggcctgcagtctctgggtttcacccttaggcggagttacaatgaattgggcttgttgatattgtttctggccatggggataatgatattttccagcctggtattttttgctgagaaggatgaagatgctaccaagttcaccagtatccctgcatcattttggtgggccaccatcaccatgaccactgttggctatggtgacatttaccctaaaacattactagggaaaattgtgggaggtctgtgctgtattgctggggttctggttattgcccttcctatcccaattattgtgaacaatttttctgagttttacaaggagcagaaacgccaagagaaagcaattaaaaggagggaggctcttgagcgggccaaaaggaacggaagcatcgtttctatgaacttaaaagatgccttcgctcgaagtatggaactgatagatgtggctgttgagaaggccggagagtccgccaacacaaaggactccgccgacgataatcacctgtcgccaagccggtggaagtgggccaggaaggctctgtcggaaacaagctccaacaagtctttcgagaataagtaccaggaggttagccaaaaagactcccacgagcagctgaacaacacgtcttcctccagcccacagcatctgagtgcccagaaactggagatgctatacaatgaaatcaccaagacacagcctcattctcacccaaacccagactgccaagaaaagcctgagaggccatctgcatatgaagaagagattgaaatggaagaagtggtgtgtccacaggagcagctggccgtggcacagaccgaggtcattgtggacatgaagagcacctccagcatcgacagcttcaccagctgtgccaccgacttcacagagacagagagatcgccgctgccgccgccctccgcctctcacttgcagatgaagttcccaaccgacctcccagggacagaagagcaccaaagagctaggggccccccgtttctaactctatccagagagaaaggacctgctgccagggatggcacgctggagtatgccccagttgacataactgtgaacctcgatgccagtggctcccagtgtgggctacatagtcctttgcagtctgacaatgccaccgacagtcctaagagctctctaaaaggcagcaacccactaaagtccagatccctcaaagtgaactttaaggaaaatagaggcagtgcaccacagaccccgcccagcacagccaggccactgccagtcaccacagctgacttttcgctcactaccccgcagcacatcagtaccatcctcttagaagaaaccccctcccagggagacagacccttgctgggcactgaggtttcagcgccttgtcagggaccttccaaagggctgtcccccaggtttcccaagcagaaactgttccctttctcttcaagagagaggaggagcttcactgaaatagatactggtgacgacgaagacttcttagagctcccaggggcaagggaggagaagcaggtggactccagcccaaattgctttgcagataagcctagtgatgggagagaccctttaagagaagagggcagtgtgggctcttcctccccgcaggacacaggtcacaactgtaggcaagacatttaccatgctgtgagtgaagtcaaaaaggacagtagtcaagaagggtgcaagatggaaaatcacttgtttgccccagaaattcattccaacccaggagacacaggttattgtcccacacgtgaaaccagcatgtgactagttacaaaagcaataaattgaaacaaaacaaaacaaaacaaaacttgtttcttaaaaatgcggttaataatgcctgtgaactaaaaaaatgggaagccctccccaaaaaaagtgcataaaatgttatttttgcatggcatgaacagtttagcttaagtactgtttaaataatgagtcaagactgcattttgtaacaaaccaacaaaaatgactgaagaacagtgaacaaataaaaagagctctattaggaaccaa

SEQ ID NO: 23305 - DNA, 4086 bp, Homo sapiens
  source 1..4086: mol_type = unassigned DNA
agttccaactgttgtgctgcagcagatttggtctgagtctgggcagagcccctttttatggagcaaccctcccgatttgttacagcaagagcctggtgcaagtgatctttgccttcccatcgcacacaaaggcaaagagctccttaaagggacctgcctgctcctccgtgcagctgcaaacccgtgtcggtgcaggctcagcaacccaggctttcgctcgagaatgagtggggaggggtcttgaggagcccccacgtcctcccggagcggaggcgggagggagctgacagccggagtggatggagaccaccagtccgaggggacccgcttgcgattagctgcttcttgggatgctccgcgcgccagttgagcatcctgcctgtggtccaggggatgctggcggcgcatcttgcggtaagcctgcgctgatttgagccatcgcccagaagcgagcccgcattcagacaccgcggaccggctccgcgaagggctgcgtgcagtcaccatgaatgctcagctctaggcttctgtaaaaacctcccccactgcatggatttggctgtttaatcagccgagattacagcccgggaagatttgcaaacctgattctccctccagctgctgtgacaacttcggggccgtctgtttacttctctgggtccccggggactctttcctgcatcgcagccccttgtgccactttgtgggcttggctcgaaagtcagccgccaggactcctctgacggcatccccaggaagggggagcaaggagggcttaaaagaaaagcagaaatccccgcaactgctcaacctctcgtgactgcctgtgttctggggttctgagagggaccgtgcgctgcctggggaagcaatgcaagtctccatagcctgcacagagcacaatttgaagagtcggaatggtgaggaccgacttctgagcaagcagagctccaccgcccccaatgtggtgaacgcagcccgggccaaattccgcacggtcgctatcatcgcgcgcagcctggggacgttcacgcctcagcatcacatttctctcaaagagtccaccgcaaagcagactggcatgaaatataggaatcttggaaaatcaggactcagagtttcttgcttgggtcttggaacatgggtgacatttggaggtcaaatttcagatgaggttgctgaacggctgatgaccatcgcctatgaaagtggtgttaacctctttgatactgccgaagtctatgctgctggaaaggctgaagtgattctggggagcatcatcaagaagaaaggctggaggaggtccagtctggtcataacaaccaaactctactggggtggaaaagctgaaacagaaagagggctgtcaagaaagcatattattgaaggattgaagggctccctccagaggctgcagctcgagtatgtggatgtggtctttgcaaatcgaccggacagtaacactcccatggaagaaattgtccgagccatgacacatgtgataaaccaaggcatggcgatgtactggggcacctcgagatggagtgctatggagatcatggaagcctattctgtagcaagacagttcaatatgatcccaccggtctgtgaacaagctgagtaccatcttttccagagagagaaagtggaggtccagctgccagagctctaccacaaaataggtgttggcgcaatgacatggtctccacttgcctgtggaatcatctcaggaaaatacggaaacggggtgcctgaaagttccagggcttcactgaagtgctaccagtggttgaaagaaagaattgtaagtgaagaagggagaaaacagcaaaacaagctaaaagacctttccccaattgcggagcgtctgggatgcacactacctcagctagctgttgcgtggtgcctgagaaatgaaggtgtgagttctgtgctcctgggatcatccactcctgaacaactcattgaaaaccttggtgccattcaggttctcccaaagatgacatcacatgtggtaaatgagattgataacatactgcgcaacaagccctacagcaagaaggactatagatcataaggcaatgcatgaaccacagaagctgcatggttaaaatagcggcctgtgcccagtacagaaaggtgttactaaccagtcttttgaatcacttagcagcttgctgctcaacctctagtgtccctccctggattctttgaggtgtctgctgtcgctaccactgtgcacatctgaaaactcacaaccaagaaaatccattctattttcttatcttggactggagtcacctattcttgcattgctgtatacacctcatgcttatgcaatgggaagaatatgggggccagggggtgtggtactaccttcaggcatttggtaactcaaagaaggctgtacagatatattttttcaaaagaacaaaatccacagatgcaatgtgagttgcgtaagaaacagagtagatagactaaattcagtgaaggaaaggaattgagagatttttcttagtaaatagattattgttaagtaaatagttattaaaaatatatctcactgcaaaaaaaaaaaagcagtatcttcactcaaaagtcttgcttggaagaataagcagaaataattttatatattttttttctattttcacattcatactaacaagttttgttccatttgttattcaataaaacaaaaatttctaggtatttgctttattacctttcaaatatttactgttgcttggccccaagaatggccttgtacaacttatccagaatgtctattaggattctaatgttatgtccacttacaagtagagacagtaaaaggatgaatacccaatctttagtgacaatgcagctgatttatgaaagagagggctacactgctatggaaacttagcttcaaagaaaatgcaatgtatctgcaattaggtgttcattttttactacattttattaaaacctgctttatactttcaactgcttgtaggcacaacttctgcaagtttaaatatttgagctttacaaataaacatacacatgctcagttttttaagtaaacctgtaaaatacccaggaaggcaaatgttcattgtttaattagcactgggattttataatataatgtttggtatttttgaggcattgttaacatgaaagtcaaccactggctttgtgaaaaatgctatgtcactattcagaatatgctgggtaaattgacttgcctagtgaaaagcaaaatgttaaagaaagaacttctggttctataatcatattatatgcactaaactatatgcatgaaagttctttgcatggattaatggggcttacccttgttgcactcgaaatctgaggtgtatctagccctgccactattggctacttaccctcattaatatcccacttgagaaaaattgtgagactatactgtgtcaatatctgtaaaaagagagaaaacatgttttgtttttttttgaagggggtggtgtgggagtggccctttaactctatttggctatctgaggatgtacaaaattctcatttaattttctggtcagcaagttccccacacagaaatcactctgaggtttacagaagaactgtaatattattttaaaatgcgatttttctgtcattagttctagatatgtacttcatggttaaattctaaatctgaaaatgctagtgggagatatcaagaaattttctttttgattactagtacctgtattctaacagagagtttgaattttttgcccgtgttatcagaatgatggaaattgatcattttcagttgttcattgtgtattcaatccagcgaactgctgtatgtatagaggagctgaggtgctgtctaatgggaaatgtgatttgattgatttatttgcttagagtaataaaagcattttgtgcattcaatcttacaatagattttatctgatctttcactgtaaggcttatgtgtattttccatatatgtaaaacatacacatgtaaaatatatgtggccataaattaggcaataatcatctaaataaaaattatattggcagctaagctgcactgaatactcaa

SEQ ID NO: 23306 - DNA, 1806 bp, Homo sapiens
  source 1..1806: mol_type = unassigned DNA
agtgacttccagtcttctctgaaagatctccacgatgctggcagcccggacaggggcagcggggagtcagatctcagaggagaacaccaagttaaggagacagtctgggttttctgtagcagggaaagacaaatctcccaagaaagcctcagaaaacgctaaagacagcagccttagtccctcaggggaaagccagctcagggcgcgtcaactggctctgctgcgcgaagtggagatgaactggtacctaaagctctgcgacctgtccagcgagcacaccaccgtctgcaccacaggcatgccgcacaggaatcttggaaaatcaggactcagagtttcttgcttgggtcttggaacatgggtgacatttggaggtcaaatttcagatgaggttgctgaacggctgatgaccatcgcctatgaaagtggtgttaacctctttgatactgccgaagtctatgctgctggaaaggctgaagtgattctggggagcatcatcaagaagaaaggctggaggaggtccagtctggtcataacaaccaaactctactggggtggaaaagctgaaacagaaagagggctgtcaagaaagcatattattgaagaaattgtccgagccatgacacatgtgataaaccaaggcatggcgatgtactggggcacctcgagatggagtgctatggagatcatggaagcctattctgtagcaagacagttcaatatgatcccaccggtctgtgaacaagctgagtaccatcttttccagagagagaaagtggaggtccagctgccagagctctaccacaaaataggtgttggcgcaatgacatggtctccacttgcctgtggaatcatctcaggaaaatacggaaacggggtgcctgaaagttccagggcttcactgaagtgctaccagtggttgaaagaaagaattgtaagtgaagaagggagaaaacagcaaaacaagctaaaagacctttccccaattgcggagcgtctgggatgcacactacctcagctagctgttgcgtggtgcctgagaaatgaaggtgtgagttctgtgctcctgggatcatccactcctgaacaactcattgaaaaccttggtgccattcaggttctcccaaagatgacatcacatgtggtaaatgagattgataacatactgcgcaacaagccctacagcaagaaggactatagatcataaggcaatgcatgaaccacagaagctgcatggttaaaatagcggcctgtgcccagtacagaaaggtgttactaaccagtcttttgaatcacttagcagcttgctgctcaacctctagtgtccctccctggattctttgaggtgtctgctgtcgctaccactgtgcacatctgaaaactcacaaccaagaaaatccattctattttcttatcttggactggagtcacctattcttgcattgctgtatacacctcatgcttatgcaatgggaagaatatgggggccagggggtgtggtactaccttcaggcatttggtaactcaaagaaggctgtacagatatattttttcaaaagaacaaaatccacagatgcaatgtgagttgcgtaagaaacagagtagatagactaaattcagtgaaggaaaggaattgagagatttttcttagtaaatagattattgttaagtaaatagttattaaaaatatatctcactgcaaaaaaaaaaaagcagtatcttcactcaaaagtcttgcttggaagaataagcagaaataattttatatattttttttctattttcacattcatactaacaagtttt

SEQ ID NO: 23307 - DNA, 3301 bp, Homo sapiens
  source 1..3301: mol_type = unassigned DNA
atgcacaggcctgggcagggacacacaaccaacagctctgtcgggaacttaggagcctgctcgcctacaaaaatgataagagagatctaaagaaaacaagctaaaccttttgagggacatactgaagccagataacccaaggtattcacagcaagatacagtgagtcttaaagttaagcaccgtgcaattagctttgcttccttgggtttttgaaacatgcatctgtataaacctgcctgtgcagacatcccgagccccaagctgggtctgccaaaatccagtgaatcggctctaaaatgtagatggcacctagcagtgaccaagactcagcctcaggcggcctgcaaacctgtgaggcccagtggagcagccgaacagaaatatgtggaaaagtttctacgtgttcatggaatttcgttgcaggaaaccaccagagcagagacgggcatggcatacaggaatcttggaaaatcaggactcagagtttcttgcttgggtcttggaacatgggtgacatttggaggtcaaatttcagatgaggttgctgaacggctgatgaccatcgcctatgaaagtggtgttaacctctttgatactgccgaagtctatgctgctggaaaggctgaagtgattctggggagcatcatcaagaagaaaggctggaggaggtccagtctggtcataacaaccaaactctactggggtggaaaagctgaaacagaaagagggctgtcaagaaagcatattattgaaggattgaagggctccctccagaggctgcagctcgagtatgtggatgtggtctttgcaaatcgaccggacagtaacactcccatggaagaaattgtccgagccatgacacatgtgataaaccaaggcatggcgatgtactggggcacctcgagatggagtgctatggagatcatggaagcctattctgtagcaagacagttcaatatgatcccaccggtctgtgaacaagctgagtaccatcttttccagagagagaaagtggaggtccagctgccagagctctaccacaaaataggtgttggcgcaatgacatggtctccacttgcctgtggaatcatctcaggaaaatacggaaacggggtgcctgaaagttccagggcttcactgaagtgctaccagtggttgaaagaaagaattgtaagtgaagaagggagaaaacagcaaaacaagctaaaagacctttccccaattgcggagcgtctgggatgcacactacctcagctagctgttgcgtggtgcctgagaaatgaaggtgtgagttctgtgctcctgggatcatccactcctgaacaactcattgaaaaccttggtgccattcaggttctcccaaagatgacatcacatgtggtaaatgagattgataacatactgcgcaacaagccctacagcaagaaggactatagatcataaggcaatgcatgaaccacagaagctgcatggttaaaatagcggcctgtgcccagtacagaaaggtgttactaaccagtcttttgaatcacttagcagcttgctgctcaacctctagtgtccctccctggattctttgaggtgtctgctgtcgctaccactgtgcacatctgaaaactcacaaccaagaaaatccattctattttcttatcttggactggagtcacctattcttgcattgctgtatacacctcatgcttatgcaatgggaagaatatgggggccagggggtgtggtactaccttcaggcatttggtaactcaaagaaggctgtacagatatattttttcaaaagaacaaaatccacagatgcaatgtgagttgcgtaagaaacagagtagatagactaaattcagtgaaggaaaggaattgagagatttttcttagtaaatagattattgttaagtaaatagttattaaaaatatatctcactgcaaaaaaaaaaaagcagtatcttcactcaaaagtcttgcttggaagaataagcagaaataattttatatattttttttctattttcacattcatactaacaagttttgttccatttgttattcaataaaacaaaaatttctaggtatttgctttattacctttcaaatatttactgttgcttggccccaagaatggccttgtacaacttatccagaatgtctattaggattctaatgttatgtccacttacaagtagagacagtaaaaggatgaatacccaatctttagtgacaatgcagctgatttatgaaagagagggctacactgctatggaaacttagcttcaaagaaaatgcaatgtatctgcaattaggtgttcattttttactacattttattaaaacctgctttatactttcaactgcttgtaggcacaacttctgcaagtttaaatatttgagctttacaaataaacatacacatgctcagttttttaagtaaacctgtaaaatacccaggaaggcaaatgttcattgtttaattagcactgggattttataatataatgtttggtatttttgaggcattgttaacatgaaagtcaaccactggctttgtgaaaaatgctatgtcactattcagaatatgctgggtaaattgacttgcctagtgaaaagcaaaatgttaaagaaagaacttctggttctataatcatattatatgcactaaactatatgcatgaaagttctttgcatggattaatggggcttacccttgttgcactcgaaatctgaggtgtatctagccctgccactattggctacttaccctcattaatatcccacttgagaaaaattgtgagactatactgtgtcaatatctgtaaaaagagagaaaacatgttttgtttttttttgaagggggtggtgtgggagtggccctttaactctatttggctatctgaggatgtacaaaattctcatttaattttctggtcagcaagttccccacacagaaatcactctgaggtttacagaagaactgtaatattattttaaaatgcgatttttctgtcattagttctagatatgtacttcatggttaaattctaaatctgaaaatgctagtgggagatatcaagaaattttctttttgattactagtacctgtattctaacagagagtttgaattttttgcccgtgttatcagaatgatggaaattgatcattttcagttgttcattgtgtattcaatccagcgaactgctgtatgtatagaggagctgaggtgctgtctaatgggaaatgtgatttgattgatttatttgcttagagtaataaaagcattttgtgcattcaatctt

SEQ ID NO: 23308 - DNA, 3122 bp, Homo sapiens
  source 1..3122: mol_type = unassigned DNA
agaaaaatcaattcagattactttgatgacagtgacttccagtcttctctgaaagatctccacgatgctggcagcccggacaggggcagcggggagtcagatctcagaggagaacaccaagttaaggagacagtctgggttttctgtagcagggaaagacaaatctcccaagaaagcctcagaaaacgctaaagacagcagccttagtccctcaggggaaagccagctcagggcgcgtcaactggctctgctgcgcgaagtggagatgaactggtacctaaagctctgcgacctgtccagcgagcacaccaccgtctgcaccacaggcatgccgcacaggaatcttggaaaatcaggactcagagtttcttgcttgggtcttggaacatgggtgacatttggaggtcaaatttcagatgaggttgctgaacggctgatgaccatcgcctatgaaagtggtgttaacctctttgatactgccgaagtctatgctgctggaaaggctgaagtgattctggggagcatcatcaagaagaaaggctggaggaggtccagtctggtcataacaaccaaactctactggggtggaaaagctgaaacagaaagagggctgtcaagaaagcatattattgaaggattgaagggctccctccagaggctgcagctcgagtatgtggatgtggtctttgcaaatcgaccggacagtaacactcccatggaagaaattgtccgagccatgacacatgtgataaaccaaggcatggcgatgtactggggcacctcgagatggagtgctatggagatcatggaagcctattctgtagcaagacagttcaatatgatcccaccggtctgtgaacaagctgagtaccatcttttccagagagagaaagtggaggtccagctgccagagctctaccacaaaataggtgttggcgcaatgacatggtctccacttgcctgtggaatcatctcaggaaaatacggaaacggggtgcctgaaagttccagggcttcactgaagtgctaccagtggttgaaagaaagaattgtaagtgaagaagggagaaaacagcaaaacaagctaaaagacctttccccaattgcggagcgtctgggatgcacactacctcagctagctgttgcgtggtgcctgagaaatgaaggtgtgagttctgtgctcctgggatcatccactcctgaacaactcattgaaaaccttggtgccattcaggttctcccaaagatgacatcacatgtggtaaatgagattgataacatactgcgcaacaagccctacagcaagaaggactatagatcataaggcaatgcatgaaccacagaagctgcatggttaaaatagcggcctgtgcccagtacagaaaggtgttactaaccagtcttttgaatcacttagcagcttgctgctcaacctctagtgtccctccctggattctttgaggtgtctgctgtcgctaccactgtgcacatctgaaaactcacaaccaagaaaatccattctattttcttatcttggactggagtcacctattcttgcattgctgtatacacctcatgcttatgcaatgggaagaatatgggggccagggggtgtggtactaccttcaggcatttggtaactcaaagaaggctgtacagatatattttttcaaaagaacaaaatccacagatgcaatgtgagttgcgtaagaaacagagtagatagactaaattcagtgaaggaaaggaattgagagatttttcttagtaaatagattattgttaagtaaatagttattaaaaatatatctcactgcaaaaaaaaaaaagcagtatcttcactcaaaagtcttgcttggaagaataagcagaaataattttatatattttttttctattttcacattcatactaacaagttttgttccatttgttattcaataaaacaaaaatttctaggtatttgctttattacctttcaaatatttactgttgcttggccccaagaatggccttgtacaacttatccagaatgtctattaggattctaatgttatgtccacttacaagtagagacagtaaaaggatgaatacccaatctttagtgacaatgcagctgatttatgaaagagagggctacactgctatggaaacttagcttcaaagaaaatgcaatgtatctgcaattaggtgttcattttttactacattttattaaaacctgctttatactttcaactgcttgtaggcacaacttctgcaagtttaaatatttgagctttacaaataaacatacacatgctcagttttttaagtaaacctgtaaaatacccaggaaggcaaatgttcattgtttaattagcactgggattttataatataatgtttggtatttttgaggcattgttaacatgaaagtcaaccactggctttgtgaaaaatgctatgtcactattcagaatatgctgggtaaattgacttgcctagtgaaaagcaaaatgttaaagaaagaacttctggttctataatcatattatatgcactaaactatatgcatgaaagttctttgcatggattaatggggcttacccttgttgcactcgaaatctgaggtgtatctagccctgccactattggctacttaccctcattaatatcccacttgagaaaaattgtgagactatactgtgtcaatatctgtaaaaagagagaaaacatgttttgtttttttttgaagggggtggtgtgggagtggccctttaactctatttggctatctgaggatgtacaaaattctcatttaattttctggtcagcaagttccccacacagaaatcactctgaggtttacagaagaactgtaatattattttaaaatgcgatttttctgtcattagttctagatatgtacttcatggttaaattctaaatctgaaaatgctagtgggagatatcaagaaattttctttttgattactagtacctgtattctaacagagagtttgaattttttgcccgtgttatcagaatgatggaaattgatcattttcagttgttcattgtgtattcaatccagcgaactgctgtatgtatagaggagctgaggtgctgtctaatgggaa
